United States Patent Application Publication US 2026/0097106 A1 - sequence listing, part 7

SEQ ID NO: 23 - DNA, 128021 bp, Escherichia coli
  source 1..128021: mol_type = genomic DNA
cggagtggacgcatcactggtgttcgggttgtcatgccaatggcactgcccggtagctaaatgcggaagagataagtgctgaaagcatctaagcacgaaacttgccccgagatgagttctccctgactccttgagagtcctgaaggaacgttgaagacgacgacgttgataggccgggtgtgtaagcgcagcgatgcgttgagctaaccggtactaatgaaccgtgaggcttaaccttacaacgccgaagatgttttggcggatgagagaagattttcagcctgatacagattaaatcagaacgcagaagcggtctgataaaacagaatttgcctggcggccttagcgcggtggtaccacctgaccccatgccgaactcagaagtgaaacgccgtagcgccgatggtagtgtggggtctccccatgcgagagtagggaactgccaggcatcaaatttagcgtgctgatatggctcagttggtagagcgcacccttggtaagggtgaggtccccagttcgactctgggtatcagcaccactttttaggttaaagttcggcagattagaaaagaatttgtctggcggcagtagcgcggtggtcccacctgaccccatgccgaactcagaagtgaaacgccgtagcgccgatggtagtgtggggtctccccatgcgagagtagggaactgccagacatcaaataaaacataaggctcagtcggaagactgggccttttgttttatttgatgtttgtcggtgaacactctcccaaccaggacaaatccgccgggaacggatttgaacgttgcgaagcaacggcccggagggtggcgggcaggacgcccgccataaactgccagacatcaaatcaagcgaaaggccatccgaaaggatggcctttttgcttttcgaactaacattcaattaatggattacctgcgataaaaatgccctcgtacgctctgatttaggatgcgcaaaaaattcatcaggtgcagcttgttccactatctccccacgatccataaaaattacccggtcagcgacggtacgtgcaaaccccatctcatgtgttacacacaacattgtcatacccgactgcgccagcccaatcatcgtatccagcacctctttcaccatctccggatcgagcgccgacgttggctcatcaaacaacataattttcggcttcatacacagcgaacgcgcaatggcaacgcgttgctgctgaccaccagaaatttgtccgggaaacttatgcgcatgttcggcaattctcacccgctcaaggtaatgcatcgccagagcttcagcctctttctttggcatcttgcgtacccaaatcggtgccagggtacagttctgtagaacggtcagatgagggaagagattgaaatgctgaaagaccattcccacttcctgccggacgcgctcaatattgcggatatcttcattaagttcgatgccatctaccacgatccgtccctgttgatgttcttccagatgattaatacaacgaatggttgtcgatttaccggaacctgaagggccacacagaacgatccgttctcccggttgcacggttaaatttatatttttcaaaacatggaattgtccataccatttattgacgttttccagcgtaatcatcgcgttagcaggttgcagtaaaatttggctcatagtgtcctcaatgcggtgtacgcccggtgttaaaacgtttttccagatgctggctatagcgcgacatgctgaaacagaagatccagtagatcagcgcggcgaaaacatacccttccgtcgacatacccaaccaggtgggatcaacggttgcctgctgaacgctactgaaaagatcgaacaacccgataatgatcaccaggctggtatctttgaagagtgcgatgatggtatttaccagcccaggaattaccagcttcaacgcctgtggcagaataaccagcccctgagttttccagtaacccaacgccagcgactctgccgcttcatattgccctttaggcagcgcctgtaatccgcctcgcacgacttccgcaacatatgctgactgaaacaggatcacgccaaccagcgcgcggatcagtttgtcgatattggtgccttctgccataaacaaaggcagcatgaccgaagacataaacaatacggtaatcagcggtacgccgcgccagaactcgataaaaatgaccgataagatacgcacaatcggcatatgggagcggcgacctaacgccagtaagatcccccacggtagcgcccccgcaatcccaacggatgcaataattaaagttagcgtcagcccgccccattgccgggtttcaacccgctccagaccaaaaaaaccgccatacatcagccaccagacaatcagtgggtaaatcaccgcccagaccgcaatatagcgaccgcgatgcgggagtattttccagaacattggtgcgattgacacaaggccaatcagtaatgccaggttaattcgccagcgttggtcgtgtgggtaaagtccatacataaactgaccaaatcgttcgtggatgaagacccaacaggcaccggcttttgtgcagtcggcacgcgttgagccaacccaattagcctgcaaaaatgcccagttcagcaacggtgggatcagttcccacatcaaccatatgcagccaatagtcagcaggctattgctccagctggagaacagattttttcgcacccacaccatcgcgcggcttgagttatggctcgctgggcgcgagggctgagacagcaatacttttgtcatcatgactccttagcgttcaacgatcgcgatgcggcggttatagatattcatcagcagcgagatagtcaggctgataatcagatagaccgacatggtcatggctatcgtctcgatggcttgccccgtctggttcagcacggtgccagcaaacagcgaaaccatatcgggatagccaatagcggcggcaagagaggagtttttgacgatgttgagatactggctggttaacggcggaataatcactcgcagtgcctggggaataatgacctggcgtagcgtaaccgggttgggtaatcccagtgaccgagccgcttcatgttgaccataaggcactgcctggatcccagcgcggataatctcggcgataaatgcagatgtataaaccgaaagtgccagcgttaaggctgccagttcaggaattaaaaccatcccgccgcggaagttaaagcctcgtagggctgggacatcccagtgtagtgctgcgccaaaaagccattgcgccagtaaaggcaaaccaatgatcaacactgcggcgatcggccaagtgcggcgcagttgtccggtctttatctggtatgttttattaaagcggaatagcccaacagaaaggactatagccataacaacagccaggataaacgcaataaatccgtctcccagctgcggtgacggaatataaagcccacgattgctcaaaaaggccagatcaaacgcgctcacagcctggcgtggtccgggcaaattgcgcaacacggcaaagtaccagaagaagatttgcagcagcgggggaatattacggaagatctcaatataaattgtggatagttttcgtagcagccagttatccgaaagtctcgccagaccgataaagaagcctaaaacagaagcgaacacaatacacaatgcagaaaccagtagcgtattgagtaagccgacaataaaaacgcgtccgtaggtgtcgccctgctggtaatcgatcaaatgctggacaataccgaagccagcgccgcgatccagaaaggcaaaacctgaagtaatgccacgattattgagattcgttacagtgttgtgaaataaccaaccaacaatgccgacaacagcaacaacggcaaggatctggaataaccaggcgcgaaccgtagggttggcaaaagagagtgagcctttaacggttgagcggcgatgagacatagaaacctcggaaagcataacgctgaagagagcgccgccgtagcgacgcccgttacctcacaccgacttaacgcacgggcggcgcgtactgaataccgccgttattccagagattattttgcccacgtttaattttcagcgggctttctgaacctacgttacgctcgaaaatttccgagtagttacccacctgtttgatgatgttataggcccatttattatccagcttcagatccttgccgtaatcgccttctttacccagcagatgtgccatatcaggcgttgctggattagccgctttttcatcgacgttctgggaattgatgcccatctcttcagcattcagcatggcgaaaagcgtccagcgtacaatcgagaaccattcatcatcgccacgacgaactaccggcccaagcggttctttagagataacctccggtaagacaatccattcagctgggttgcttaatttgatgcgcagggcatacagttgcgactgatccgaggccagcgtatcgcagcgaccagattccagtgccttcgctgattcgtaagagcgatcgaaagtcaccggtgtgtacttcatattgtttgccttgaaatagtcggcaacgttgagttcggtatcagtacccgcctgaatacagacggtagcgccatccagttctttcgcgctttttagccccgctttatcgtgcgtcaggaagccaatgccgtcgtaataagtgacgccagtaaatgccattcccatcccggcgtcgcgagatgaagtccaggtcgtattacgggagagcaaatccacttcccctgactgtaaagccgtgaagcgttcttttgctgtgagtggggtatatttcactttcgtgtcgtcaccaaatacagcagcggcaacaccacgacaaacatcaacatcaatacctgaaaacttaccgtctgcatcggcataagagaacccaggtaatccatcactgatcccgcattgcacaaaaccttttttctgaacggcatcaagcgtcgcgccagcatgcgcctgatttgcaacggcaagcagcacgctggcggcagccagtgtggctatcatcatctttttcataatgcttcctgtgaggcgaaaattatcgttataggacgtttgggaaacgtcttttacctgtctgtggccatcctcttataagcaaaagtagtgccagcttttgcgcccgatttcgcgtcgcaataagctgagtgtagacaggaaataataaaaacagcgccccgcaatggtgcgaaaatgaaacatgcgccacattttggcgcaaaatatttacgcgtgttttactaagcagaataatgattgttagcgtgagtatatttctggtgggaagtgtgaaagttaaattgatgcgttatttcgaaagcagcgaaataacgcgatataacatgctaaatcagcagagaattagccagcagaatatagcaatattttatcttatgtaaagatactgtatcgttaaacagaacgcgaaactccgcgccctgttcagttatttcgacagagcgatgatccccatcgtcaggccagcaacagccgctgccccgccggcaatagccccagccgtttcccagttatcctgagtcgtgcctttcatacaggtattggtgtgaaccagacgaccctgatcgtcataaaccggaacgcagggcgaatcgtgagcacagcccgccagcaatgcggtgagcaatgccacaggaattaatcttttcatggtgttacctcagtaataaacgctaacgcttaataagttaactctcttattaacgagctgaatgccattttatcaccggaggttataaatattgcggaatgaataatgacaaattatgtgaattgtaaaaatagtgaagggagcgggaactatagaaagtttttaaagagtgagtggaagaatatcttattaatttttatgggtttcactgaaaataataaaggcacccgaaagtgcctttatgtttctgatttatcctttaaagcaacggcggatcaccacaaagaacaccggtacgaagaagattgccagcaacgttgcagagaccattccgcccattaccccgatacccactgcgttctgcgcgccactgccggcaccgttactgatagctagcggtaatacgccgagaataaaggcgagagaggtcatcaggataggacgcagacgcatacgtactgccattagtgtcgcttcaacaacacctttaccctctttctccatgagatctttagcgaactcaacaatcaaaatagcgtttttggccgacaagccaattgtcgttagcaagcccaccataaagtagacgtcatttttttgattaaagagtgtcgccgccagcagcacgccgacaatccctaacggcacgaccaacataaccgagacaggaattgaccagctttcatagagtgcagcaaggcacaggaaaacaaccacaaaggaaattgctaccagagcgggagcctggtttcccgataagcgttcctgatacgacatacccgtccagtcataaccaatgccagcaggtaattttgacgcaaggttttccatcaacgccatggcatcgccggaactggttcctggcgcggcttccccctgaatctccattgacggcagaccgttgtagcgttccagtcgcggagagccatacacccaatgtgaagtggtaaaggccgagaatggcaccatttcgccgttggcgctgcggacataaagtttatcgacatcttctggcagcatacggaatttggcatccgcctgaacatacacctttttcacgcgaccacggtcgatgaagtcgttaacgtaagtcccacccaacgccgttgaaatggtctgattgatgtcagaaagtgaaacacctaatgcctgcgccttttcctggtcaacttccagtttaaactgcgcggtgtcttccaggccattaggacgcacgctgactaagctggcaggatgttgcgccgccatgccaagcaactggttacgggcctgggtcagggcatcgtgacccagcccagcctgatcaattaactcaaagtcgaaacccgttgccgtgcccagttcaacaatggctggcatattgaatggaatgacaaaaccgtcgcggatcttgcccaattccattttggcacgatggattaccgcttccgcactgttttcatcaccattacgctcttcccacggtttcagactgacgaaggccataccggcgttttgtgcctggccgctgaagctaaagccgttaaccgtaaagacactttcaacgttcgctttctcgttcttcagatagtaatccgtcacttgatccaacactttttacgtccgctcttgcgtcgcgccagcgggtaactgaatcatggtcagaaagacaccctgatcctcttcaggtaagaaggaagacggaagacgtaaaaacaacaccaccattcctgcaacaatcagcgcatagatcagtaaatatcgtcctgtggaaccgaggattttgccgacgctgttggtgtagtggttaacgctatgatcgaaggtggtattaaaccagccgaagaaaccacccttattttcgtgatgctcagctgaggtgggtttgagcagtgttgcacataacgcaggggtaagaatcaatgccaccagaacagaaagcgccattgccgaaacgatggtgatagagaactggcgataaattgccccagtagaaccgccgaagaatgccatcggaataaataccgctgacagcaccatcgcgatacccaccagtgcgccctgaatttgcgacatcgatttttccgtcgcttcttttggcgggagcttatcctccatcatcacgcgctcgacgttctccaccaccactatcgcatcatcgacgagcagcccgatggcaagcaccatcccgaacatcgttagtgtgttgatggagtaaccaaaagcggcgaggatggcaaacgtccctaataacaccacgggtaccgcaatggtggggatcagcgttgctcgcatattctgcaagaacagatacatcaccaggaacaccagcataatggcttcgaacagcgtttttaccacttcgtgaatagaaagctggacgaatggcgtggtgtcataagggtagagaaccttcattccctgcgggaagaatggctgtaattccgccagttttgccttaatggctttcgcggtatcgagagcattcgcgccggttgccagcttaatccccaggcccgccgccggttttccgttgatacgagcgataacgttatagttttcaccgccaagttcaacccgtgcgacatctttcaggcgtaccaccgagccgtcactgtttacgcgcagggtcactttgccgaattcttccggattttttaaccgcgtttgagcaataatcgaggcattcaactgttgccctggtaacgctggcgttccgcccaactgtccggcagcgatctgatcgttctgtaccttcaactggttaatcacatcaaccggtgtcagtttatatttgtttagcagatcggcgtccagccagatacgcatcgcatactgtgcgccgaaaagctgtacgtcaccgacgccattcagacggctaagcgtatctttaacgttagaggccacatagtccgagatatcgtcctgtgtggtgtctgggttatcagagacaaagcccgccaccatcaaatagctgctactggacttttcaacactgatcccctgctgctgaacctcctgcggcagcaacggcgtggcgagctggagtttgttctgtacctgcacttgcgcgatatcaggatcggtcccggactggaaggtaagggtaattgtcacgctaccggcggaatcgctggtggaggacatatacatcaggttatcgataccattcatattctgttcgataacctgcgtcaccgtatcctgcacggtctgcgcatcagcacctggatagtttgccgaaacagaaaccgcaggcggtgcaatggttggatactgagcgacgggcaattgtaggatcgccagtgcgcccgccatcatcagaataatggccagcacccatgcaaatatcggtcgtcgaataaaaaagtttgccatgtcagattaccttacttcgatgcagtatctgcgggggtatcggtagtggctttaacctgctctcccggacgcgctttttgcaggccgctgacaatgacttgatcgccagatttcagaccttcgctaatcaaccatttatcgccaatcgcctgactggcaacgacagggcgcgcttccacctgacttttatcgttaacaatcagcacggttgcatcaccacgcggtgtgcggctaacgccttgttgcgggataagaatggcgtcaggttggacgccttcatcaatccgtgcacgcacaaacatacccggcaaaagcgtatgttgcgggttagggaagacagcacgtagggttatggagccggtgctttcatcaacggtcacatcagagaattgcagcgtacctttcaggggataggtttgaccgttttccatgaccaactctacgttgctggtggcgttttccttatgcaaatttccttgctctacggattgcttcagcctcataaaatcgttgctggattgggtcacatcaacgtagataggatcgagctgctggacagtcgccagttcagtcgtttgcccattagtgacaagagcgccttcggtcacggtcgatttgccgatacgtccgctaattggcgcagtcactttggtataagcgagattgatgcgagcgctttcgactgtggcttttgcggcaatcacggcggcatcggcctggcgagcatcagcaatggcctggtcgtactcctgctggctgatgtatttcgtacccacgagcggaacgtaacgttttaccgtcaaatgcgcgatggcggcggcggcttcacttttcgccagttcgcctttcgcgctgtcataatttgcctgataggtcgcgggatcgatctggtacagggactggcctgcttgtacatcgctgccttcagtgaaattacgattcagtacgatcccgctaacctgtgggcgaacttcggctatacggtaagcattggtgcggcctggtaattcagtcttaacttctaacggggccgttttcacaatatgaacggtaacctgcggttcaccgacgtgagctttctcttctcccttatcgttacaaccggcgattaaagccgcggagatcagaataaaggagggcaggaggaaaaacctggcatgtttcgtcattactattcctcaaaaaaccaaaagcgcgttatttacccagaaaggcaacgcgttaactcgcagaaagaaaaatacagtttgctatcctacaaattatcattcgtcgatgtaaggaatagttatgaatactggcgtctcaaggcacataaacacaaaaaaagattaatattctactgttttattttgacgcgggttgaaagaggcagaattaaaacctcgtaaattgaaatatatattgatgtagtgaatgtatcttaggtaaataatatatattatttatttgacgatttatagcaactcaatattagcctctcgtataaatacacattaggtgatagattaaccttcgctattttctcactctgtgtcgaatatatttatttcctgaataattaatcatggcaaaaagaaccaaagccgaagctctgaagacccggcaagaactgattgaaactgccatcgcccagtttgcgcagcatggcgtaagcaagacgacactcaacgacattgccgacgctgctaacgttacgcgtggcgctatctactggcacttcgaaaacaagactcaactgtttaatgagatgtggttgcaacagccttcattgcgggagttaatccaggaacacttgacggctggattagagcatgacccgtttcaacaattgcgtgaaaaattgattgtcggcttgcaatatattgccaaaattccccgccagcaggcgttgctgaaaatcttatatcacaaatgtgaatttaatgatgagatgctggccgagggagtgatacgcgaaaagatgggctttaatccgcagactctccgcgaagtattgcaggcgtgtcagcaacaaggttgtgtagcaaataacctcgatttagatgttgtgatgattattattgatggtgccttcagcggaattgttcaaaactggttaatgaatatggcgggttatgatctttataaacaagcacccgcgctggtcgataacgtattaagaatgttcatgccagatgaaaacataacgaaattaattcatcaaacgaatgaattaagtgtcatgtaaattcacattctgtcctgaaaattcagttcgtcacagttaaccagttttagtggattaactgagttcatattgcggcatttgtctgtttctgttgccagcagttcaatccactgcatcagtaaagtatcaaacagaaaaacgaagacagcgaaaacgacgagccaccaatacttgcgaatcattacctgagcctgtgcatgtttaaccaagtctggcaggaaatatacacgaaatgaataatctgaaaaccaggcttacacttcctttactttgcaatgagatcggggtcaacttcgctaacccggcatcgttttgaccggttgcccgtctttctttttttcactttcgccagttcttccgcggagtaatgcgacgcgacatccagccgtcgaagccccattttgatgtactcgctgttgatctcaataccaatgaattttcgcccgctggagacggctacggcaccggtagtaaagctaccggcaaacgggtcgagaacgatatcgcctgggttggaagaggcgagaataatgcgtttcagtaaggcttccggtttttgcgtcgggtggttctcatattcatccattaaataacgcacgcgcggaaaatcccagacgttacccggtactttttgatgattgtatggctgtggaggatttttgcgataatcgatcaacgcgcgctgcgatccggttttggcttctaccagaatagcatcaccgttgaatgtgtagttctttgcgtctttcaccatcatcaggatgggttcgtacatggagccgtagtgttttttcgcctgtactccagaactgtcatatgaccagacgatgcgacttttgatggtaaaaagcttgcggcactggagatcgataaagggcatgttttccgtactgttcataatgtacatgctgccctgctttttcagaacgcggtggcactctgcaatcacttcaaacagccagtcgataaacagatcttctttccaggcttcgatcagaccatcaaaatttttaccgatgttatacggtgggtcggcaaagatcagatcgacgctttcagtaggtagctttttaagttcggcaagggcatcaccgtgaataatggtcttagcttcattaccaaaccgggtcggttcacatcctgttctcatggtcactccctttgtgacacctataaaaaaggcgcttccccatgccgagtagcgcctttttaatcaagcatttagctaacctgaattagttcatgccgtattttttcaattttttacgcagcgtaccacggttgatgcccatcatcagcgcagcacgggtctggttaccacgggtgtattgcatcaccatgtccaacaggggctgttctacttcagccagtaccagctcatagaggtcattcacatcctgaccattcagttgagcaaaatagttcttcagtgcctgtttaaccgagtcacgcaggggtttttgggttacctgatcctgagagttaacggtagaaacggtcagtacgtcagaatttacgcgttgttcgaacatagttctgtcagctctttatttctgtttacgcaaaattttcgaagtatgcctccaacgcctccagctgttcgctggcatcctcaatggcgttgaatgtgcgccgaaactggtcatttggagcgtgttcctggagataccaggaaacgtgtttacgtgcaattcggtacccttttgccggaccataaaagtcatgcagttcccgaacgtgcgcgcaaagcaagcgcttaacctctgccaaaggcagcgggggcagcaactccccagtgtccagataatgctggatttcccgaaagatccagggtcttccctgagctgcgcggcctatcatcagggcatccgcccctgtatagtcgagcacagctctggctttaagcgggtcagtaatgtcgccattcgcgataaccggaatggaaactttctgcttaactgcccgaatactgtcgtactcagcttctccattgaacaaacaggcgcgtgtacggccatgaatggtcagagcctgaatgccacagtcttcagccagttgggcaatctcttcgcagttacggtgttccggtgcccagccggtgcgaatcttcagggtaacaggaacgtccactgcattgacgacctcggtaaggatcgatttaacgacatccgggtactgcaaaagggctgaacctgcgagcttgcgattcacttttttagccgggcaacccatattgatatcaataatctgggcaccgctttccacgttaatacgtgctgcatctgccatttctttcggatcgctaccagcaatttgcacggtgcgaataccgggttcatcaatgtgcaccatccgtaaacgagatttgtcgctttcccaaacctgtgggttagaagacatcatctcggatactgtcaatccggctcccatctcgtagcacaacgtccgaaaaggtctgtctgtaatgccagccatgggcgctgcgatcaggcgatttctgagctgatattgtccgatgcgcatgagttaagaaatgaccatactgtgactgcaaggcggcgtatattacgcattttttgcacgagatgaaaggccaaactttgaccaatcctctgagatggatcaaagaattgcatttaaaatgagcgtggtgcgataattactcataaaaatcatcatattagaaaatagtgactaaaatttacactcaaagaaatttgagtaagttctcaatttttctttatgaatgaaaattttggcacgcaaatttgcgtaaataatcggcaaatttacgtgccttttgtgagcttgctcgcacttcgccccgcgtcaccctacggcgatgcgaaggttaattcttacgaccggtaatacggcaccactcttctttttccacgaccgggtccagtgcgaagctgtcggcataagcttcacaaacgctctctgcctggcttgccagaataccggaaaggcccagcaaaccgcctgaaaccggcaggacgctgattaacggtgccagttcacgtaatgggcctgcaaggatgttagcgaccaccacgtcggctttcatttcttctggctgatctttcggtaagtagagttccagacggtcagaaacgccattacgttcggcgttgtcgcggctggcctgaatcgcctgcggatcgatatcaataccaatggcttttgctgcacccagtttcagcgccgcgatcgccagaatgccggaaccacagccaaagtcgatgactgttttaccggttaaatcgaggctgtcgagccattgcaggcacagagaggtggttggatgggtacccgtaccaaacgccagccctggatctaacatcacgttgacggcgttttcgtccggcacatcacgccagctagggcagatccacagtcgttcaccaaagcgcatcgggtggaaattatccatccattcgcgctcccagtctttatcttctagttgttcgattttatgcgcgaagcctgcgccgagcagcggatggttttccagaatcgccaccacgtcgttcatatcggtttcagcgtcaaacagaccaatcacatcggtgtcgccccacaggcgcgtttcgcccggcagcggctcaaatactggcgtatcgtgggtatcctgaaaagtgatagaaacggcacccgcttccatcagcgcatcgctaagatcttccgcgttcgcgccggtggtgttcagtttcagttggatccaaggcatggcaaaactctttatttatcagtagtcaaaacggtagcttgcgggacggatgtaccgaaacggtttccgaccaggaaagccagcaaacttagtagtaacgagggcacgatagggtggaagcccaggtactgaatattcagcgtcgcgagtacggcatacagcacgccgccaacgatcatcgcacttagcgcgcctttggcgttggcgcgttcccagtaaagacccagcaccagcggccacaggaaaacggcttccagcccaccgaaggccagcaaattcagccagatgatcatttctggcggcttccaggcggcaagcagcagcaacgcgccgagaactaacgtaattaccgccgacatccgcttcagacgcgtctcgttttgcatttgatccggacggatattcagatagagatctttaatgatcgtagcggaactttgcagcaactgggcattgatcgtcgacatgatcgcagccataggtgcagccaggaagattccggcagcaaacggtggcagcacttttaccattaacgtcgggatcaccagatccggtacggtgagatcggggatcactgcacgacctaacgctccggccaggtgcataccgaacatcaggattgcgactacaatcgtaccgatgatgatcccccggtgtactgctttgctgtctttataagagatacagcgcaccgcagtatgcggcaggccaatcacgccaaagcacaccagtacccagaacgacgtcataaaggcaggcgacagaatatcgtcagcgccttgtggcgtaaccagttgcggatcgatggtttgcaaggtctgtactgcgttgcttaagccgccagcggcatgtaccacgccaataagcagcacaacggtgccaatcagcatcacaagcccttgcatggtgtcgttcagcacgctggcgcgaaagccaccaaaggcggtatataacgcaatgctgataccaaaaatcagcagcccggtttcataaggaatacccgccgcggtttccagcaggcgcgcaccgccgataaactgcacggtcatcgcaccaacgaacgcaaccagcaaactcaaactcgccagccacaccagaagacgactctggtagcgggcaaacagcatatcgttcagcgtcactgcattgtagcggcgcgcaagaatcgcaaacttcttgccgagaataccgagtgaaagccagactgcaggaagctgaatcatcgccagcaatacccagcccagcccgtatttataagcagctcctggcccgccgataaacgaactggcactgatataggtcgcggtgagcgtcatcgccagcacaataccgcccatagagcggctgccgaggaaatactcattaaggaaggtgccggtgctccgtttacgcatcgcataaaccgagataccgaacaccaccaccagataggcgaccagcggtagaattacttcaagctgcatcgtcatcctccagtgggatatcgcgatagataaatttcaccatcgcccagcacagtccaataaacagcagcggcgtcaggatgcaggccatctcaaaccagcgcggaaagccggtaaaaccgggggcaacgccaggtaagtaagcggctactaaccataccgccagatacaaaagggtcagccccagcgcccagcgcgcctctttatgggcctgaacaaaacgagtgtccattttttgtccctgatgggtgaagaaagcgaggattgtaccttatgggggttgtcgatccccagtaataaaaaaggccggaaaatccggccttttgacgcttttgcagtcttatttttcctgaagaccgagttttttctccagatagtggatgttagtgccaccatgctggaagttctcgtcattcatgatgcggatctgcagatcaacgttggttttgataccgtcgatgatcagctcctgcagcgcattcttcatgcgggcaatcgccacgtcacggttttcaccgtagcaaatcagcttaccgatcattgagtcatagtacggcggtacggtgtagcccgcgtagatatgagactcccaacgtacgccaaaaccgccaggtgcgtggaaacgggtgattttgcctgggcttggcaggaaggtgttcggatcttcggcgttgatacgacattccaccgcatggccgcgaacgtgaacttcttcttgcttgatcgacagcggttgaccggcagcgatacgcagctgttctttgatcaggtcaacgccggtgatcatttctgtaaccgggtgttctacctgaatacgggtgttcatttcgatgaaatagaactcgccgttttcgaacaggaactcgaaagtacctgcaccgcgatagccgatatcaacacacgctttagcgcaacgttcgccgatgtagcgacgcagttccggggtaatgcccggtgctggtgcttcttcgaccactttctggtggcggcgctgcatggagcagtcacgttccgccagatagatagcgttgccctgaccgtcagccagtacctgaatctcgacgtggcgaggattttccaggtatttctccatgtaaaccatatcgttgctgaaagcagctttcgcttccgcacgggtcatggagatggattgtgccagttcagcgtcgccgcgcactacgcgcataccgcgaccaccgccgccgccggaggctttgataatcaccggataaccaatgcgtttagcaatggcacggtttttatccatatcgtcgcccaacgggccgtcagaacccggtacgcaagggacgcccgcttttttcatcgccgcgattgcggatactttgtcgcccatcaggcgaatggtttctgctttcgggccgatgaagataaagccggagcgttcaacctgctcggcaaagttggcgttctcggagaggaagccgtaacccggatggattgctactgcgccggtgatttcagcggcgctgatgattgccgggatgttcagataactttttactgacggagcagggccaatacagaccgtttcatctgccagtaatacgtgttttagatcgcgatccgcgctggagtgcacagcgacagtcttgatgcccagttctttacaggcacgaagaatacgcaatgcaatctcgccgcggttggcaataacaattttatccagcatgttcgcctcgttactcgatgacgaccagcggctcgtcaaattctaccggttgtccactttcgaccagaattgctttcacggtaccggatttgtccgcttcgatctggttcatcattttcatggcttcaacgatgcacagggtatcgcccacgttgactttctgacccacttcgatgaacgcttttgcgtccgggcttggggtgcggtagaaagtaccaaccatcggggaacgtacgatgtgaccactgatttccgctgctgctggcgcttccatggaaggaacggtcgccggagcggctgcgttagattgagctggctgctgcatcattggtgcagcgtaagcttgttgcatcacagggaaacttgcggcaggagctgcacggctaatgcgtactgactcttcgccttcagaaatttccagttcggagatgcctgattcttcaaccagctcgatcagttttttaatcttacgaatatccatgagtgggttccgtactctttgtttagtgtgattgtgacaggcgtttcaccgccgtctgtaaagcgtatgccccgacagctgtatgcatagcgataaattccagcaggccgggacgccggtctattttgccccagagtgtcaatgttagacttgacggacattgtgcagcgatctgctgctatcctccggcaaaaaacaaaatataccttcgttgcgccaatgtcaccttttccgcagcgcaaaaactgcgtcagggaggacgaggtcgcacattataacgatttcgtagcaattggcagctaaatactggtcttatcagggaagataatcaacagctaacatgtaaataaccttcaacaccgtgtaatttgcaacaagccgcacaattcacgaaattagcgccatcatcgacggaacttcttataacgtaaggtgaaaagctgaaaagccagccctgcgaagatgaggggctgcaatgagataatcttcacagaccacaaataatgtagggatgccaggatcgcgacaagatagacgacattacgcagcggttgctggggattacccaattttcactgcatcgtctggatagatgtgaatgctaaagcacgcaaaatcaaccgactgacaattctcagcattaaataggttcgagtggttaatttgtagtcaaataaaatcagattattcaccccatgggaccagaaatcagtaacaggttaagcgtagtgtcgcccaggcaaagcaccataaacctaacaggcgacggaggcatatcaataatggctgtttagaggagtatcaatgcgcatcaatttgtggtcagtcgaaatcatgactttccagtttggatgatgttgtacaacttcctgaccaaggtgttcgacgaaagctgtccggctaaccgcttttcccgttaaccgattgaataatgatgtcaaaatgagttccctctcttattattccttgctaaatggttagttaaccttcaccagcgtgcgaccctggatctggttattaatgatggcctcggcaaagttcggtgcctctgacagagatatctcttttgccgcctgggtatagaatgattccggtaaatcggcgaccagtcgctgccaggcttgtgcgcggcgttctggtggcgtcattactgaatccaccccttgcaaacggacattacgcagaataaatggcatgaccgtggttggcagagtaaaaccacccgccagaccacaggccgccacgcagccgccgtaattcatttgcgccagcacttttgccagcactttgtcgccaacagtgtcaattgccccagcccagacttgtttttccagaggacgggattcggcaaactcatcacgagggagaatacgactggcacctaaacttttcagatattcatgggtactttcgcgaccggaaacggcaacgacctgataacccaacttatgcagcagcgccacggcggtactgccgacgccaccactggcacccgtcacgacaatctccccgtcctgcgggcgaacaccggcatcttccagcgccatcacacacagcatggcggtaaaaccggcagtaccgataatcattgctttacgcgcgtccagcccttgcggcatggcaaccagccagtcacctttcactcgcgcctgctccgccagcccaccccagtggttttcaccaacgccccagccagtgagtaacacctcctgaccggcatgaaaacgcggatcttcgctggtgcgtacagttccggcaaaatcgatcccaggaatcatcggaaaattacggatgatttttcccttaccggtaatcgccagcgcatctttatagttcaggctcgaccagtgaacatcaaccgtgacatcgccctccggcaggcgactttcgtcaagtgtctgtaccgatgcgagagttttgccgtcctgctgttctaaaagtaacgcctgcataagtggtcctcatgtgcatgatggattggaaaataatttctgaagactatactcgctaatggaaaagcaaagccgatgaagcgcaataaattgcgagataaatctgatttgctagtatgcccgcttcctcactatcggagttaacacaaggatgagattaacgacgaaattttcggcctttgttacgctgctcaccgggttaacaatttttgtgactttgctgggctgttcgctaagtttctacaacgcaattcagtataagtttagtcatcgcgttcaggcggtggcgacggcgattgatacccaccttgtgtcgaatgactttagcacattaaggccacaaattaccgaattaatgatgtcggcagatatcgttcgtgtagacctgctccatggtgataaacaggtttataccctggccagaaatggtagttatcgtccggttggctccagcgatctgtttcgcgaactgagtgttccgttgataaagcatccggggatgtcgctgcgtctggtttatcaggatccgatgggcaactatttccattctttaatgactaccgcgccgctcacgggggcgattggctttatcattgttatgctcttcctggcggtacgctggttacaacggcaacttgccgggcaagagttgctggaaacccgggctactcgtatcttaaacggtgagcgtggctctaatgtgttgggaaccatctatgaatggccgcccagaaccagcagtgcgctagatacgctgcttcgtgaaattcagaacgcacgcgaacaacacagccgtcttgatacgctgatccgctcttatgccgcccaggacgtgaaaaccggcctcaataaccgactctttttcgataatcagttagcaacgttactggaagatcaggagaaagtaggtacccacgggatcgtgatgatgattcgtctgccggatttcaatatgttgagcgatacttgggggcacagccaggttgaagaacagttcttcactctgacgaatctgctgtcgacatttatgatgcgctaccctggcgcactgctggcgcgttaccaccgcagtgattttgctgcgctgttaccgcaccggacgttaaaagaggcagagagcatcgccggtcagttaatcaaagccgtcgataccttgccgaacaataaaatgctcgatcgcgacgatatgatccacattggtatctgcgcttggcgtagtggtcaggataccgagcaggtaatggaacatgcagagtctgccacgcgtaatgcgggattgcagggcggcaatagctgggctatttacgatgactcgttgcctgaaaaaggacgcggtaatgttcgctggcgtacgcttatcgagcaaatgctcagtcgcggcggcccgcgcctttatcaaaaaccggcggttactcgcgaaggtcaggttcatcatcgcgaactcatgtgccgcatcttcgatggtaatgaagaggttagctcggcggagtatatgccgatggtcttgcagtttggcttatcggaagagtatgaccgtctgcaaatcagccgtcttattccactattgcgttactggccagaggaaaatctggcgattcaggttaccgttgagtcgctgattcgcccgcgttttcagcgttggctgcgcgatacgttaatgcaatgtgaaaaatcacaacgaaaacgcataattattgaacttgcagaggccgatgtaggtcaacatatcagtcgtttacaacctgttattcgtttagtgaatgctttaggggtacgggtagccgtcaaccaggctggtttgacgctggtaagcaccagttggatcaaagaacttaatgttgagttactcaagctccatccggggctggtcaggaacattgagaagcgaacggagaaccagctgctggttcaaagcctggtggaagcctgctccgggaccagcacccacgtttacgccaccggcgtgcgttcgcgaagcgagtggcagaccctgattcagcgcggtgttacaggcgggcaaggggattttttcgcgtcctcacagccacttgatactaacgtgaaaaaatattcacaaagatactcggtttaacctgccgtttaatccgttttcacgtagaataacgcgcgctgcgtctcatgggagtgtgcttgtctgctcgccagattgttgcagcacatatgcagatgaatgaccttacgcggttgcaaacaggcgaggaatgctgctgatgcattaagcctttctggactcaggcagagatttgtaacaaaggaaacgaactgcactaattttcaccgtagcagatgatttttgcgccttgtcgctgctgcgtgtggttggtaaagtaagcggattttcttttccgccccagctttcaggattatcccttagtatgttgaaaaaatttcgtggcatgttttccaatgacttgtccattgacctgggtactgcgaataccctcatttatgtaaaaggacaaggcatcgtattgaatgagccttccgtggtggccattcgtcaggatcgtgccggttcaccgaaaagcgtagctgcagtaggtcatgacgcgaagcagatgctgggccgtacgccgggcaatattgctgccattcgcccaatgaaagacggcgttatcgccgacttcttcgtgactgaaaaaatgctccagcacttcatcaaacaagtgcacagcaacagctttatgcgtccaagcccgcgcgttctggtttgtgtaccggttggcgcgacccaggttgaacgccgcgcaattcgtgaatccgcgcagggcgctggtgcccgtgaagtcttcctgattgaagaaccgatggctgccgcaattggtgctggcctgccggtttctgaagcgaccggttctatggtggttgatatcggtggtggtaccactgaagttgctgttatctccttgaacggcgtggtttactcctcttccgtgcgcattggtggtgatcgtttcgacgaagctatcatcaactatgtgcgtcgtaattacggttctctgatcggtgaagccaccgcagaacgtatcaagcacgaaatcggttcggcttacccgggcgatgaagtccgtgaaatcgaagttcgtggccgtaacctggcagaaggtgttccacgcggttttaccctgaactccaacgaaatcctcgaagcactgcaggaaccgctgaccggtattgtgagcgcggtaatggttgcactggaacagtgcccgccggaactggcttccgacatctccgagcgcggcatggtgctcaccggtggtggcgcactgctgcgtaaccttgaccgtttgttaatggaagaaaccggcattccagtcgttgttgctgaagacccgctgacctgtgtggcgcgcggtggcggcaaagcgctggaaatgatcgacatgcacggcggcgacctgttcagcgaagagtaatcggatgcaggcaggggaaatgtctgtttaccctgcctggtctgatacgagaatacgcataacttatgaagccaatttttagccgtggcccgtcgctacagattcgccttattctggcggtgctggtggcgctcggcattattattgccgacagccgcctggggacgttcagtcaaatccgtacttatatggataccgccgtcagtcctttctactttgtttccaatgctcctcgtgaattgctggatggcgtatcgcagacgctggcctcgcgtgaccaactagaacttgaaaaccgggcgttacgtcaggaactgttgctgaaaaacagtgaactgctgatgcttggacaatacaaacaggagaacgcgcgtctgcgcgagctgctgggttccccgctgcgtcaggatgagcagaaaatggtgactcaggttatctccacggttaacgatccttatagcgatcaagttgttatcgataaaggtagcgttaatggcgtttatgaaggccagccggtcatcagcgacaaaggtgttgttggtcaggtggtggccgtcgctaaactgaccagtcgcgtgctgctgatttgtgatgcgacccacgcgctgccaatccaggtgctgcgcaacgatatccgcgtaattgcagccggtaacggttgtacggatgatttgcagcttgagcatctaccagcgaatacggatattcgtgttggtgatgtgctggtgacttccggtctgggcggtcgtttcccggaaggctatccggtcgcggttgtctcttccgtaaaactcgatacccagcgcgcttatactgtgattcaggcgcgtccgacagcagggctgcaacgtttgcgttatctgctgctgctgtggggggcagatcgtaacggcgctaacccgatgacgccggaagaggtgcatcgtgttgctaatgaacgtctgatgcagatgatgccgcaggtattgccttcgccagacgcgatggggccaaagttacctgaaccggcaacggggatcgctcagccgactccgcagcaaccgacgacaggaaatgcagctactgcgcctgctgcgccgacacagcctgctgctaaccgctctccacaaagggctacgccgccgcaaagtggtgctcaaccgcctgcgcgtgcgccgggagggcaatagtggcgagctatcgtagccagggacgttgggtaatctggctctctttcctcattgcgctgttgctgcaaatcatgccctggccggataacctgattgttttccggccaaactgggtgttactcatcttgttgtattggatcctggccttgcctcatcgcgtaaatgtgggcacaggttttgtgatgggtgccatactggatctgatcagcggctcgacgcttggcgtacgcgtattggcgatgagcatcattgcttacctggtggcgctgaaataccagcttttccgcaacctcgcattatggcagcaggcgctggtcgtcatgttgctttcgctggtggtggatattattgttttctgggcagagtttttagtgattaacgtctctttcagaccggaagtgttctggagtagtgtagtcaatggggtgctctggccgtggattttcttgctgatgcgtaaagtccgtcagcagtttgcagtgcaataaaggtttctatgacttctctgtatttagcttccggttctccgcgtcgtcaggagttacttgcgcaacttggcgtgacctttgaacgtattgttacgggcattgaggagcagcgtcagccgcaggagagcgcgcagcagtatgttgtgcgtctggcgcgcgagaaagcacaggcgggtgtcgcgcaaacggcgcaggatctcccggtgctgggtgcggatactatcgttatcctgaatggagaagtgctggagaaaccgcgcgacgcagagcatgcggcgcagatgttgcgcaaattatcgggtcagacccatcaggtgatgacggcagtggcgttggccgacagccagcacattctcgattgcctggtggtcaccgatgtgactttcagaacgttaacagacgaagacatcgcgggctatgtcgccagcggtgaaccgttagataaagcaggtgcatacggtattcaggggctgggtggctgttttgtcaggaagataaatggcagctatcacgccgtagtcggcttaccgctggttgaaacgtatgaattattaagtaattttaacgcactgcgtgagaaaagggataaacatgacggctgaattgttagtaaacgtaacgccttcggaaacgcgagtggcgtatattgatggcggtattctgcaggaaattcatattgaacgtgaggcgcgacgcggaatagtaggcaatatctacaagggtcgtgtaagtcgtgtacttccgggtatgcaggcggcttttgtagatattgggctggataaagccgcgtttcttcatgcatccgatatcatgccgcacaccgaatgtgtggcgggtgaagaacaaaagcaattcacggtgcgcgacatctcggaactggttcgtcaggggcaagatctgatggtgcaggtggtgaaagatccgcttggcactaagggggcgcgcctgaccaccgatatcacgctgccttctcgctatctggtctttatgccaggggcttctcacgttggtgtttcccaacgtattgaaagcgaatcagaacgtgaacgcctgaaaaaagtggtcgcagagtattgcgacgagcagggcgggtttatcatccgtaccgcagcggaaggggttggcgaggctgaactggcctccgatgccgcttatctgaaacgcgtctggaccaaagttatggagcgtaaaaaacgcccgcagacccgttatcagctgtacggcgaactggcgctggcgcagcgtgttctgcgtgatttcgccgacgccgaactggaccgcattcgcgttgactcacgcctgacttacgaagcattgctggagtttacctcggagtacattcccgagatgaccagcaagctggagcattacaccggacgccagccgattttcgatctctttgatgtcgaaaacgaaatccagcgagcgctggaacgcaaagtagaactgaaatccggtggttatctcattatcgaccagaccgaagcgatgaccaccgtggacatcaataccggagcgtttgtcggtcatcgcaatctggacgacaccattttcaataccaatattgaagcgacgcaggctatcgctcgccagttacggttgcgtaatctgggtgggattatcattattgatttcatcgatatgaataatgaagatcaccgccgccgcgtgctgcactcgctggagcaggcgttgagcaaagaccgggtgaaaaccagcgttaatggtttttcggcgctggggctggtggagatgacgcgtaaacgcacccgcgaaagcattgagcacgtactgtgtaacgaatgcccaacctgccatggtcgcggaacggtgaaaaccgtggaaacggtatgctatgaaatcatgcgcgagattgttcgtgtccaccatgcttacgactccgaccgtttcctggtctatgcttctccggcagtagctgaagccttgaaaggcgaagagtcacactcgctggcggaagtggaaattttcgttggcaaacaggttaaagtacaaattgaaccgctctataaccaggagcagtttgacgtcgtaatgatgtaaacagatgctgggccgccatccggcaaagggtttttgagtcacatttttagcagacaaggagtgacgggtgaggcgattgccggggattttactgcttactggagccgcgctcgttgtgatcgctgccctgctggttagcggcctgcgtattgctttaccgcatcttgacgcctggcgtccggaaatcctcaacaaaatagaatccgcgactggcatgccggtagaagccagtcagctctcagccagctggcagaattttggcccgacgcttgaagcacacgacatccgtgcagaactaaaagatggcggcgaattttcggttaaacgcgttactctggcgctggatgtctggcagagcttgttacatatgcgctggcagtttcgcgacctcactttctggcagctgcgctttcgcaccaacactcctatcaccagcggtggtggtaatgatagcctggaagccagtcacatcagcgatctgtttcttcgtcaatttgaccatttcgatctccgcgacagtgaagtcagttttctgacgccatccggtcagcgcgccgagctggcgatcccacaactcacctggctgaacgatccacgtcgacaccgtgcggaaggcctggtaagcctctccagccttaccggacagcacggcgtgatgcaggtgcgcatggatttgcgcgatgatgaggggttgttaagcaatggtcgcgtctggctacaggcggatgacatcgacctgaagccgtggctcggtaaatggatgcaggacaatattgcgctggaaacggcacagttctcccttgaaggctggatgacgatcgacaaaggcgatgtaaccggcggtgacgtctggctgaaacagggcggtgccagctggttgggcgagaagcaaacgcatacgctgtcggtggataatctgaccgcgcatattacgcgtgaaaatccgggctggcagttctctattcccgatacacggatcacgatggacggcaaaccctggccgagcggagcattgacgctggcctggataccggaacaggacgttggcggcaaagacaataaacgcagtgacgaactccggattcgcgccagtaatctggagctggcaggcctggagggcatacgcccgctggccgcgaaactttcacctgcactgggtgatgtttggcgctccacacaaccgagcggcaagattaacactctggcgctggatatcccgcttcaggcggcagacaagacccgttttcaggcatcgtggagcgatctggcctggaagcaatggaaattattaccgggtgcggaacacttctccgggacgctttccggcagcgttgaaaatggtttgcttaccgcgtcgatgaagcaggcaaagatgccttacgaaacggtattccgtgcgccactggaaatcgccgacggccaggcaactataagctggctgaacaatgacaaaggtttccagctggatgggcgtaatattgacgttaaagccaaagccgtccatgcgcgcggcggttttcgttacctgcaacctgctaacgatgaaccctggctgggtattctggctggcatcagtaccgatgatggttcacaagcctggcgctatttcccggaaaacttgatgggtaaagacctggttgattacttaagtggcgcgattcagggcggtgaagcggataacgcgacgctggtttatggtggcaatccgcaactcttcccctataaacacaacgaaggtcagtttgaagtgctggtgccgctgcgcaacgcgaagtttgccttccagccggactggcctgcattaactaaccttgatattgaactggactttattaacgacggtttatggatgaaaaccgatggcgttaatctgggcggcgtgcgcgcgagtaatctcaccgcagtgatccctgactactcaaaagaaaaactgctgattgacgctgacattaaaggtccgggtaaagccgttggcccttactttgatgagacaccgctgaaagattctctgggtgcgaccctgcaagaactccagctcgacggcgatgtgaatgctcgcttacatcttgatatcccgctgaacggcgaactggtaaccgcgaaaggtgaagtgacgctgcgtaataacagtctgtttatcaaaccactcgacagcaccctgaaaaatttgagcggtaaattcagctttatcaatagcgatctgcaaagtgaaccactgacagcaagctggtttaatcagccgttgaacgtggatttttccaccaaagaaggggcaaaagcctaccaggtagcggtaaacctcaacggtaactggcaaccggcgaaaaccggcgttctgcctgaagcggtgaacgaagcattgagtggcagcgtggcgtgggatggtaaagtgggcattgatctgccttatcatgctggtgcgacctataacatagagctgaacggcgatctaaagaatgtgagcagtcacttaccttcaccgttagccaaacctgcgggtgaaccactagcggtaaacgttaaggttgatggcaatctcaacagctttgaattaaccggacaggctggtgcggataatcatttcaatagccgctggttgctcggtcaaaagctgacgctcgatcgtgctatttgggcggcagacagtaaaacgctcccgccgttgccggaacaaagtggcgttgaactcaatatgccgccgatgaatggtgccgagtggctggccctgttccagaaaggcgctgcggagagtgtcggtggtgcagcgagtttcccacaacacataacgttacgtacgcctatgttgtcactgggaaatcagcaatggaataacctgagtattgtttcgcaaccgacggcaaatggcaccctggttgaggcgcaagggcgtgaaatcaacgccacgctagcgatgcgtaataacgcgccgtggctggcgaatatcaaatatctttattacaacccgagcgtggcgaaaactcgtggtgattcaacgccgtcatcacctttcccgacaacggagcgcattaacttccgtggctggccggacgcccaaatacgatgcacagagtgctggttctgggggcaaaaattcggtcgcattgacagtgatatcaccatttctggcgatacgttaacgctgaccaatggactgattgatactggtttctcgcggcttactgccgatggtgaatgggttaataatccggggaatgaacgtacctcgctgaaaggaaaactgcgcgggcagaaaattgatgccgccgcagaattttttggtgtcacgacgcccatacgccagtcgtcatttaatgtggattacgatttacactggcgcaaagcaccctggcagccagatgaagcgacgttgaatggcatcattcatactcaactgggtaaaggcgaaattaccgaaatcaataccggacatgctgggcaattgctgcgcttattgagcgtagatgccctgatgcgtaagctgcgttttgatttcagagacacttttggcgaagggttctattttgactccattcgcagcaccgcgtggattaaagacggcgttatgcacaccgacgacacgctggtggatggcctggaggcggatatcgccatgaaagggtcggtaaatctggtacgtcgcgacctgaatatggaagcggttgtcgcaccagagatttctgcgacggtgggcgtggctgcggcttttgcggttaaccccattgttggcgcggcagtgtttgccgccagtaaagtgctggggccgctgtggagcaaagtctccattttgcgctatcacatttcgggtccgctggacgatccgcaaatcaacgaagtgttgcgccaaccgcgtaaagaaaaagcgcaatgatttgacgagggcgcgtaattgccccaatctcatatgataatcgttgccaaaggccaacgagccggaacataactgtaggccggatagggcgttcacgccgcatccggcagccgtaaaaaatcctctactgcagtaactaacgagtagcaaaaacgatgagtctgaacctggtaagtgaacaattgctagcggcgaacggcctgaaacatcaggacttgttcgcgatcctcggtcaactggccgaacgtcgccttgattatggcgatctctattttcagtcgagctatcacgaatcctgggttttagaagaccgcattattaaagatggttcttacaacatcgatcagggcgttggtgtgcgtgcaatcagtggtgaaaaaaccggatttgcttacgcagaccaaatcagcctgctggcgctggaacagagtgcgcaagcggcgcgcaccatcgtccgtgatagtggtgatggcaaagtacagacgctgggcgcggtagagcatagcccgttgtatacctcggtagatccgctgcaaagcatgagccgtgaagagaagctggatatcctgcgtcgcgtcgataaggttgcccgcgaagcggacaagcgcgtacaagaagtgactgccagcctcagcggcgtttatgaattaattctggttgcggccaccgacggcacgctggcggcggatgttcgtccgctggtgcgtctttccgtgagcgttctggtcgaagaagatggcaaacgcgaacgcggtgccagtggcggcggcggtcgttttggttatgagttcttccttgccgatcttgacggtgaagtccgtgcggatgcatgggcaaaagaagcagtgcgtatggcgctggtcaatctttctgccgtcgccgcaccagcgggcaccatgccggtagtacttggcgcaggttggccgggcgtgctgttgcatgaagcggtggggcacggtctggaaggcgacttcaaccgccgtggcacttcagtatttagtggacaggtcggggagctggtggcttcagaactgtgtaccgtggttgatgacggtacgatggtcgatcgccgtggttcggtggcgattgatgatgaaggtacgccaggtcagtacaacgtgctgattgagaatggcatcctgaaaggctacatgcaggataaactcaacgcgcgtttgatggggatgacaccgactggcaacggtcgccgtgaatcctacgctcatctgccgatgccgcgtatgaccaacacctatatgctgccgggtaaatcgaccccgcaagaaattattgaatctgttgagtacggtatctatgcaccgaactttggtggcggtcaggtggatattacatccggcaaattcgttttctccacttcagaagcgtatctgattgaaaacggtaaagtaacgaagccggtgaaaggcgcgacgttgattggttccggtatcgaaaccatgcagcagatttcgatggtgggcaacgacctgaaactggataacggcgtgggtgtctgcggtaaagaagggcaaagtttgccggttggcgtgggccagccaacgctgaaagttgataacctgactgttggcggtaccgcgtaataatttcagtattttcagaaggataattaatctttctacgtgcatgaacggtccccttgcccctctgtggagaaggttaggggaacccgttggcacaggtttgtacaacgtaacagtacaatatgaattacttctctttcccgcgcccgtgcatttcctgaaacaatttaccgacctcaacaaaataatccgtcagcgagttgatcacgacctgtaccttcagcggcagcttatctttttcggtatataacgcataaaccgggcgtggatctgactgataacgcggcagcaggatctccagctccccacgattgatctcgttgatcacccacatcagcggcacgtaggcgatcccggcacccgccgttagccagcgcaccagcgtcatcggatcattagtcacaaatctcccttgcgggatcaggcgagtcgagatcccttccggtgcaatcagttcaaattcattgtcgggccgcacgctgtattcaagccatgaatggctacttaaatcggcgggtttttccggtatgccgtattgtgtgagatagcttttcgcggcgcacaccaccattggcatcgcgccaagacggcgggaaaacaggctggaatcctgcaacgcgccgacgcggatcaccacatccagaccgtcggcaatcaggtcgggggctggaattccggtaaccagattgacgctcaaacctgggtattctttcagcattttggctgtcagcccggcgagaacattttgtgccatagttgaagaacagccaatgcgtagcgtcccgatgggggtgttattgaaggcatacagttgctcatgaacatcctgcacttcatgaagcatacgacggcagccctggtagtaaattctaccggcttcggtcaggccaatgctgcgtgtgctacggtttaacagctttacctgcaactcatcttccagttttgacaccgtctgactgatggacgaaacgctcatctgtagctgtctggcggcggcggtaaaagagccaaattcaactactttggcaaacaccgacatgcgttttagtcgttccattattcactctgacttaaaagtgatttagatcacataatatagataacagcataacagttacgctaatatattaaatatcaatctacagcaatgttgctctcgcccggctttccatgcccttctctgcggcgacagatgctgaaaataataacgcctgctctctctatacaaccaaggtcaacatgagtctgtttcccgttatcgtggtgtttgggctgtccttcccaccgatattttttgaattgcttttatcactggcgattttctggctggtgcgccgggtacttgtgccaacaggtatctacgactttgtctggcatccggcgttgttcaacaccgcgctctattgctgcttgttttatttgatatcgcgactgttcgtttgaggttgaagtgaaaacactaataagaaaattctcccgtacggccatcacggtcgtattagtcattctggccttcatcgcaatttttaatgtctgggtctattacaccgaatccccctggacgcgtgacgcgcgctttagcgctgacgtcgttgcgatcgcgccggacgtttctggactcattacccaggtgaatgttcatgataaccagctggtgaaaaaaggacagatactgttcaccatcgaccagccgcgctatcaaaaggcgcttgaggaagcgcaagccgatgttgcttattatcaggtactggcacaggagaaacgccaggaggccggacgtcgtaaccgtctcggtgtgcaggcgatgtctcgcgaagagatcgaccaggctaacaacgtactacaaacggttctgcatcagttagcgaaagcgcaggcgacccgcgatctggcaaaactggatcttgaacgcacggtgatccgcgcgccagcagatggctgggtgaccaacctcaacgtctataccggtgagtttattactcgaggatcaacggcggttgcgctggtgaaacagaactccttctatgtactggcctatatggaagaaactaagctggaaggggtgcgtccggggtatcgtgcagagatcacgccgcttggcagtaacaaagtgctgaaagggactgttgatagtgttgccgctggggtcaccaacgccagcagcacgcgtgacgacaaagggatggcgaccatcgactctaaccttgaatgggtgcgtcttgcgcaacgtgttccggttcgtattcgtctcgacaaccagcaagagaacatctggcctgcgggcaccactgctacagtggtggtcactggcaaacaagatcgcgacgaaagccaggattcgttcttccgtaaaatggcccatcgcctgcgtgagtttggttaatcacgatgggtattttctccattgctaaccaacatattcgctttgcggtaaaactggcgaccgccattgtactggcgctgtttgttggctttcacttccagctggaaacgccacgctgggcggtactgacagcggcgattgttgccgccggtccggcctttgctgcgggaggtgaaccgtattctggcgctattcgctatcgtggctttttgcgcatcatcggcacatttattggctgtattgccggactggtgatcatcattgcgatgatccgcgcaccattattgatgattctggtgtgctgtatctgggccggtttttgtacctggatatcctcgctggtacgaatagaaaactcgtacgcgtgggggctggccggttataccgcgctgatcattgtgatcaccattcagccggaaccattgcttacgccgcagtttgccgtcgaacgttgtagcgagatcgttatcggtattgtgtgtgcgattatggcggatttgctcttttctccgcgatcgatcaaacaagaagtggatcgagagctggaaagtttgctggtcgcgcaatatcaattaatgcaactctgtatcaagcatggcgatggtgaagttgtcgataaagcctggggcgacctggtgcgacgcaccacggcgctacaaggcatgcgcagcaacctgaatatggaatcttcccgctgggcgcgggccaatcgacgtttaaaagcgatcaatacgctatcgctgacgctgattacccaatcctgcgaaacttatcttattcagaatacgcgcccggaattgatcactgatactttccgcgaattttttgacacgccggtagaaaccgcgcaggacgtccacaagcagctcaaacgcctgcggagagttatcgcctggaccggggaacgggaaacgcctgtcaccatttatagctgggtcgcggcggcaacgcgttatcagcttctcaagcgcggcgttatcagtaacacaaaaatcaacgccaccgaagaagagatcctgcaaggcgaaccggaagtcaaagtagagtcagccgaacgtcatcatgcgatggttaacttctggcgaaccacactttcctgcattctgggcacgcttttctggctgtggacgggctggacttccggcagtggtgcaatggtgatgattgcggtagtgacgtcactggcaatgcgtttgccgaatccacgcatggtggcgatcgactttatctacgggacgctggccgcgctgccgttagggctgctctactttttggtgattatccctaatacccaacagagcatgttgctgctgtgtattagcctggcagtgctgggatttttcctcggtatagaagtacagaaacggcgactgggctcgatgggggcgctggccagcaccataaatattatcgtgctggataacccgatgactttccatttcagtcagtttctcgacagcgcattagggcaaatcgtcggctgtgtgctcgcgttcaccgttattttgcttgtgcgggataaatcgcgcgacaggaccggacgtgtactgcttaatcagtttgtttctgccgctgtttccgcgatgactaccaatgtggcacgtcgtaaagagaaccacctcccggcactttatcagcagctgtttttgctgatgaataagttcccaggggatttgccgaaatttcgcctggcgctgacgatgattatcgcgcaccagcgcctgcgtgatgcgccgatcccggttaacgaggatttatcggcgtttcaccgacaaatgcgccgcacagcagaccatgtgatatctgcccgtagcgatgataaacgtcgtcggtactttggccagttgctggaagaactggaaatctaccaggaaaagctacgcatctggcaagcgccaccgcaggtgacggaaccggttcatcggctggcggggatgctccataagtatcaacatgcgttgaccgatagttaagtcaaaaccgacgccaaaagcgtcggttttttcatggctatacttagcgatgcacggcagaactcgccgcgaaacgtgacggtggcaacagatgaatatttatacctttgattttgatgagattgagagtcaggaggatttttatcgtgactttagccaaacctttggtctggctaaagataaggtacgcgatctcgactcactatgggatgtgttaatgaacgatgtcctgccgctaccacttgagattgaatttgttcatctgggagagaaaacgcgtcgccgttttggcgcgttaatattgctgtttgatgaggcagaggaagagctggaagggcatttgcgttttaatgttcgtcattagcgcaaaaaaaagcccccgaaccgggggcaatatcgtcggacaagacgatgagggtttatttgtacagttcagccgtagcgtgccaggtgtcaccgctacgagcttcagtaatctggtaggccgttgcgcctttctcttccgcttttttgttcagcatttcacgcatatccattggcgaagacgccacaccacttacggatacggtcccgattgcttcacgattttgtgcttgtgcagcatcaatggagtcggcagcgaatgcaccgaaagagagaacagaaagtacgcttaatgcagctacagtggttttgattttcatgatttttacctcgacataatcttttagctgggcctttgtttcgtgacccatatcacaaaatcaagtatacactaattattgaactaattaataccaagctaactgtttcagttgatactaagtgttaaaaatgtgaattttaataacaaaaaagtataaaaaacacggttatttattattaattatagtattttcaattagataatgaattttgcataatgtgctttttttaccgtatgtattcattttgtgaatgatgtgtcgcggtaaaacgcactatttgttaaatgtatcgcaggagaaagaaggggaatgagagggataagcaacattttccccgccgccagaagcgacggggcagagattaaagctcctggtcgaacagctctaaaattgcttcgtacaggtctttgacggtgaaaccgttagcaggggtggtaaagatggtgtcatcgccagcgatggtgcccagaataccttctgctttgcccagtgagtccagcaggcgagcaattaactgcgccgcgccagggctggtatgaatcacgacaactgcatcgttgtagtcgatatccagcaccagattcttcaatggactggaggtagttggtacacccagttcagctggcaggcagtaaaccatttccattttggcattgcgtgtacgtacagcaccaaacttggtcaacatccgcgagactttagactgattaatattgtcaaagccttgctcctgcaacgcggcgacgatttcgccctgggagctaaatttctcttctttaagtaatgctttaaatgctttaactagttcttcttgcttagccgagcttcgcataagtcacccgatatggtggttgatacaacattattgtgcatacagatgaatttttatgcaaacagtcagccctgaagaaggctgaaataatgttatgaaagagcgggattttatcaaatttcgttattgagaaacatgcctgcgtcacggcatgcaaattctgcttaaaagtaaattaattgttatcaaattgatgttgttttggctgaacggtagggtatattgtcaccacctgttggaatgttgcgctaatgcataagcgactgttaattacgtaagttaggttcctgattacggcaattaaatgcataaacgctaaacttgcgtgactacacattcttgagatgtggtcattgtaaacggcaattttgtggattaaggtcgcggcagcggagcaacatatcttagtttatcaatataataaggagtttaggatgaaagtcgcagtcctcggcgctgctggcggtattggccaggcgcttgcactactgttaaaaacccaactgccttcaggttcagaactctctctgtatgatatcgctccagtgactcccggtgtggccgtcgatctgagccatatccctactgctgtgaaaatcaaaggtttttctggtgaagatgcgactccggcgctggaaggcgcagatgtcgttcttatctctgcaggtgtagcgcgtaaaccgggtatggatcgttccgacctgtttaacgttaacgccggcatcgtgaaaaacctggtacagcaagttgcgaaaacctgcccgaaagcgtgcattggtattatcactaacccggttaacaccactgttgcaattgctgctgaagtgctgaaaaaagccggtgtttatgacaaaaacaaactgttcggcgttaccacgctggatatcattcgttccaacacctttgttgcggaactgaaaggcaaacagccaggcgaagttgaagtgccggttattggcggtcactctggtgttaccattctgccgctgctgtcacaggttcctggcgttagttttaccgagcaggaagtggctgatctgaccaaacgtatccagaacgcgggtactgaggtggttgaagcgaaagccggtggcgggtctgcaaccctgtctatgggccaggcagctgcacgttttggtctgtctctggttcgtgcactgcagggcgaacaaggcgttgtcgaatgtgcctacgttgaaggcgacggtcagtacgcccgtttcttctctcaaccgctgctgctgggtaaaaacggcgtggaagagcgtaaatctatcggtaccctgagcgcatttgaacagaacgcgctggaaggtatgctggatacgctgaagaaagatatcgccctgggcgaagagttcgttaataagtaattgattagcgaataataaaaaaccggagcacagactccggtttttgttttgagcactcgacttaattggttgccggatattcctgaatggtgacctgcagcgttaactgcttatcatcacgcatcactacaaccgggatcaccgaaccagggcgaatttccgccacctgatccatcgtctccagagcagagatggccggtttgttatccaccgaaataatcagatcgttgacctgaatacccgcattcgccgctgggccgtcaggtgacacttcattaaccacgatcccttgcagttgatctataccaccgctctgcgcgtgcagtggtgcgatctcgcgtccgccgataccaatgtagccgcggatcacgcgaccatcgcggatcagcttatccataattttggttgctaactggaaaggaatcgcaaagccgataccttccggcgtttcgccatcgttactcttatcaaacgacagcgtgttaatgcccatcagttctcccagcgagttcaccagcgcgccgccagagttaccgtggttaatggaagcatcggtttgtaggaagttttgccgcccggtcgggttcagaccgattcgacccgtggcactaataatcccctgggtaatggtctgcccgaggttgtacgggttaccgatcgccagtactacgtcgccaatgtgcggtacgcgacgtgcattaattggaatggtaggtaaaccgccagtggcattaattttaagtaccgccagatcggttagagagtcagatcccaccagcaatgcttcaaatacacgaccatcctgtaaggcgacgatgatctgatcggcgtcgttgatgacgtgtttattggtgatgatataaccgcgttgatccatgattacaccggatcccagggtgcggatctcaagctggttgtgagagttggtgttcaaaccacggttgtaaacgttaaccaccgctggcgcggcgcggcgaaccgccagattataactggcaggcgtctcatcggtactgtcaaattgcggagtggaaagcgggttaaggctgcgcagcgaaggcatggcaaccagcagaatagcgccgacaattaatccaatcgcaacggaacgtaagagcttcacaaacatgatggaggcgtcattaaaaaagggaacggcagcagcataccacgagttaaccggacatcacacgtaagcctgatgcccggtttacgacattaacgcatcagcagatagatgctttcattgccgcgtacaatttgcagggcgatgatggccggttttgccgccagcactttacgcatttcagcaatcgagttcacccgatcgcggttgacgccaatgatcacatcgtctttttgcaagccagcctgagcagctgggcttcctttgacaacttcatcgatcttaatacctttgccgccatcttttagctgaccatcgctcaacgttgcaccttccagcgctggcgtgatcatttcagcgctggccgacgaagaggtgctggtatcgagcgtcacttctacttccagtggcttgccgttacgcagcaggccaagcttcactttcgtgcccggctcggtggtcgcgatacgagagcgcaactcagcaaagctattcagcggtttgccgttgaggctggtaataatatcgcccgctttgacgcccgctttcgctgagccagaacctggcaacacttcgctgacaaacgcgccacgctgcacgtcaaggttgaaggctttggcgatatcggcactcatctcggtgcctttgatgcctaacaaaccgcgtttgatttcaccaaagtcgataagctgctgcgccagtgttcgcgccatattactggggatggcaaatccaatcccgacgctcccgccgccaggcgcaaggattgcagtgttgatgccaattaactcaccgttaaggtttaacagtgcaccgccggagttaccgcggttaatggaagcatctgtctggataaagttttccagaccttcaagattcaacccgctgcgtcctaatgcggaaacaatgccagaggtggcggtttgcccaaggccaaatgggttaccgaccgctacggcaaaatcaccgacgcgcaatttatcggagtcggcaatagcgatttgcgttaatttgctcgggttttgaatttgtaacagggcgatatcgctctggtcatcgctaccaatcagttttgcatcaaactcgcgcccatcattgagctgaatactgattttctgtgcctgattaatcacatggttgttggtcagcacatagcctttactggcgttgatgatgacaccggaacctaaaccttcgaagggttgtgcaggttgatccggtaaatcatcaccaaaaaactttttgaattcttccgggattttctgtccctgactggccgttccttccacccgtacgctcaccactgccggaagcactttttccagcattggagccagactggggagaggggcctgatcggcaacctggcctggaatcgacgcgacggcctgaaatgacgccgagagagttaacccgacacttaacgctaatgcactcaacagctgggtttgttttttcattattcctgctctcgtacctgaatgataagaaaagagattcaaaacagtttgatgttattgaattttcagacggctaacaatgagacaccagattaaatgatagtcggggagggagagaagaggagggcgcaatggctgcgcccgaaaaataaattagtcgcgcttcgcgccagtacgcagcaggccggatgcgccttcagaatagtcgcgaggcatctgcaccggtgcctgatcgttgctggcttcagactctgccagacgattacggaacgggtttgcttcagcagacagttccggcagcaggctgctggagcttttcgccatgtgctgatacagctggcgatagtcgtgcgccatggtatccagtaattccgcgctgcgggcaaagtggctaaccagctcttcgcgatactcgtccagttcagctttattcttttccagttcgtactgcaacgcctgttgctggcgtagtttacgattaccaaaacgcatggtcacagcaccaataatgatgccgacgactaacccaattagcgcatattcccaggtcatgaacatctcccgttgtcttttgtttccgtagggtgttggcttcaggctccatgcctgcggctgattatgccactataaccgttaattccacagaagtggaatcccgactgcatatcgcgtagtgtagaacggcctttttttcgtcaaccgtgaacaacggcgcaccgattattcaaggaataacaataagatcatgcaaagcgttaccccaacatcgcaatacctgaaggcgctcaatgaaggcagccatcaacccgacgacgttcaaaaagaggccgtcagccgcctggaaattatttatcaagaactcatcaatagcaggccaccagcccccaggacgagtgggctaatggcgcgggtcggtaagctgtggggtaaacgcgaagacacaaagcatacgccagtgcgtggcttatatatgtggggcggtgtaggacgcgggaaaacctggctgatggaccttttctatcaaagcctgctgggagagcggaaacagcgcctgcactttcaccgttttatgctgcgggtgcacgaagagctaactgccttacaggggcagaccgatccgctggaaattattgccgatcgctttaaagccgaaactgacgtgctctgttttgacgaattttttgtttctgatattaccgacgccatgctacttggcggtctgatgaaagccctgttcgctcgcggaataacgttggtcgcaacgtcaaatattccgccggacgaactttatcgaaatggcttgcaacgtgcacgttttttgcctgcaatcgatgccattaaacagcattgtgatgtaatgaacgtggacgctggtgttgattatcgactgcgtacactcactcaggcgcatctgtggctttcgccactcaacgatgaaacccgggcgcagatggataaactatggttggcgctggcgggggcgaaacgagaaaattcaccgacgttagaaatcaaccatcggccattggcgacaatgggcgtcgagaaccagacgctggcggtctcttttactacgctgtgcgtcgacgcccgcagtcagcatgactatattgcgctctcacgtctctttcatacggtcatgttgtttgatgtaccagttatgacgcggttgatggagagcgaagcgcggcgctttattgcgctggtggatgagttttacgagcgccatgtcaaattagtggtgagtgcagaagtgccgctgtatgaaatttatcagggcgatcggctgaagtttgagttccagcgttgcctgtcacgtctgcaagagatgcaaagcgaagagtatctgaagcgcgagcatttggcgggttaaaacctgtcacaaatcacaaaaaggggtcgatctttgaccccgacttctctataatcctgcgaccccacgttacaagaaagtttttttcccaaaactttttgtgtgctggcataggctattcgaaggggtaggtttgccggactttgtcgtgtgaacctcaacaattgaagacgtttgggtgttcaccaacgtgtaactatttattgggtaagcttttaatgaaaacttttacagctaaaccagaaaccgtaaaacgcgactggtatgttgttgacgcgaccggtaaaactctgggccgtctggctactgaactggctcgtcgcctgcgcggtaagcacaaagcggaatacactccgcacgtagataccggtgattacatcatcgttctgaacgctgacaaagttgctgtaaccggcaacaagcgtactgacaaagtgtactatcaccacaccggccacatcggtggtatcaaacaagcgacctttgaagagatgattgctcgccgtcctgagcgtgtgattgaaatcgcggttaaaggcatgttgccaaaaggcccgctgggtcgtgctatgttccgtaaactgaaagtttacgcgggtaacgagcacaaccacgcggcacagcaaccgcaagttcttgacatctaatcgggattataggcaatggctgaaaatcaatactacggcactggtcgccgcaaaagttccgcagctcgcgttttcatcaaaccgggcaacggtaaaatcgtaatcaaccaacgttctctggaacagtacttcggtcgtgaaactgctcgcatggtagttcgtcagccgctggaactggtcgacatggttgagaaactggacctgtacatcaccgttaaaggtggtggtatctctggtcaggctggtgcgatccgtcacggtatcacccgcgctctgatggaatacgacgagtccctgcgttctgaactgcgtaaagctggcttcgttactcgtgacgctcgtcaggttgaacgtaagaaagtcggtctgcgtaaagcacgtcgtcgtccgcagttctccaaacgttaattggcttctgctccggcagaaaacaatttgcgaaaaaacccgcttcggcgggtttttttatggttaaattctgaatcagcgtaaaaattggaaagttgctttttgctaccgtctgacagacaggcaaaacaaaaaccacatcggcaataagggactaagtcaactatttcagactaaagcgcatctctttttccccatttccggcatcgactcaccacaaaggtcgcaaaatctggtaaactatcatccaattttctgcccaaatgtcgggtattgctcattttttgtttgattttcgaacaaagagagtcgttccttactgggtaacacaacttctgactggccacctggtggctggtagcagtaaaaattctgactatacctggaggttttcatggctgtcgctgccaacaaacgttcggtaatgacgctgttttccggtcctactgacatctatagccatcaggtccgcattgtgctggctgagaaaggtgtaagtttcgagatcgaacacgtggaaaaggacaatccgcctcaggatctgattgacctcaacccgaatcagagcgttccgaccctggtggatcgtgagctgaccctgtgggaatctcgcatcattatggaatatctggatgagcgtttcccgcatccgccactgatgcctgtttacccggtagctcgcggtgaaagccgtctgtacatgcatcgcatcgaaaaagactggtacacgctgatgaacaccatcatcaacggttcagcttctgaagcagatgccgcacgtaagcaactgcgcgaagaactgctggcgattgcgccggtcttcggtcagaagccgtacttcctgagcgatgagttcagcctggtcgattgctatcttgctccgctgctgtggcgtctgccgcaactgggcatcgagttcagcggcccgggtgcgaaagagctgaaaggctatatgacccgcgtctttgagcgtgactctttccttgcttctttaactgaagcagaacgtgaaatgcgtctgggccggagttaatctgtatggatttgtcacagctaacaccacgtcgtccctatctgctgcgtgcattctatgagtggttgctggataaccagctcacgccgcacttggtggtggatgtgacgctccctggcgtgcaggttcctatggaatatgcgcgtgacgggcaaatcgtactcaacattgcgccgcgtgctgtcggcaatctggaactggcgaatgatgaggtacgctttaacgcgcgctttggcggcattccgcgtcaggtttctgtgccgctggctgccgtgctggctatctacgcccgtgaaaatggcgcaggcacgatgtttgagcctgaagctgcctacgatgaagataccagcatcatgaatgatgaagaggcatcggcagacaacgaaaccgttatgtcggttattgatggcgacaagccagatcacgatgatgacactcatcctgacgatgaacctccgcagccaccacgcggtggtcgaccggcattacgcgttgtgaagtaatacaaaaacaggccctggtggcctgttttgtcttttaatggcttaataaaatagcgtgattgtggcaatcatattcaccacgaaaccgactgccatggggatcgctgttcgcttcaccaccgcaaaaggcgaaacgcctgcaattcctgacgtaacgaccaccaccgcagtaatcggcgaaaccgcgcgcgctagcgtcgtggcaaaatgcatcggcataatcattacaaccgctggtacatgtagtccggctgcgatattcggaataagactggcaaatgacataaacggcgcattgccagagcccatcacaatggcacaaatggcaatgactagcgccataataatcatcacgccaataccgcccagaccagaatgctcagcacccctgataaccgcatcaacagtgccaatcgtcgttaagcctttcgcaaatatttcacccgcgaccaccagcgttaccacgttggcaaactgcgtacccatgccgtcaaaaaacgcctgcacatcgtccattgtttcgcgcaagttatgcttgcggaagaactcaacaaacatcgtcaccgtcaaactcagtaacatcaccaccaccagatgcagttctgactgcatcagcccgatgtgggcgaggaacagcgagccgagcatcaagattaacggcatcacaggtaaaatggcgtaatagagcggcgggacattatcgagagcttttagctctgcctgttcgtgattgatatttttatcttttttgtcaaaagcgcgttgcacgaaaaagtgggagatcgccaccgagataatgacgcaagaggcgaccggaagctggtagtggaagaagtaagtggcaattttcattcccgcgacctgggctgcaaaaatggagttcgtttccagaatcccccactcaatggacatcgtggttgcgataaccgccaccgcagagaggcgacttactcccagactcaccagcgtcggaaataaggtgaccatcagcaacatacccaggccggaggcgctggtaataaactgcgccatgatttggccgatgacgtaagttgccgacagaataatatacggcgagtgaatgagttttaacgggcggcttagcaagctcaccatcgcgcgactggctcctgtgcgctccatgtagcgggcataaccgcccaccgccataatcgacagccccaatccggcaatgcggttggacagcatgcgcaggatttcattataaatatcgacgatcaagtagccgctgcttttggcgggatcgagtacaccaccgaaccctaaccagacaccgcacatcatcaggaagatacctgcggcagccagcaccacctgaggtttgtagtttttcaggatcaaatagcccatcgtaattaatacgatgacagatataattatgccgaacattgttgaactccgtgtcaaaagaaaacggtcaatcccataaacggcagattgaaaacaatgatgttatattttttgcaagtctatttatggtgcggatgtcgtgtttttaattgtaggtgaggtgatttttcattaaaaaatatgcgcttatgattattttgtaagaacacattcataatattcataatgctcgtgaatagtcttataaataattcaaacgggatgtttttatctgcgttacattaatttttcgcaatagttaattattccgttaattatggtaatgatgaggcacaaagagaaaaacctgccattttcccctactttcaatcctgtgataggatgtcactgatgatgttaatcacactgaccttacagaatgggccttatgaacgcatttgattcgcaaaccgaagattcttcacctgcaattggtcgcaacttgcgtagccgcccgctggcgcgtaaaaaactctccgaaatggtggaagaagagctggaacagatgatccgccgtcgtgaatttggcgaaggtgaacaattaccgtctgaacgcgaactgatggcgttctttaacgtcgggcgtccttctgtgcgcgaagcgctggcagcgttaaaacgcaaaggtctggtgcaaatcaacaacggcgaacgtgcccgcgtctcacgtccttctgcggacaccatcatcggcgagctttccggaatggcgaaagatttcctttctcatcctggtgggattgcccatttcgaacaattacgtctgttctttgaatccagcctggtgcgctatgcggctgaacatgccaccgatgagcaaatcgatttgctggcaaaagcactggaaattaacagtcagtcgctggataacaacgcggcattcattcgttcagacgttgatttccaccgcgtgctggcggagatccccggtaacccaatcttcatggcgatccacgttgccctgctcgactggcttattgccgcacgcccaacggttaccgatcaggcactgcacgaacataacaacgttagttatcaacagcatattgcgatcgttgatgcgatccgccgtcatgatcctgacgaagccgatcgtgcgttgcaatcgcatctcaacagcgtctctgctacctggcacgctttcggtcagaccaccaacaaaaagaaataatgccactttagtgaagcagatcgcattataagctttctgtatggggtgttgcttaattgatctggtataacaggtataaaggtatatcgtttatcagacaagcatcacttcagaggtatttatggcaacgaatttacgtggcgtaatggctgcactcctgactccttttgatcaacaacaagcactggataaagcgagtctgcgtcgcctggttcagttcaatattcagcagggcatcgacggtttatacgtgggtggttcgaccggcgaggcctttgtacaaagcctttccgagcgtgaacaggtactggaaatcgtcgccgaagaggcgaaaggtaagattaaactcatcgcccacgtcggttgcgtcagcaccgccgaaagccaacaacttgcggcatcggctaaacgttatggcttcgatgccgtctccgccgtcacgccgttctactatcctttcagctttgaagaacactgcgatcactatcgggcaattattgattcagcggatggtttgccgatggtggtgtacaacattccagccctgagtggggtaaaactgaccctggatcagatcaacaccctggttacgttgcctggcgtcggtgcgctgaaacagacttctggcgatctctatcagatggagcagatccgtcgtgaacatcctgatcttgtgctctataacggttacgacgaaatcttcgcctctggtctgctggcgggcgctgatggtggtatcggtagtacctacaacatcatgggctggcgctatcaggggatcgttaaggcgctgaaagaaggcgatatccagaccgcgcagaaactgcaaactgaatgcaataaagtcattgatttactgatcaaaacgggcgtattccgcggcctgaaaactgtcctccattatatggatgtcgtttctgtgccgctgtgccgcaaaccgtttggaccggtagatgaaaaatatctgccagaactgaaggcgctggcccagcagttgatgcaagagcgcgggtgagttgttttcccctcgctcgcccctaccgggtgaggggaaataaacgcatctgtaccctacaattttcataccaaagcgtgtgggcatcgcccaccgcgggagactcacaatgagtactacaacccagaatatcccgtggtatcgccatctcaatcgtgcacaatggcgggcattttccgctgcctggttgggatatctgcttgacggttttgatttcgttttaatcgccctggtactcaccgaagtacaaggtgaattcgggctgacgacggtgcaggcggcaagtctgatctccgcagcctttatctctcgctggttcggcggcctgatgctcggcgctatgggtgaccgctacgggcgtcgtctggcaatggtcaccagcatcgttctcttctcggccgggacgctggcctgcggctttgcgccaggctacatcaccatgtttatcgcgcgtctggtcatcggcatggggatggcgggtgaatacggttccagcgccacctatgtcattgaaagctggccaaaacatctgcgtaacaaagccagtggttttctgatttcaggcttctctgtgggggccgtcgttgccgctcaggtctatagcctggtggttccggtctggggctggcgtgcgctgttctttatcggcattttgcctatcatctttgctctctggctgcgtaaaaacatcccggaagcggaagactggaaagagaaacatgcaggtaaagcaccagtacgcacgatggtagatattctctaccgtggtgaacatcgcattgccaatatcgtaatgacactggcggcggctactgcgctgtggttttgcttcgccggtaacctgcaaaatgccgcgatcgtcgctgttcttgggctgttatgcgccgcaatctttatcagctttatggtgcaaagtacgggtaaacgctggccaacgggcgtaatgctgatggtggtcgtgttgtttgctttcctctactcatggccgattcaggcgctgctgccaacgtatctgaaaaccgatctggcttataacccgcatactgtcgccaatgtgctgttctttagcggctttggggctgcggtggggtgctgtgtcggcggcttcctcggtgactggctgggaacccgcaaagcgtacgtttgtagcctgttggcctcgcagctgttgattattccggtatttgcgattggcggcgcaaacgtctgggtgctcggtctgttactgttcttccagcaaatgcttggacaagggatcgccgggatcttaccgaaactgattggcggttatttcgataccgaccagcgtgcagcgggcctgggctttacctacaacgttggcgcattgggcggcgcactggccccaatcatcggcgcgttgatcgctcaacgtctggatctgggtactgcgctggcatcgctatcgttcagtctgacatttgtggtgatcctgctgattggtctggatatgccttcccgcgttcagcgttggctgcgcccggaagcattgcgtactcatgacgctatcgacggcaaaccatttagcggtgccgtgccatttggcagcgccaaaaacgatttagtcaaaaccaaaagttaatcctgttgcccggtctatgtaccgggcctttcgctaagggaagatgtatgtcgttacttgcacaactggatcaaaaaatcgctgctaacggtggcctgattgtctcctgccagccggttccggacagcccgctcgataaacccgaaatcgtcgccgccatggcattagcggcagaacaggcgggcgcggttgccattcgcattgaaggtgtggcaaatctgcaagccacgcgtgcggtggtgagcgtgccgattattggaattgtgaaacgcgatctggaggattctccggtacgcatcacggcctatattgaagatgttgatgcgctggcgcaggcgggcgcggacattatcgccattgacggcaccgaccgcccgcgtccggtgcctgttgaaacgctgctggcacgtattcaccatcacggtttactggcgatgaccgactgctcaacgccggaagacggcctggcatgccaaaagctgggagccgaaattattggcactacgctttctggctataccacgcctgaaacgccagaagagccggatctggcgctggtgaaaacgttgagcgacgccggatgtagggtgattgccgaagggcgttacaacacgcctgctcaggcggcagatgcgatgcgccacggcgcgtgggcggtgacggtcggttctgccattacgcgtcttgaacacatttgtcagtggtacaacacagcgatgaaaaaggcggtgctatgaccacgctggcgattgatatcggcggtactaaacttgccgccgcgctgattggcgctgacgggcagatccgcgatcgtcgtgaacttcctacgccagccagccagacaccagaagccttgcgtgatgccttatccgcattagtctctccgttgcaagctcatgcgcagcgggttgccatcgcttcaaccgggattattcgcgacggcagcttgctggcgctgaatccgcataatcttggtggattgctacactttccgttagtcaaaacgctggaacaacttaccgatttgccgaccattgccattaacgacgcgcaggctgcagcatgggcggagtatcaggcgctggaaggcgatgtaaccgagatggtgtttatcaccgtttccactggcgtcggcggcggtgtagtgagcggcggcaaactgcttaccggccctggcggtctggcggggcatatcgggcatacgcttgccgatccacacggcccggtctgtggctgtggacgcacaggttgcgtggaggcgattgcttctggtcgcggcattgcggcggcagcgcagggtgaactggcgggcgcggatgcgagaactattttcacacgcgccgggcagggcgacgagcaggcgcagcagctgattcaccgctccgcacgtacgcttgcaaggctgatcgctgatattaaagccacaactgattgccagtgcgtggtggtcggtggcagcgttgggctggcagaagggtatctggcgctggtggaaacgtatctggcgcaggagccagcggcatttcatgttgatttactggcggcgcactaccgccacgatgcaggtttacttggggctgcgctgttggcccagggagaaaaattatgatgatgggtgaagtacagtcattaccgtctgctgggttacatcctgcgttacaggacgcgttaacgctggcattagctgccagaccgcaagaaaaagcgccgggtcgttacgaattacagggcgacaatatctttatgaatgtcatgacgtttaacactcaatcgcccgtcgagaaaaaagcggaattgcacgagcaatacattgatatccaactgttattaaacggtgaggaacggattctgtttggcatggcaggcactgcgcgccagtgtgaagagttccaccatgaggatgattatcagctttgcagcaccattgataacgagcaagccatcatcttaaaaccgggaatgttcgccgtgtttatgccaggtgaaccgcataaaccaggatgcgttgtcggcgagcctggagagattaaaaaggttgtggtgaaggttaaggctgatttaatggcttaaaacttagttcgttttaaagattctgcagacactgtctgcagaattcgaaaccgctgaaattaacggcgtctatagccttcctctagcaccgcctgtgttcgaacgagttcatctgcgagtcgtttctcatcaggtagttgcatcttatattcgcttgccagaacggtgttaggcaaacctgccagagcataatgtgcttctccggctcctttctctgcacagagaaccagaccgatgggcggattttcatccggtagcgtccagtgctctttggcgtagttgagatacatattcatctgtccggcatcgctatagctgaatttgcccacttttagatcgacgattagtaggcagcgtaaacggcggtggaaaaacagcagatcgacacgaaaccagttgtcatcaatgcgtaaccttcgctgccgaccaacaaaggcaaaatcatccccaagttccagcatgaaatccatcaggtggttgatcagcacctcctcgaaatcagattctgaatattcatctttcaattccagaaattcgagcacaaagggatcgcgtatcgcctgttgcggaagaatatgcgtctcggtaggagcgtgttgttgcagcatggctgatttgtcatgtgacagtagtgttcgctcataaaattgggtcgcaatttgccgttctagctggcgaacagaccagccacagcggagcgtctctttttcataaaagctgcgggcgtcagcgtttttaacggaaagtaaacggacgtaggtggaccagggcagggggaaagatttggcagacagcgtctgccaaatctttgccgatgggaattctgcagatggtgtctgcggaattcccaatggtgttaattcgccagacactgtctggcgaatttcaacatgttgaaaaaagaggtaaaaaagcctcatttggcgtaagttttttgcagagaacccacgcttataccttagacttaaatcctttgatagtcgcttgattagctgcgcaccatacgcagccctggcctcgccaccttgttcaaattcgacaattcgtcggccaatttcccagtatgtcgcggtcatcagcgcgttaacgctacgtaccgtttccgtccgggcgctatcgaccagatgaataataccgtcgtggatttgctggtagcctgttgaggttctctctgagagcgattccattatctgtccctttatatggcgctgcgttgaataatggaatcagctatacgccgggcatctaccggtaacaatccagatgagcgtattacattggttttcttcagattatgcgaggcgctttccagaaagaaaggagaatttcagcgccgactcttttctgaggaggcggcgctgggacagagcttaaacttccagccagttcataataccgtctgccgccttacgaccttcggcaatagcggttaccaccagatcggaaccacggacgatatcgccgccagcaaagattttcgggttgctggtctggaaggcgttgtcgctgccttccggggcgatgatgcggccttgtgaatccagctcgacgctgtgttttgccagccattccatgttgtgtggacggaaaccaaacgccatgatcactgcatctgccggaacgatatgttcggaacctgcaacgatctccgcgcggcgacggcctttggcatccggttcgcccatttcggtacgtaccatttttacgccgctgactttaccgttaccgttcacttcaatccccagtggctggacgttgaatttgaactctacgccttcttcccgcgcgtttttcacttcgcggcgggaacccggcatgttctcttcatcacgacgataggcacaggtaacgtgcttcgctccctggcgcacggacgtacgcacgcagtccatcgcagtgtcgccaccgccaaggaccaccacgcgtttgccttccattctgacgaacggttcgtcgcgggtttcaccaaagcccattaactgtttggtgttggcgataaggaacggcagcgctgcgtacacgccatcggcgtcttcgttttccagcccgccgcgcattgactgataagtcccgacgccaaggaagacggcatcgtaatcactcagcagatcgtccagctgcacgtcgcggcccacttcggtattgagtttgaattcaatacccatgccagtgaagatttcacggcgacgcgtcattacctctttttccagcttgaaggccggaataccgaaggtcagcagcccgccaatttctggatgacggtcgaagacaacggcttttacgccgttacgcgtcaggacatccgcacacgccagacctgccgggcctgcgccgataatcgccacttttttaccggtttgcttcacgccggacatatccggacgccagcccatttcgaacgctttatcattgatataacgctcaatgttgccgatggtcaccgcgccaaactcatcgttcagagtgcaggaaccttcgcacagacggtcttgcgggcagactcgtccgcaaacttccggcagggtgttggtctggtgcgacagttccgccgcttcaaaaatacgcccctcgttggcgagcttcagccagttcgggatgtagttgtgtaccggacatttccactcgcagtatgggttgccgcacgacaggcagcggtcagcctgcgctttggcctggccttcggaaaacggctcgtaaatttcaacaaactcaattttgcggatcttcagcggtttctttggcggatcaacgcgctgcaggtcgataaattgataaacattctgactcattgttgctaccccttactgcgcctgcacgcgcaactctgctgcgctacgactacgatgacccagcagtgcttttacatcactggacttcggtttaaccagcgcaaatttagtggcgaaggttgaccagttcgccagaatctcttcaccgcgctgagagccagtatgctgaacatgctcggtgataagaccgcgcagatgctcttcatggatcgccagatcgtcaacgcttaagacctcgaccagttccgggttaacgcgtttgcggaaatcaccgctttcatcgagaacgtaagcgaagccgccggtcatgcccgcaccgaagttaacgccggttttacccagaatacagacaataccgcccgtcatatattcacagccgttgtcgccaatgccttctaccacggtgatagcaccggagttccgcacgccgaaacgttcacccgcgcggcctgcggcatacagacgaccaccggtcgcgccatacaggcaggtgttgccgataatgcttgcttcatggctgcggaaggcggaaccaaccggaggacgaatggcgattaagccgcccgccatgcctttaccgacatagtcgttggcatcaccggtcaggtacagttccacgccgcccgcgttccacacgccgaagctctggcctgcggtgccgttgaagtacgctttgataggatcggctgccagcccctgatcgccgtgcgtctgggcgatatagcctgaaagcgacgcgccgacagaacggtcggtgttgcgaatatcgaaccagaaggttttgctctggcgctcatcgacaaacggtttcgcctgttgcagcaactgcgcgttcagcaggccgttatcaaacggtgggttgttttcggtgcagtagagtgccttacctggatgcggttcggcggtctccagcagcttcgacagcgccagtttttgctgtttggcggtgaaaccgtccagttctttcagcaggtcggtgcgaccaatcagatccaccagacgcgttacgcccagctgtgccatcagctcgcgggtttcacgggcaataaattcaaagtaattggtaaccttgaacggcaggccgtgatagtggttcttacgcagtttgtcatcctgagttgctacacccgttgcgcagttgttcagatggcaaatacgtagatatttacagccgagcgccaccatcgggccagtgccgaagccgaagctttctgcgccgagaatcgccgctttgatgatatcaacaccggttttcaggccgccatcgacctgcaaacggatcttatgacgcagaccattggcaaccagcgcctgctgggtttcaacaagccccagctcccacgggcaacctgcgtatttcactgacgacagcgggcttgcgccggtgccaccgtcatagcctgcgatggtgattaaatcggcataagcttttgccacgccagtcgcgatggtgcctacgcccggttcggaaaccagcttcacggagatcatcgctttcgggttaacctgcttgaggtcgaaaatgagctgcgctaagtcctcgatagagtagatatcgtggtgcggcggcggggagatcagcgtcactccgggcaccgaatagcgcagtttggcgatgtaaggagtgactttgtcgcccggcaactgaccgccttcgcccggcttcgcgccctgggcgactttaatctgaatgacgtcggcattgaccagatacgccggagtaacgccgaagcgaccagaagccacctgcttgatgcgcgacactttgttagtgccatagcgcgccgggtcttcgccgccttcaccggagttcgagttaccgccgatgctattcatcgcttccgccagcgcctcgtgggcttccgggcttaacgcgccgatagacatcgcggcggtatcaaagcgtttaaacagttcgcttgccggttcaacatcagcaatgttgaccgcgttttcacccggcgtaattgccagcagatcgcgcagcgtggttgccggacgctcattaaccagcttcgcgtattcctgatagtcgctgtactcgccgctttgtaccgcctgttgcagcgtgcgcaccacgtccgggttgtaagcgtggtattcgccgccgtggacgtatttcagcaggccgccctggctgatgggcttacgcgccagccaggcacgtttcgacaggttcagcagatcctgctggaagtcttcaaagctcgccccaccaatgcggctgaccgccccctggaagcacaggcccactacatcatcgtgcagaccgaccgcttcaaacagtttcgagcagcggtaagaggcgatggtggagatgcccattttggacatgattttgtacaagcctttgttgatgccgttacggtagttgagcatcacggtacgataatctttggcaatcgcatgggtgtctaccaggcggcccagcgtttcataggcaaggtatggataaatagccgtcgcgccgaagcccagcaacacggcgaagtggtgcggatcgcgggcgctggcggtttcgacgatgatgttggcatcgcaacgcaggctttgatcgaccagacgggtctggatcgcgccaaccgccatcggagccggaaccggcaggcgatctttagcgatattccggtcggagagcaccagcaacacggtgccgctacgtaccattttttcggctttgtcgcacagctctttgactgtcgcttcgagcgtggttttagtgacgtcaaaggtgatatccagcgtatctgcgcggtagtgctcctctttcatcgtcgtgagctgtttgaaatcggagtagagcagaatcggcgatttaaagcttaaacggtgcgcctggccttctgcttcgcagaagacgttcatttcacgaccaatgctggtggcgagcgacataacatgcgcttcacgcagcgggtcgattggcgggttagtcacctgggcaaactgctggcggaagtagtcgtaaataatgcgcggctgactggagagcacggcgaatggggtgtcgtcgcccatcgaaccgaccgcttcctgaccgttttcgcccagtacgcgaattacggagtccagctcttccgcgctgtagttaaactgtttctggtagctggcaagcgtgtcgtcgtccagttcgcggctacccacttcttcatcgggcagatcttcaaacggtaccagtcggcggacgtttttctccatccactctttatatggatggcggcttttcagatcgtcatcggtttctgccgagtgcagaatacgcccactgcgggtgtcgatcaccatcagttcgcctggcccgacgcggcctttttcgaccacttcgtcaggctgataatcccagataccgacttcagaggcgcaggtgatgagcttgtctttggtaatgacgtagcgtgccggacgcagaccgttacggtcgaggttacaggcagcgaagcgaccatcggacatcacgatgcccgccgggccatcccacggctccatatgcatggagttaaagtcaaagaaggcacgcagttccgggtccatatccgggttgttctgccaggcgggtggcactaacagacgcatggcgcggatgatatccattccgcctgccagcagcagttccagcatgttatccatcgaactggagtcagagccggtttcattgacgaacggtgcggcgtcgtgcagatcagggataagcggcgtctggaatttataggtacgcgcacgcgcccattggcggttaccggtgatggtgttgatttcaccgttatgcgccaggtagcggaacggctgcgccagcggccagcgcggtacggtgttagtggagaagcgctggtggaacaggcagatggccgattccagacgcaggtccgcaagatccagataaaagcgcggcagatccgccggcatacacagacctttatagatgttcaccagattcgacaggctacagacgtagaagtctttgtcggcttcgagacgcttttcaatgcggcggcgggcgataaacagacggcgctccatatcgcgcggacgccagcctgccggggcgttcacaaaaatttgctcaatgcgtggcagagaggagagggcgatttcacccagcacgccttcgttagtggggacatcacgccagcccacaatcgacaaggtttcgcgttgcagttcttcttcaacgatgcggcgtgcggcagcggcgagttcaggatctttattcaggaatagcatcccgacggcgtagttttttgctaaacgccagccgcgctcctgcgcaacgatgcgaaaaaagcgatccggtttttgtaacagcaagccgcaaccgtcgccggttttaccatcggcgagaatcgcgccacggtgctgcatgcgggccagtgcgtgtattgcagtacgcactaccttgtggctaggttcgccttctatgtgggcgatcaggccgaaaccacagttatccctctcaagggatttatcgtacaacatatcgtgaacctcccccaggctctgcgggaaccccacttccgaaccgctgcgcacgggcacagaaagagcgtggcgacggggtttgcgtgtcatacgcgcgcctcgcattcgcccccttgttgtccttttcgcatcggttaatacggtgaagaggggatctcaattactgcataaatatgatgagcaggctgctcatccagaaagcttccagcggatttccaacttatcgggaaagctgatacaggtcaaatggcaagcttattggtacagaaatgtgctttagcgcaaaattctttattaaatgactgaaattaaaatagattttatctttaaggctaaaagggaagtcgttagagaaacagtcaattcctgactgtcataaaggcgtgttaacccttatcctgccttgaactgacgagaaaaccagcattttatactgccttaattggtaatgacgtttcatgctactgtttttgcctaaaatccataaggagataaaaaaatctgacacaagataagcaaaagtgatttatgtgattatgcatgaaatttcggtaattttgattgattatgcagttgataaaagcaggccgggacgattgatccaggtcatcgccgaattgagctaaaaatggcaggctttggcctcttttcaaggcgcggtctatcagattatgcagttacagaaattagtcaatatgtttggtggtgatctcacccgtcgttatgggcaaaaggtgcataagctgacgctgcacggcggttttagctgccctaaccgtgacggtaccatcgggcgtggtggctgcacattctgtaatgtggcctcgtttgccgatgaagcgcagcagcatcgttccattgccgagcaactggcgcaccaggcgaatttagttaaccgcgctaaacgctatctggcctactttcaggcgtataccagcacctttgcggaagttcaggtgctgcgttctatgtatcagcaggcggtgagccaggccaatattgtcggtttgtgtgttggtacccgcccggactgcgtgccggatgcggtgctggatctgctttgcgaatataaggaccagggttacgaagtgtggctggaactggggctacaaaccgcccacgacaaaacactgcatcgcatcaaccgcggccatgattttgcctgttatcagcgtacaacccagctggcacgtcagcgcgggctgaaggtgtgttcccacttaattgtcggcctgcctggcgaagggcaggctgaatgtttgcaaacgctggagcgagtggttgaaaccggcgtggacggcataaagctgcatccgctgcatattgtgaaaggcagcattatggcgaaagcctgggaagcggggcgtttgaacggtattgaactggaggattacacgctcactgccggagaaatgattcgccatacgccaccggaagtgatctaccaccgcatttccgccagcgcccgtcgcccgacgctgcttgctccgctgtggtgcgaaaatcgatggacgggaatggtcgagctggatcgctatctgaatgaacatggcgtacagggatcggcgctgggacgtccgtggctacctccaacggagtaggtcgttgaggggaattccgcatttctcacacaatttataacgtaactgtcagaattgggtattattggggcaggttgtcgtgaaggaattccctaatgaagcaaattcgtctgctggcgcagtattatgttgacctgatgatgaagttaggtctggtgcgcttctcaatgttgctggcgctggccctcgtcgttcttgccattgtggtacaaatggcggtaaccatggtgctgcatggtcaggtcgaaagcattgatgttattcgttctatcttctttggtttgctgattacgccgtgggcggtctactttctatcggtggtcgtcgagcaactggaggagtcacgacaacgtctgtcacggctggtgcaaaaactggaggagatgcgcgagcgcgatttgagcctcaacgttcagttaaaagataatattgcccagctaaatcaggaaattgccgttcgtgaaaaagcggaagcagaactgcaggaaaccttcggccaactgaaaattgaaatcaaagagcgcgaagagacacaaattcagctcgagcagcaatcctcattcttacgttccttccttgatgcttcacccgacctggttttttatcgtaacgaagataaagagttttccggctgtaaccgcgcgatggagctgctgaccggaaaaagcgaaaaacaactggttcacctgaaacctgctgatgtttactcaccggaagccgccgcaaaagtcattgaaaccgatgaaaaagtgttccgtcataatgtgtcactgacctatgaacagtggctggattacccggacgggcgcaaagcctgctttgaaatccgtaaagtgccgtactacgaccgcgtgggtaaacgtcacggtttgatgggctttggtcgcgacattaccgagcgtaagcggtatcaggatgcgcttgaacgggccagccgcgacaaaacgacgtttatctccaccatcagtcacgaattgcgtacaccgctgaacggtatcgtcggcctgagccgtattctgctggataccgaactcaccgccgagcaggaaaaatatctcaagaccatccatgtttcggccgtcacgctggggaatatctttaacgatattatcgacatggataagatggaacggcgcaaggtccagcttgataatcaaccggttgatttcaccagcttccttgccgatctggaaaatctctccgcattgcaggcgcaacaaaaaggattgcgctttaacctggagccgacgctgccattaccgcatcaggtcattaccgacgggacgcgtttacggcagatcctgtggaacctcatcagtaacgccgtcaaattcacccagcaaggccaggttaccgtgcgcgtgcgctacgatgaaggcgatatgctgcattttgaagtggaagactctggtatcggcattccgcaggatgagctggataaaattttcgccatgtattaccaggtgaaagacagtcatggcggtaaacctgccaccggcaccggcaccggtattggtctggccgtttctcgtcgtctggcgaaaaatatgggcggcgatattacggttaccagcgaacagggcaaaggttcaacctttacgttgacgatccacgcaccgtcggtagcagaagaggtcgatgatgcgtttgatgaagacgatatgcctttaccggcgctgaatgtgctgctggtggaagacattgaactgaacgtgattgttgcgcgttctgtgctggaaaaattaggtaacagcgttgatgtcgccatgaccggcaaggcggcgctggagatgtttaaaccgggcgaatacgacctggtgttgctggatattcagttgccagatatgaccgggctggatatctctcgtgaactgacgaagcgttatccgcgcgaggatttaccgccgctggtggccttaaccgctaacgtgctgaaagacaaacaagagtacctcaatgctggaatggatgatgtgctgagtaagccgctttcggttccggcgctaaccgcgatgatcaagaaattctgggatacccaggatgatgaggagagtacggtgacgacagaagagaacagtaaatcagaagcattgctcgatattcccatgctggaacagtatctcgaacttgtaggaccgaagctgatcaccgacgggttagcggtgtttgagaagatgatgccgggctatgtcagcgtgctggagtcgaatctgacggcgcaggataaaaaaggcattgtagaggaaggacataaaattaaaggtgcggcggggtcagtggggttacgccatctgcaacagctgggtcagcaaattcagtctccggaccttcctgcctgggaagataacgtcggtgaatggattgaagagatgaaagaagagtggcgtcacgacgtagaagtgctgaaagcgtgggtggcaaaagccactaaaaaatgaccccggctagaccggggtgcgcgaatactgcgccaacaccagggaaatcttggctgcgccgtaaattattatgatgagttacaagggcacagcactgtttttcaggccgcacgcagttaagatagcaaaacttaaatgatttgttacatgaatcagttaaatgtgtgatgcgtaccatttttattaaaaaaattaatgtgtttcagtcaattgcgaaaggatgatcacaatgaagaaaattggcgtaattctgagcggatgcggcgtctatgacggttctgaaattcatgaagcggtgttgacgttgttagctatttcacgcagcggtgcgcaggcggtctgctttgcaccggataagcagcaggttgatgttatcaaccatttaactggcgaagcgatgacggaaacgcgcaacgtgctgattgaagcggcacgaataacgcgcggtgaaatccgtcctctggcccaggccgatgccgctgaactggatgcgttgattgtgccgggggggtttggcgcggcgaagaatttaagcaattttgccactcttggtagcgaatgcaccgttgaccgtgaattaaaggcgctggcacaagcgatgcatcaggccggaaaaccgcttggttttatgtgtattgccccggcgatgctgccgaaaattttcgatttcccgctgcgtttgaccatcggtactgatatcgataccgcagaagtgctggaagagatgggcgcggagcatgtgccctgtcctgtcgatgatatcgtggttgatgaagacaataagattgtcaccaccccagcatatatgctggcgcagaacattgcagaagcggcgagcggcattgataagctggtttcccgcgtgctggttctggctgaatgagtaaaagccgcttaacggtgtttagtttcgttcgccgttttcttttgcggttaatggttgtcctcgccgttttctggggcgggggcatcgcgttgtttagtgttgcgcctgttcccttctcagcggtaatggtcgagcgacaggtcagcgcctggctgcatggcaattttcgttacgtggcacattctgactgggtcagtatggatcaaatctcgccgtggatgggactggcggtgattgccgcagaagatcagaaatttcctgagcactggggctttgatgtcgcttccattgagaaagccctggcgcacaacgagcgcaatgaaaaccgtattcgcggtgcttcaacgatttctcagcagacggccaaaaatctctttttatgggatgggcgtagctgggtacgaaaagggctggaagctggattaacgctggggatagaaacagtctggagcaaaaagcgtatcctgacggtttacctgaatatcgccgaatttggcgacggtgtgtttggcgtcgaagctgcggcacaacgttatttccacaaacccgcgagcaaacttacccggtcggaagctgcattactggcagctgtattacctaatccacttcgtttcaaagtctcctcgccatcgggctacgtgcgtagccgtcaggcgtggattttacggcagatgtatcagttaggcggtgagccgtttatgcaacaacaccagctggattaagcttcgcgcgaagtgagggccagcgttttgctctcacgaggttgcagatctttctgcagggcaatagccagcgccggttgggcgataaatcgtttccataaccgctcttgcttacgcagacaacaccacttcgaccaggtcgccagtggaatcaatgtgctttcaccaatgttgtcacagacgaccgggataacctctgactcactgatgcggtgacagaggatattctgcggcttcagcgacatcgtcacgatacggttatcctgcaaataacgcttcagctgtttcagtagctggcgcagttgtgcaatgtcttcttcgtaacggcattgttcagcaaattcggtcagcgtaatggagggtttaccgtcaaaatctgcaatcacatcgtagacataaccggttccgcaatccgtctcaacggtaccgtgatagcgcggtattccactccagtcttttaaccggcgaccaagatgcgcgtagtactttaactcacggcggatctctttatcgccaccatcgccacgatggtagacaatcttgatacagcgttgggcatcttccggatgcgcataacatttccgatgtcttccggtgcccaggggactttgttcagataagcgaatcatgccatctcctggaaatattttctgacgatctccagtatggtcgattaacttaaacaaaacctaaacaatgcctcttaaggttttcttaaggttcttctgaaagtgaaaagcgcacaaaatgtacaaatgacgttgattgagaacgatttcagtacgtgattttcttattgtcggggggagtttgaagggagttgtatgtcaaagtgatgaagattaatcttcatcaaaaccagagttaaagagggcgataacggctgccagtgcttcctcttcctgtgggccggtcgcttcaacttcaatctgccgtcctttggcagaatccagcatcagcagtgcaataacgctattggcttcagcctcggtgccttcgtcattacgtaacagcacttcagcgtcaaaaccctgcattaattcaaacagcttcattgcaggccgggcatgcatgcccagcttgtttgtgatttcaacagtttgcttgacggtcatggtttacgtttttccagcgtacgatggcgtgactggacgtttttaccgcgcgagcggaagtagtctgccagttgctctgcaatatacaccgaacggtgcttcccgccggtacaaccaatggcgaccgtcaggtagctacggttgttggtttccagcataggtaaccatagctcaagatagcttcgcgtctggtagataaaattgtgtacttctgtgtggcggtcgaggaacgcggcgacgggcttatcaagacctgtcattggacgcagtttcggatcccagtgcgggttcggcaagaagcgcacgtcaaagacgtaatctgcatcgatagggataccgtgtttgaagccgaaagactcaaagaccattgtcagttcgcgttcacgtttacccagcagacgggtacgcagcatttcagccagctcgtgaacggacatttctgaggtatcgacaatcagatccgctcgcgaacgcagaggttccagcaaatcgctttctttgtcgatagcactttccagcgacaggtttttgctggaaagcggatgcagtcggcgcgtgtcactgtaacgacgaattaaggtattacggtcggcatccaggaacaggagttgcggtgagaaagcgtcaggcaggttactcatcgcctgttcgaatatttctggtgactccggcatattacgaacatcaatgctgacggcggcagaaatctcgcgatcggccagagttcgagccagatcgggtaacaacactacgggaaggttatccacgcagtaaaaacccatatcttccagcgcacgcagggcgacagatttacctgaacctgaacgtccgctgacgatcatcagtaccatgtactgtttctcctcacaacgtctaaaagagacattaccgaataactacgcttcatccggagtaccttcggtatccgtaatgatttgatacagctcttcatcgctctgggctgcgcgtaaacggcggcagatggttttgtccgccagacgtttcgccaccagtgacagagtatgcaggtgcgttttagtttggtctgccggcaccagcagggcaaaaagtaaatccaccggttggttgtcgatggcatcgaaagctataggcgtttcgagctgaacgaaaacgccaacggcgcgcagagtatcttcttccagtttgccatgcggaatggcaataccattgccgataccggtactgcccattttttcccgcgtcaggatagcttcaaaaaccacctgaggcggcagactaagttgtttcgccgccagctcgctgatgatttccagggcgcgttttttgctctgacagtggacgcggcttcgcgtacattccctgttaagaacactgctaagctgtagagttgtatcattatttgtcataatttcacctaagaacctgcccactcaaacagtggaacaggctcggagcattaaccgtacaaatggcccgttgtgccgcacaacaggccgccatgcacatgctaattgcccggacaattagtgttgtttcagtttatctttatgtttggtcaactggcgtgccagcttatcaattaagccatcaatggcagcgtacatgtcctgaccttccgcgctggcatgaatttcaccaccgtttacatgcagtgttgcatctgaggtgtgggtgactttctccactttcagaacaacatagacctggttgattcggtcaaaatattgctcaagtttggcaaatttggctgtaacaaattcgcgcagtgcctcggtgatctcgacgttatttccggtaatgttgagctgcatagtgtcttccttatcggttgggtcaaacgagctgtttacgctggtttgacggcggaatggataaagactctcggtacttcgcaacagtgcggcgtgccaccatgataccttgttccgacagcaaagaggttaacttgctgtcgctcaacggtttcgctgggttttccgccgcgattaatttcttcaccagcgcacgaatcgccgtggaggaagcttcgccgccgccctcggtattgacgtgactggaaaagaaatacttcagttcaaaaatgcctcgtggactatgcaggtatttttgcgtggtcacgcgagatatcgtcgattcatgcatttcgacagcctgggcgatatcggccagtaccatcggtttcatatattcttcgccttgctcaaagaaggcttgctgctgttcaacgatacagcgactcacgcgcagtagcgtatcgttacggctttccagactcttgatcaaccatttggcatcctgcagattgctgcggataaactggctgtcaccatcattgcgagcgttattgcacatcgaggcgtagtgctggttgatttgcagacgcggaatgctgtcactgttgagttctactgtccagtgaccgttatgcttacgcaccagcacatctggaatgacatactcaggttcgccagtctggatcgactgcccggggcgcggatcgagcgactggatcagattgacggcttctttcagcacatcttctttcagacgcgtgacgcgcattaaagtgcggaagtcgtgattggctaacagatcgagatgatcgctaatgatcaatctggcctcttccagccacggcgtggttttatcgaattgggagagttggattagcaggcagtcacgcagatcttttgccgctacaccgaccggatcaaaccgttggatccgcttaaggacggcttcaacctcgtcgatgtcgatctcttcatcgcccatactttcgagaatatcttccagcgggacagtcagataaccggtgtcatcaacggcatcgacgatagaggtagcaatagcgcggtcagtgtcggaaaacggtgtcagctcgacctgccacatcaggtaatcctgcaaggtctgcgtcgtttcgccctgatagaccggcagctcatcgtcaatgtagtcaccgctggtgccggatggtgtaccagcggtgtaaatggtgtcccaactggcatcgagcggcagctcttccggcatctctttttgttcgagcgcgtcggcggtgtccagcgtttcactgtcttgcgtttcgcgggtgtcgatttcttcatgagtgtcgatttgctcaagcagcggattactctccagcgcctgctgtagctcctgctgaagttccagcgtcgacaactgcaacagacgaattgcctgttggagctgtggcgtcatcgccagttgttggctaagcctgagttgcaaaccttgcttcatgttcagaatcgtactctcctgctaaaacgtcgcaaacttctaccctatcagagtctgaagtcttccccaaggtatacacgcttaacgtgttcgtcttgtaagatttctgtaggcgtgccgtgggcgatcaaatgcccctgactgacgatataagcgcgttcacaaaccgccagtgtttcacgcacgttgtggtcagtgatcagcacgcccaggccgctgtcgcgcaggtgctcaatgatgcgtttaatgtcgataaccgagatcgggtcaacaccggcaaacggttcgtcgagcagaataaatttcggattcgcagccagtgcgcgggcaatttctacacggcgacgttcacccccggagagtgactgccccatgctgtcacgcaggtgctcaatgtgaaactcttccatcagctcgttcgcgcggtcttcacgttgttcagcagacaagtcgtcacgaatttgcagtaccgccatcaggttatcgtaaacgctgaggcgacggaaaatggaggcttcctgtggcagatagccgataccgcggcgcgcgcgtgcatgcagaggcagcagactgatatcgtcatcatcaataatgatgttgcccgcatcgcgcggcacaatgcctacaaccatatagaaagtggtggtcttaccggcaccgtttggccccagcagaccgacaatttccccggagttgacggtcaggctgacgtcttctaccacgcgacggcctttataggcttttgcaaggttctttgcagttaatgttgccataacgaattaattacccttcttctgtgccggggtctggcctttgttgtttttatcctgcagctgcgacggcaccagaacggtggttacgcgcttgcctttgtcgctgaaagcctgcattttctgctctttcaccaggtaagtgatcttatcgcccttaatgttgctatcgacctgctgcagataagcattacccgtcagaacgacaaaatcttttgccagttcgtagtgcatctgggaagcgtgaccttcaacgggtttaccgttgtcctgcatctggtagaacgttgccggtttaccgtagccgtcaatcacttctttaccttgttcgccgcccggacgggtaacgaccactttgtcggcattaattttgatggtgccctgggtgacgatgacattaccggtaaaggtaaccacgttgccttgcatatcaagagattgctggtccgattcaatgtggatcggctgatcagtgtctccggttacggcaaatgccggaatgctggcggccagaagtgagctggcaagcacaagattaaggctgagtttgtttgttttgaatttcataggatgttctaaccttttcaatcagctcggcgttcttgctgcgtaagttgccgcgcattttcagaccgctggagttaaatgttgttccgtataacgtgacgaggtcttcagaggtaacatcctgcgtcaccagattgatctgcgcgttatccgtcgtgattctgcgaagttgagagtctggcacaagtgcgttgacttcaacgtgtccatataaatagagcatccggtcattggtcagcttggctttatctgcttttacggaccatgtcgggattttatccttatcaaacgtggtaagtaccggctgcgtaaaccacgaaacggcctgatcggaataatattcaacgtgttgagcaatcaatcgatagcttagtgccccttctgggttatagacgagcgtgtccgtatgctcgcttttataggtgggatcattgttgttgacgaccacctgggcggtatcgtctttttcggccatattaatgccgatcatcaccagaaccgccagtgatagcacaatgataacccaacgtctggctttactcatatcgattgccctttggcttcatccagtttgccctgcgccaggagtaataagtcgcaaacttcgcgcactgcgccacgaccgccagcaatgcgcgtcacgtaatcggcgcgcgggatcaacagtggatgcgcatcggccacggcgacgcttaaacccactttttccattaccggccagtcgatgagatcatcgccgacataagccacattttccggggcaatcgccagtttttccagcagatcgctaaaggcgatcagtttgtttgactgcccctgatacaagtgagtgatccccaatgtggcacaacgatcttctaccagtttagcctttcgcccggtaatgatagcgacttcaatatcagaggtgagcgcacaacgaatgccataaccgtcacgaacattgaacgctttcagctcttcgccattattgcccatataaatcaggccatctgacagtacgccatcgacatcgaggatcagcagacgaatgttctctgcttttgctataacgtcggcgctgacagggccgtaacaggtcgcaagcgacgcacctgctttgctcattgttgtttatccttgaatctttacactacgcctgcacgcagtaaatcatgcatatgtaacacaccgagtaaatggtcgccatcggcaaccatcacggaggtgatatggcgggactgcattaagttcagtgcctcaacggccagaatgccagggcgcacacgtattccccccggcgtcatcacatcggcaatacttaactgacgaacatccacgcccatatcgaagacacggcgtaaatcaccgtcggtaaagatgccttcaatcatcatattgtcatcgcaaatgacagtcataccaagatttttgcgggtaacttccagcaatgcgtcacgcagactggccgttttcttaacatgcgggatctcatcgcccgtatgcataatatcgtttacgcgcagcagaagtttacgacccagtgcgccgcctgggtgtgagagcgcaaaatcttcagcagtaaagccgcgtgcttttaacagcgcgacagcgagggcatcgcccataaccagcgtggcggtggtgctgctggtcggtgccagccctaacggacaggcttctttcgctactttaacacacagatgcacatctgcggcgcgcgccatgctgctctccgggcgaccggtgatgcagattaacggtacgtgaagacgcttaagcactggaattaaggccgtgatttcgctggattcacctgagttagagatagcaatcaccacatcctgtggggtgaccatgcctaaatcaccatgcgcggcttcaccaggatggacgaaaaatgaaggtgtaccggtgctggcaaacgttgcggccattttgcgcccgatgtgccccgatttccccatccccatgacgacaactttccctttacaccagaacatcttttcacaggcaagcgtgaaattctgattgatgtattgatcaagctccgccaggcattcacgttcaatcgccaggacttctttacctgcttgctgaaagtcaaaacccggttgtaactctacgtgcgacataatgcgtttccagttattcaacgagtattggcgataaccagtacaacatcgccagccatacgataaatccgccagttaataatacccctacaccacggcccggttgcggggagcgccgccagcacagcaacgcaaaaataatgctcaccagcaacatcacgctgtagtcacgactgtacgccaatggatcaatctctcctggcgttatcagcgcgggtaaacccaacacgatgacaatattaaaaatgtttgcgccaatgatatttccgacagcaatgtcgttttcacctttgcgaacccccgctattgcggttgccagttccggcaggctggttccgatagcaattgccgtcagacccatcgtcaactcgctgatggcaaagtaattcgccagcaccgtggcgttatcaaccaccatccgcgtggccactggcatgatgataagcgcaatgccgagccataaaaacgcgacgggcaatccgccgtcacgcggcagctctgcaagctgctctctggtcaggctgtcagtcccctgacgttcagcctgacgtgcaagtttaacaatgaacagcagccatagcacagccagaaagaggagaaagataccatcgcttcgactaagttgtccgtcatagagtacggaaccggccaccacgctgaccaacaacattaagggtaattcacggcgtagaacatcagaatggacggtaaaaggacgaaccagcgcagccagaccgaggatcagcaatatattgataatgtttgagccgagggctgtaccaacggctaaatcgcgttgttcgtgcagagacgcggcaagcgagacgatgatttctggtaacgatgtaccaatactgaccaccgtcatgccgatgatcagcggcgggatgccaaaggttcggcaaagaatagacgcggcaaaaaccaggcggtcggcactgtaaacgaccaaaagtaaaccaacaattaacagtgccgtagctaaaagcatctaacgtcctttcttcaggtatactcgccggtccgctgaagattttcagaaagccgtaacggattcttaattttgactttatgcggctaaaaagtaaaacaaatgccagctttcgctaaccacggcgggtaatattctgtaaatatgttgggttcaaggttaaattgagcgccatgcttagaaaatcaacgcaagacgaagggtgaattatggagcagtctgtggcgaatttagtcgatatgcgcgatgtcagttttacgcgtggcaatcgctgcatcttcgataatatttccctgaccgtgccgcgagggaagatcacggcgatcatggggccatcgggcatcggtaaaacgacgctactccgtctgattggcgggcaaatcgcaccagatcatggtgagatccttttcgatggtgagaatattccggcgatgtctcgttcgcgcctgtatacagtgcgcaaacggatgagcatgttatttcagtccggggcgttgttcactgatatgaacgtatttgacaacgtcgcctatccactgcgcgaacatacccaacttcccgcgccattgttgcatagtacggtgatgatgaagctggaggccgtggggctgcgtggagcggctaaactaatgccttctgaactttccggtgggatggcgcggcgtgcagcgctggcgcgtgcgattgcgctggagccggatctcatcatgtttgatgaaccttttgttgggcaagatcccatcaccatgggcgtactggtgaagctgatttctgagctgaacagcgcgctgggcgtgacttgtgtggtggtttctcacgatgtgccggaagtgttaagtattgcggatcacgcctggatcctggcggacaaaaaaattgtcgctcatggcagtgcccaggcgttgcaggcgaatcctgatccgcgcgtacgtcagtttctggacgggatagctgacgggcctgttccgttccgctatcctgccggcgattatcacgctgatcttttaccagggagttaagccactcatgctgttaaatgcgctggcgtcgctcggacataaagggattaaaaccctgagaacgttcgggcgggccgggttaatgttattcaatgcgctggtcggcaaaccggaatttcgcaaacatgcgccgctgctggtgcgccagctctataatgtcggcgtcctgtcgatgctgattattgtggtttctggcgtgttcatcggaatggtgttggggctgcaaggttatctggttctgaccacttatagtgcggaaaccagtctgggtatgctggtggcgttatcgctactgcgtgaactggggccggtggttgccgcgttgttgtttgccgggcgtgctggttcggcgctaaccgcagaaatcggcctgatgcgcgctacagagcaactctccagtatggagatgatggcggtggatccgctgcgtcgggttatttctccccgtttctgggctggggttatttcattaccactgttgacggttattttcgtcgccgtggggatctggggcggatctctggtcggcgtcagttggaaaggcattgatagcgggttcttctggtcggcaatgcaaaatgccgtcgactggcgtatggatctggtcaactgtctgattaagagcgtggtgttcgccatcacggtgacgtggatttcgttgtttaacggctacgacgccatcccgacgtctgccgggattagccgggcaaccactcgcaccgttgtccactcgtctctggctgttctggggctggattttgtgctgaccgcattgatgtttgggaattgagttcatgcaaacgaaaaaaaatgaaatttgggtgggtatctttttattagcagcactgctggcggcgctgtttgtttgcctgaaggcggcgaacgtgacgtccatacgtactgaaccgacctacacgctttatgcgacgttcgataacattggcggcctgaaagcgcgctctccggtcagtattggtggcgttgttgtgggtcgggtggcggatattacgctggacccgaaaacctatctgccgcgcgtaacgctggaaattgaacaacgttataaccacattccagataccagttcgctgagcattcgtacttccggcctgctgggggaacaatatctggcattaaacgtcggttttgaagacccggaactggggactgctatcctgaaggatggcgatacaattcaggacactaagtctgcgatggtgctggaagatctcattggtcagttcctttacggtagtaaaggcgatgacaataagaatagtggcgatgcgccagctgctgcgccaggtaataatgaaaccactgaacctgtgggtacaacgaaataatttcaggagaaccgacgcatgtttaaacgtttaatgatggtcgctttgctggtgattgcacctctgagtgcggcaaccgcggcagaccagaccaatccgtataagctgatggacgaggcggcgcagaaaacgttcgatcgcctgaagaatgagcaaccgcaaattcgggccaacccggattatctgcgtaccattgttgatcaggaactgctgccatacgtacaggtgaaatacgccggtgcgctggtgctgggccagtattacaagagtgcgacccctgctcaacgtgaagcctactttgccgctttccgtgagtacctgaagcaggcttacggtcaggcgctggcgatgtatcacggtcaaacctatcagattgcgccagaacagccgctgggcgataaaaccattgtgcctattcgcgttaccattattgatccgaatggccgcccgccggtgcgtctggacttccagtggcgtaaaaactcccagacgggcaactggcaggcttacgacatgattgctgaaggcgtcagtatgatcaccaccaaacaaaacgagtggggaacgctgctgcgtaccaaaggtatcgacggcctgactgcgcaactgaaatcgatttctcaacagaaaatcactctggaagagaaaaaataatgagcgagtcactgagctggatgcagacgggtgacacgctggcgttatccggagagctggatcaggacgttttgctaccgctttgggaaatgcgtgaggaagcggtgaaggggattacctgcatcgatcttagccgtgtgtcccgcgtggatacggggggactggcactgctgctccatcttatcgatctggcgaaaaagcagggcaacaatgtgacgcttcagggggtaaacgacaaagtgtataccctggcgaaattgtataatttgcctgctgatgttctgcctcgttaaattttttcaggccggatatggcgttaaccgcctgtccggcaaacctgcctgcaagtcgagccttgtctgatttatcagcgaggctttttgcttatttatgccagcgcaactttgctctaagatgtttcgctggtttattaactgatgattgaagatcccatggaaaataatgaaattcagagcgtgttgatgaacgctctctccctccaggaagtccacgtttccggcgatggcagccactttcaggttattgccgtgggtgagttgtttgacggcatgagtcgggttaaaaaacagcagacggtctatggcccgctgatggaatatattgcggataaccgcattcatgctgtgtcgatcaaagcgtatacccctgcggagtgggcgcgcgatcgcaaactgaacggcttttgagctatgggcgattcgccggtagcggatatgaattgttaactgagaacaaactaaatggataaatttcgtgttcaggggccaacgaagctccagggcgaagtcacaatttccggcgctaaaaatgctgctctgcctatcctttttgccgctctactggcggaagaaccggtagagatccagaacgtcccaaaactgaaagacgtcgatacatcaatgaagctgctaagccagctgggggcgaaagtagaacgtaatggttctgtgcatattgatgcccgcgacgttaatgtattctgcgcaccttacgatctggttaaaaccatgcgtgcttctatctgggcactggggccgctggtagcgcgctttggtcaggggcaagtttcactgcctggcggttgtacgatcggtgcgcgtccggttgatctacacatttctggcctcgaacaattaggcgcgaccatcaaactggaagaaggttacgttaaagcttccgtcgatggtcgtctgaaaggcgcacatatcgtgatggataaagtcagcgttggcgcaacggtgaccatcatgtgtgctgcaaccctggcggaaggtaccacgattattgaaaacgcagcgcgtgaaccggaaatcgtcgataccgcgaacttcctgattacgctgggtgcgaaaattagcggtcagggcaccgatcgtatcgtcatcgaaggtgtggaacgtttaggcggcggtgtctatcgcgtgctaccggatcgtatcgaaaccggtactttcctggtggcggcggcgatttctcgcggcaaaattatctgccgtaacgcgcagccagatactctcgacgccgtgctggcgaaactgcgtgacgctggagcggacatcgaagtcggcgaagactggattagcctggatatgcatggcaaacgtccgaaggctgttaacgtacgtaccgcgccgcatccggcattcccgaccgatatgcaggcccagttcacgctgttgaacctggtggcagaagggaccggattcatcaccgaaacggtctttgaaaaccgctttatgcatgtgccggagcttagccgtatgggcgcgcatgccgaaatcgaaagcaataccgttatttgtcacggtgttgaaaaactttctggcgcacaggttatggcaaccgatctgcgtgcatcagcaagcctggtgctggctggttgtattgcggaagggacgacggtggttgatcgtatttatcacatcgatcgtggctacgaacgcattgaagacaaactgcgcgctttaggtgcaaatattgagcgtgtgaaaggcgagtaatcgtctgagagctggcagccccgttcgcggggctaccgccagaccactcattttttcggtttagtgtagctacgcatcaactgcgttctgtcgataaactcatgggtctgcggatcatggtagcgtgatggccagataacccaggggtcagttcccagggctttcgcaataatcatctctcctttcggccatgggcgcgataatgcgtttgccagcgttgaggaactcaaaccatttctgcgagactccgccgccattgacgttcccttcttgcgcaaacccgcaatgatgtcagcgggatgccagtcaatgaaattactttccatctttcctcactccttaagttagtcgctttcattcagaacacttcttctgtcgagcatcactatactcctgatggccgattgctctaaaaagttcctgtaaggagtgtgaatattcagaatatataaagatgcacagcctgtttttcaggtgttatagagctgagtaagtgtttttatggaatttactggaaccaccccgcgcgctgcgcgggatgaggggaggggattaacgatcgcgttgaacagcgatgtgcgcgaggccgatgagtgcttctcgccaaggggtgtccgggagcacctgtaacgctgcgatggctttgtctgcttcttcctcggcacgctgacgcgtccattcaagagatccacaagcgttcattgcttccagaaccggttccagaagatggcgaccgttaccctgttcgatggcggtacggatcatctgtgcctgttctggtgtgccatgatgcatcgcatgcagcagcggcagcgtcggtttaccttcgttcagatcgtcgccgacatttttacctaactgttcgccatcggcattgtaatcgagtaaatcgtcgatcaactggaaagcagtgccgagatagcgcccataatcctgcaggcctttctcctcttccggcgtacagccagccagaatcccggaacactgcgcggcagcctcaaacagacgcgcggttttgctatagataacgcgcatgtagttttcttcagtgatgtccggatcgttaacgttcatcagttgcagaacttcaccttctgcgatgacgtttacggcttctgacatgacttccagcactttgagcgaaccgaggctggtcatcatctggaacgcgcgggtataaataaaatcgcctaccagcacgctggcggcattgccaaatgcagcgttggcggtagctttacccctgcgcatatctgattcatccacaacgtcgtcgtgcagcagagtcgccgtgtggataaactcgatcagggcagcaatggtgacatgcgcatttccctcatagccaacagctcgtgcagccagtacagcaatcatcggacgaatacgtttaccgccgccgctgacgatgtaatagcctaactgattgatcagctggacgtcggaattaagctgctcaaggattgccgcattaacacccgccatatcttgcgcggttaactcattgattttttctaaattcatcgcaaaagccgggcttttcgccccgattaccttactgtgaacaaaggcaacttagggtttatggttaggaatatagagtgattgtactgaaaaaatggcacagataaacgttaccgtacaagttgtgttttttttcttcgtgtattgactgtagcacttgtcaaaggcgtgcgttttgcgtaatattcgcgccctattgtgaatatttatagcgcactctgaatcattgaaaaggtgtgcgcggaagcggagttttatatgtacgcggttttccaaagtggtggtaaacaacaccgagtaagcgaaggtcagaccgttcgcctggaaaagctggacatcgcaactggcgaaactgttgagttcgctgaagtgctgatgatcgcaaacggtgaagaagtcaaaatcggcgttcctttcgttgatggcggcgtaatcaaagctgaagttgttgctcacggtcgtggcgagaaagttaaaatcgttaagtttcgtcgtcgtaaacactatcgtaagcagcagggccatcgtcagtggttcactgatgtgaaaattactggcatcagcgcctaagacctgaggagagatttcaaatggcacataaaaaggctggcggctccacacgtaacggtcgcgattcagaagctaaacgcctgggcgttaagcgtttcggtggcgaatccgttctggcgggtagcatcatcgttcgtcaacgtggtaccaaattccacgctggcgctaacgtaggttgcggtcgtgaccacactctgtttgctaaagcagacggtaaagtgaaattcgaagttaaaggcccgaaaaaccgtaaatttatcagcatcgaagctgaataagtttttcgcgtcccggtaacggatgaaagccccgcaacacgttgcggggctttttacattcgataaccggtaaaaatgcgcatggtgcgacgttaatccgcaaatgcgctttgcagggaatacggtatgaagcagcaggcaggcattggcattcttttggcgctcaccacagcaatttgctggggggcgttgccaatcgcaatgaagcaggtgctggaggtgatggaacctccgacaatcgtgttttaccgtttcttgatggcgagtattggccttggtgccattcttgcggtgaagaagaggttgccgccattacgcgtgtttcgtaagccacgctggttgattttgttggcagtggcgaccgccgggctgtttgggaacttcatcctgttcagctcatccttgcaatacctgagtccgaccgcttcgcaggtgattgggcaactctcgccagttggcatgatggttgccagcgtatttatcctgaaagagaaaatgcgcagcactcaggttgtaggggcattgatgctcctgagcggcctggtgatgttttttaacaccagtctggtcgagatatttacaaagctcaccgattacacctggggagttatctttggggtcggtgcggcgacggtttgggtgagttatggcgtggcgcaaaaggttttattgcgtcggctggcctcaccgcagatcctgtttttactgtacactttatgtacaattgcgctcttccctctggcaaagcctggagtgatagcgcagcttagccactggcagctcgcatgtttaattttttgcggactgaatacattggtaggatatggcgccctggcggaagcgatggctcgctggcaggcagcgcaggtgagcgcgatcatcacgcttaccccactgtttacgctgtttttttcagatcttttatcactggcctggcccgatttcttcgccagaccgatgttaaaccttttaggttatctcggtgcgtttgtcgtggttgcgggcgcgatgtattccgccattggtcatcgtatttggggcggattacgtaagcatacaacggtggtatcgcaaccccgcgcaggcgaatgatttacggagaataaaatgaagtttgttgatgaagcatcgattctggtcgttgcaggtgatggcggtaatggttgcgtgagcttccgccgcgaaaagtatattccgaaaggcggcccggatggcggcgacggcggtgatggtggtgacgtatggatggaagccgacgagaacctgaacacgcttatcgattatcgttttgaaaaatctttccgtgcagagcgcggtcagaatggcgcaagccgcgactgtaccggtaagcgcggtaaagacgtcacaattaaagtgccggtaggtacgcgtgtaatcgaccagggtactggtgaaaccatgggcgatatgaccaaacacggtcagcgtctgctggttgctaagggcggctggcacggtctgggcaatacccgtttcaaatcgtcagttaaccgtacaccacggcagaaaactaacggtacgccgggcgataagcgtgagctgctgctggagctgatgctgctggctgacgtcggtatgttggggatgccaaacgcgggtaaatcgacctttattcgtgcggtatcggcggctaaaccgaaagtggcggattatccgtttaccactctggtgccaagtctgggtgtggtacgaatggacaacgaaaagagcttcgttgttgccgatattccaggactgattgaaggcgctgcggaaggcgcaggtctgggtatccgcttcctgaagcacctggaacgttgccgcgtcctgttgcacctcatcgatatcgatccgattgacggcaccgatccggttgaaaacgcgcgtattattatcagcgagctggaaaaatacagccaggatctggcggcgaaaccgcgttggttagtgttcaataagatcgatctgctggataaggcagaagctgaagagaaagcgaaagcgattgctgaagcgctgggctgggaagataaatattatctgatctctgcggcgagtggactgggcgtgaaagatctctgctgggatgtgatgacctttatcattgaaaacccggtcgtgcaggctgaagaagcgaaacagccagagaaagtcgaattcatgtgggatgattatcatcgccagcagcttgaagagattgctgaagaggatgatgaggactgggatgatgactgggacgaagacgacgaagaaggcgttgagttcatttacaagcgttaatcagcaaaaccccggccatgtgccggggtttctttttgactaattgttctgataaatatctttatacaaacggctttcaaaacgcactaacggaatacggcgattacgctgatccgccggttctactgcatagccagaaagatattgtacaaacgccattcgttgcccgctcgctgtggtaatgaatcccgccaggttatataccccctgcaacgaaccggttttcgctgagacttttccatccacgcccgcctgatgcagacctgcacggtactgcaaagagccgtcatagcccgccagcggcagcatggagataaagttaagttcattgtcgtgttgggcaatgtattgcaacacctgcatcatggtggcgggggcaatcaggttatgccgcgaaagccctgaaccatcggcaataatggtgtttccaatatcgacaccggcttgctggcgcaggatctgacgcacggcgtccgacccggcccgccatgttccaggcacattgaagcgcacatggcctatcatgcggaaaaccgtatcggcgatcatgttgtccgactttttcagcataatcttaagcagatcgtgcaacggggccgactgtttactggcaactaccgttccaggttcgttaacctgagtctggcgcagcagtgttccgctccaggtgatacctgcctgttttaactcatctttcagaattgccccggcatagctggctccatcctgcacggcaaaagccaacgggagcggctcagaacgttgtggcaggcatcccgtcagcgtaaagcggttcaggtcgcctggtacgacatccagttcgcagtattgcgcttcggcagaacctcgggggagggtgcgtacctggctgaacatcgtaacggggtaataagatgccacgcgtataaaagccatatcaccaggttttggggcactgtagagcgagacggagaaacagttgcggtcaactatggcagcggcaggcggagcgctaaagcattgtgtcatgtcattccatggccagccgggggctttatcgtggctggcgaaaatggaggtatctatcaacacattgccatcgatttggttgacgccagattttttcaaagtcgcgaccatattgcgaatatcctgacgttttaacgtcggatcggcaccaaatcgcgccactaagtcacccttaagtacgccgttttccacattgcctttggtttcaagcgtcgtggtgaaacgaaaatcggggccgagttgaatcaacgccgccagcgcagtaatcactttctgcgtactggcgggcagcgccatctgctgactgtggtaatcaatagcgggggccgacgcgccgactttttgcaccatcagggcaaggttggcaccagcggggagttgagtaacgtactcatcaacattcgcggcctgaacactgaacgctatacagctggtcaatccgatgataaatctggaaaatcgcataatctcgcgctaacaacctggaatcgagccgtcatactacggcgcaacgccctataaagtaaacgatgacccttcgggaacttcagggtaaaatgactatcaaaatgtgaattgtagctgacctgggacttgtacccgggtcggtatttttttgcttctggtcccggtgaggagttatgccgggcaggccgaacagccggggtgggtgaagacttgccccatcaggaatattcaagaggtataacaaatgcaagctattccgatgaccttacgcggcgctgaaaaattacgcgaagagctggattttctgaaatctgtgcgccgtcctgaaatcattgctgctatcgcggaagcgcgtgagcatggcgacctgaaagaaaacgccgaataccacgcagctcgtgaacagcagggtttctgcgaaggccgtattaaagacatcgaagccaagctgtcgaacgcgcaggtgattgatgtcaccaaaatgcccaacaatgggcgcgttatttttggtgctaccgtaacggtgctgaatctggattctgacgaagaacagacttatcgcatcgttggcgatgacgaagctgactttaaacaaaacctgatttctgtaaactcgcctattgctcgtggcctgatcggcaaagaagaagatgatgttgtggtcatcaaaacgccgggcggcgaagtagaatttgaagtaattaaggtggaatacctgtaagaattacccaatactcaagatgttgatgtattgtaaagaaaggaaaaaggccgctatgcggccttttatcaacgaacagagcgtggcattttgctctcctgcctgcggaaaacccctcgttttacacagcaaatgtgtgtaactttaggataatcttagcgtggcagcgagattttacgttctttagttgggcgataaagcaccagcgttttaccgatgacctgtacattacaggcgccggtttcgcgcacgatagcttccacgatcaaggttttagtttcgcgatcttcggtggcgattttcaccttgatgagttcatggtgctctaacgcttgttcaatctcggccagcaccccttcggtcaaaccattactgccaagcagaacaactggcttgagcggatgtgccagacctttcaggtgctgtttttgtttagtactcagattcatcgtattttttgcttacgttgggattgaaaacgggtcattctaccgccatctcccatatatcaccaaataggcgcgtaaaaatttacgcaattggttacgatgagttatccccatgggaaagttaaatgacaggtaagaagcgttctgccagctccagccgctggcttcaggaacactttagcgataaatatgttcaacaggcacagaaaaaggggttacgttcccgtgcctggtttaaacttgatgaaatacagcaaagtgacaaactctttaaaccgggaatgacggttgtcgaccttggtgctgctccgggtggttggtcacaatatgtggtcacccaaattggcggcaaaggccgcatcatcgcttgcgatcttttacctatggatcctatcgttggtgtggactttcttcagggcgattttcgtgatgaactggtgatgaaagcactgctggagcgcgttggcgacagcaaagtccaggttgtcatgtccgatatggcaccaaacatgagcggaacaccggcggtggatatcccccgtgccatgtatctggtggaactggcgttagaaatgtgtcgtgatgtattagcgccaggtggcagttttgtagtgaaggtgttccagggcgaaggtttcgatgagtatctaagggaaattcgctccctgtttacgaaggtcaaagttcgtaagccggactcttctcgtgcacgttcgcgggaagtgtatattgtagcgaccgggcgtaaaccctaaccgggagatttcagacgaaagtttgaaagatgctggatatagagtatcctgacgctgtttttaacacagttgtaataagaggttaatcccttgagtgacatggcgaaaaacctaatactctggctggtcattgccgttgtgctgatgtcagtattccagagctttgggcccagcgagtctaatggccgtaaggtggattactctaccttcctacaagaggtcaataacgaccaggttcgtgaagcgcgtatcaacggacgtgaaatcaacgttaccaagaaagatagtaaccgttataccacttacattccggttcaggatccgaaattactggataacctgttgaccaagaacgtcaaggttgtcggtgaaccgcctgaagaaccaagcctgctggcttctatcttcatctcctggttcccgatgctgttgctgattggtgtctggatcttcttcatgcgtcaaatgcagggcggcggtggcaaaggtgccatgtcgtttggtaagagcaaagcgcgcatgctgacggaagatcagatcaaaacgacctttgctgacgttgcgggctgcgacgaagcaaaagaagaagttgctgaactggtagagtatctgcgcgagccgagccgcttccagaaactcggcggtaagatcccgaaaggcgtcctgatggtcggtcctccgggtaccggtaaaacgttgctggcgaaagcgattgcaggcgaagcgaaagttccgttctttactatctccggttctgacttcgtagaaatgttcgtcggtgtgggtgcatcccgtgttcgtgacatgttcgaacaggcgaagaaagcggcaccgtgcatcatctttatcgatgaaatcgacgccgtaggccgccagcgtggcgctggtctgggcggtggtcacgatgaacgtgaacagactctgaaccagatgctggttgagatggatggcttcgaaggtaacgaaggtatcatcgttatcgccgcgactaaccgtccggacgttctcgacccggccctgctgcgtcctggccgtttcgaccgtcaggttgtggtcggcttgccagatgttcgcggtcgtgagcagatcctgaaagttcacatgcgtcgcgtaccattggcccccgatatcgacgcggcaatcattgcccgtggtactcctggtttctccggtgctgacctggcgaacctggtgaacgaagcggcactgttcgctgctcgtggcaacaaacgcgttgtgtcgatggttgagttcgagaaagcgaaagacaaaatcatgatgggtgcggaacgtcgctccatggtgatgacggaagcgcagaaagaatcaacggcttaccacgaagcgggtcatgcgattatcggtcgcctggtgccggaacacgatccggtgcacaaagtgacgattatcccacgcggtcgtgcgctgggtgtgactttcttcttgcctgagggcgacgcaatcagcgccagccgtcagaaactggaaagccagatttctacgctgtacggtggtcgtctggcagaagagatcatctatgggccggaacatgtttctaccggtgcgtccaacgatattaaagttgcgaccaatctggcacgtaacatggtgacccagtggggcttctctgagaaattgggtccactgctgtacgcggaagaagaaggtgaagtattcctcggccgtagcgtagcgaaagcgaaacatatgtccgatgaaactgcacgtatcatcgaccaggaagtgaaagcactgattgagcgtaactataatcgtgcgcgtcagcttctgaccgacaatatggatattctgcatgcgatgaaagatgctctcatgaaatatgagactatcgacgcaccgcagattgatgacctgatggcacgtcgcgatgtacgtccgccagcgggctgggaagaaccaggcgcttctaacaattctggcgacaatggtagtccaaaggctcctcgtccggttgatgaaccgcgtacgccgaacccgggtaacaccatgtcagagcagttaggcgacaagtaagttcccgcatcagatgactgtatttgtaccgaaaaccccggggcgtgctccggggttttttcttatcaattcataccagggataacatcatgaaactctttgcccagggtacttcactggaccttagccatcctcacgtaatggggatcctcaacgtcacgcctgattccttttcggatggtggcacgcataactcgctgatagatgcggtgaaacatgcgaatctgatgatcaatgctggcgcgacgatcattgacgttggtggcgagtccacgcgcccaggggcggcggaagttagcgttgaagaagagttgcaacgtgttattcctgtggttgaggcaattgctcaacgcttcgaagtctggatctcggtcgatacatccaaaccagaagtcatccgtgagtcagcgaaagttggcgctcacattattaatgatatccgctccctttccgaacctggcgctctggaggcggctgcagaaaccggtttaccggtttgtctgatgcatatgcagggaaatccaaaaaccatgcaggaagctccgaagtatgacgatgtctttgcagaagtgaatcgctactttattgagcaaatagcacgttgcgagcaggcgggtatcgcaaaagagaaattgttgctcgaccccggattcggtttcggtaaaaatctctcccataactattcattactggcgcgcctggctgaatttcaccatttcaacctgccgctgttggtgggtatgtcacgaaaatcgatgattgggcagctgctgaacgtggggccgtccgagcgcctgagcggtagtctggcctgtgcggtcattgccgcaatgcaaggcgcgcacatcattcgtgttcatgacgtcaaagaaaccgtagaagcgatgcgggtggtggaagccactctgtctgcaaaggaaaacaaacgctatgagtaatcgtaaatatttcggtaccgatgggattcgtggtcgtgtaggggatgcgccgatcacacctgattttgtgcttaagctgggttgggccgcgggtaaagtgctggcgcgccacggctcccgtaagattattattggtaaagacacgcgtatttctggctatatgctggagtcagcactggaagcgggtctggcggcagcgggcctttccgcactcttcactggcccgatgccaacaccggccgtggcttatctgacgcgtaccttccgcgcagaggccggaattgtgatatctgcatcgcataacccgttctacgataatggcattaaattcttctctatcgacggcaccaaactgccggatgcggtagaagaggccatcgaagcggaaatggaaaaggagatcagctgcgttgattcggcagaactgggtaaagccagccgtatcgttgatgccgcgggtcgctatatcgagttttgcaaagccacattcccgaacgaacttagcctcagtgaactgaagattgtggtggattgtgcaaacggtgcgacttatcacatcgcgccgaacgtgctgcgcgaactgggggcgaacgttatcgctatcggttgtgagccaaacggtgtaaacatcaatgccgaagtgggggctaccgacgttcgcgcgctccaggctcgtgtgctggctgaaaaagcggatctcggtattgccttcgacggcgatggcgatcgcgtgattatggttgaccatgaaggcaataaagtcgatggcgatcagatcatgtatatcatcgcgcgtgaaggtcttcgtcagggccagctgcgtggtggcgctgtgggtacattgatgagcaacatggggcttgaactggcgctgaaacagttaggaattccatttgcgcgcgcgaaagtgggtgaccgctacgtactggaaaaaatgcaggagaaaggctggcgtatcggtgcagagaattccggtcatgtgatcctgctggataaaactactaccggtgacggcatcgttgctggcttgcaggtgctggcggcgatggcacgtaaccatatgagcctgcacgacctttgcagcggcatgaaaatgttcccgcagattctggttaacgtacgttacaccgcaggtagcggcgatccacttgagcatgagtcagttaaagccgtgaccgcagaggttgaagctgcgctgggcaaccgtggacgcgtgttgctgcgtaaatccggcaccgaaccgttaattcgcgtgatggtggaaggcgaagacgaagcgcaggtgactgaatttgcacaccgcatcgccgatgcagtaaaagccgtttaaagcgttagataactggctaaaaaggcggcgattgtcgccttttttctcagcgaacacatcggttttgctgtttttttccgcagttgatacaatgcgataaaattgcccttgcgaaggtcattcgctttggttagtattcacacccgcttcagtgggaaagattaaaaactcccgctttattggttgaagcattggtacgcggcaactccgcaaggaacaggttgattatgtacgaagctcttttagtagttttccttattgtggcaattggccttgttggtctgatcatgctgcagcaaggtaaaggcgctgatatgggagcctccttcggagcaggcgcttccgctacgctgtttggttcaagtggttctggtaacttcatgacccgcatgacggcgctgctggcaacgttattcttcatcatcagtctggtgctgggtaacatcaatagcaacaaaaccaataaaggtagcgaatgggaaaatctgagtgcaccggtgaaaaccgaacaaactcaaccagctgctccggctaagccgaccagcgatatcccgaactaaaaagtagtatccgtgccgaggtggtggaattggtagacacgctaccttgaggtggtagtgcccaatagggcttacgggttcaagtcccgtcctcggtaccaaattccagaaaagagacgctgaaaagcgtcttttttcgttttggtcctggtctgaggaatggttgtcaggtatctgtatctcgtccagttgctttactcgtagctggtaccttgaaacgatggtgccggtacgccttagttataaacttttcccttctgctgacataattggcactttattgtgtcaactccagttccggtacgaatacggatatgtttacttctcgataaaccatcctgctcctgtcagtataactactgatggctacgttctgcgtaatgtttagagacgcattgataatgttatttaattactgagaacgcaatggccgcatcatttaaaaagaaaaaactaacagtgtttcggtctgatatggatcagagttgaaaaacatgtctgatataaaattgaacattgttgataattgtttatattggttgtgaacttggatttctggatgacagtattcaacaaatttgctagaagttttaaatctcattggttgttgtatctttgtgttattgtttttggtattacgaacttagtcgcctcttccggcgcgcatatggttcagcgattgctgttcttcgtcctgaccatcctggttgtaaaacgtatatcatcccttccgcttcgcctgcttgttgccgcaccatttgtgttactgactgcggcagacatgagtattagcctctattcatggtgtacctttggtacaactttcaatgatggatttgcgattagtgtgctccagagtgatccggatgaagttgtcaaaatgctggggatgtatatcccttatctatgtgcctttgcttttttatcccttctttttttggcagtaataataaaatatgatgtttccttgccgacaaaaaaagtgacaggaatattattgctgattgtcatttcgggcagtttattttccgcttgtcaatttgcttataaagatgcaaaaaataaaaaagcgttcagtccatatatactagcgtcgcgatttgctacctatacgccgtttttcaatctcaactattttgctttagcagcgaaagagcatcaaagattactctcaattgcaaacacggtgccgtattttcaattatcagtcagggatacaggtattgatacctacgtgttgattgtgggggagtctgtacgtgtcgacaatatgtctttgtatggatatacacgctctacgacaccgcaagttgaagcacaaagaaaacagatcaaactgtttaatcaagcaataagcggcgcaccttacactgcgctgtcggttcccctttctttaactgctgattctgttttgagtcatgacattcataattaccccgacaacattattaatatggctaatcaagcaggatttcagactttctggctaagctcgcaatccgcttttcggcagaatggtacagcagttaccagtatcgccatgcgcgccatggaaacagtttatgtcagaggatttgatgaattgttgttgccgcatttatcgcaagcattacagcaaaatacgcagcaaaagaaactgattgttcttcatttaaatggaagccatgaaccggcttgtagcgcctatccgcaatccagcgccgtgtttcaaccgcaggacgatcaggatgcctgctatgacaactccattcattacacagatagtttgctaggtcaggtttttgaattattaaaagatcgccgcgcctcggtcatgtattttgccgaccacggcctggaacgtgaccctacgaagaagaacgtctattttcatggaggcagggaggctagccagcaggcatatcatgtcccgatgtttatctggtatagccccgttcttggggatggcgtggatcgcacaacggaaaacaacatcttttcgacagcttacaataattaccttattaatgcgtggatgggggtaacaaagccggaacagccgcaaacgcttgaggaagtgattgcacactataaaggagactcacgggttgtggatgcaaaccatgatgttttcgattatgtgatgctcagaaaggagtttacagaggataagcaaggtaaccccacccctgaagggcagggttgatgtcgaattactggcctttgttttccatattctccacctgcggcacgcctgaagtggcagaggaggagagcaggccagttttggcataaccaaaaagtttctctcgggtatcagtgatatccagattacgcatggtcaattgaccaatacgatcatctggcgagaacaccgagtcgcctttttccatcgtcagacgctctggcttgtaggtcaggttctctgagacggtattcaggattgaataatcgttcccacggcgcagctccagggtaacttcaccagtgatctggctggcaacccagcgttgcagagagtcacgcagcatcagcgcctgggagtcaaaccaacgcccctggtacagcagacggcccaactgacgaccatgtgcatgatactgctcaatggtgtcttcgttgtgaataccggtcaacagacgttcataagcgatatgtagcagtgccatccccggagcctcgtaaataccacggcttttcgcttcgatgatacggttttcaatctggtcgctcatgcccaggccgtgacgaccgccgatgcggttagcttccagcatcatttctacgtcgtcgctaaaggttttaccgttcagcgctaccggatgaccttgctcaaagcgtactgtgacttcttctgccgggatcttcacgctctcatcccagaatttcacgcccataattgggttgacgattttgacgctggagttgaggtattccagatccttcgcttcgtgcgttgcaccaagcatgttggagtctgtggagtaggctttttcgacagacattttgtagtcgaaaccgcaggcaatcataaattcagacatctcatgacggccgcccagttcatcaataaagtcagtatcaagccacggtttgtaaatctgcagttcagcattggtcagcagaccataacgatagaaacgttcgatatcgtttcctttataggtgctaccgtcaccccagatattcacgccatcttctttcatcgcagcaaccagcatggtaccagtcacggcgcggcccagcggcgtcgtgttgaaataggtcaggccgccggtggtgttatgaaatgcgccacactgaatagcggcaataccttcggccaccagttgtttgcggcagtcgatcagacgtgcgttctccgcgccgtattccatggcacgacgagggatcgcatcataatcctcttcgtctggctggcccaggtttgcagtatatgcataaggaaccgctcccttttgtcgcatccacagcagtgcggcactggtgtccagaccgccggaaaaagcgataccaatacgttgacctaccgggagatgcttgagaatcgtcgtcataaaataacaccctgcttaattaactgatgatgagcctggatttccgctctcactgaatttttatgcaaaataaatgagttttcatttaatcatcttttatcggagacaggaagagtttagtgtgttttttgtaaaataatgcgcttaagggggagcaggagaaggcaaaagtattcaacaaatgaaagtgaactggatattcattcacatgattagcaataaacgttgacaaaatgtggcgtggatcactataatgcctgcagattttacgtcccgtctcggtacaccaaatcccagcagtatttgcattttttacccaaaacgagtagaatttgccacgtttcaggcgcggggtggagcagcctggtagctcgtcgggctcataacccgaaggtcgtcggttcaaatccggcccccgcaaccactttcccttagagtcctttttcaaatatactgtgaagacttcggccttcgtagtgggatttgaaaaaatccttctggaaagtgctccagaccgcagttgcggttatagggttcagttatataaagccccgatttatcggggttttttgttatctgactacagaataactgggctttaggccctttttttatgtcttgggggtgggcttgtccacattagagcaaaaattaacagagatgattactgcgccagttgaggccctgggttttgaactggttggcatcgaatttattcgcggtcgcacatccacactgcgcatctatattgatagtgaagatggcatcaatgttgatgattgtgctgatgtgagccaccaggtaagtgctgtgctggatgttgaagatcccatcaccgttgcttataacctggaagtctcctcaccgggtctcgatcgcccactgttcacggctgaacactacgcccgttttgtcggagaagaggtgactctggttctccgtatggcggtacaaaaccgtcgtaaatggcagggcgttatcaaagcggtagacggtgaaatgatcacagttaccgtcgaaggtaaagatgaagtgttcgcgctgagtaatatccagaaggcgaacctggttccccacttttaatagtctggatgaggtgaaaagcccgcgatgaacaaagaaattttggctgtagttgaagccgtatccaatgaaaaggcgctacctcgcgagaagattttcgaagcattggaaagcgcgctggcgacagcaacaaagaaaaaatatgaacaagagatcgacgtccgcgtacagatcgatcgcaaaagcggtgattttgacaccttccgtcgctggttagttgttgatgaagtcacccagccgaccaaggaaatcacccttgaagccgcacgttatgaagatgaaagcctgaacctgggcgattacgttgaagatcagattgagtctgttacctttgaccgtatcactacccagacggcaaaacaggttatcgtgcagaaagtgcgtgaagccgaacgtgcgatggtggttgatcagttccgtgaacacgaaggtgaaatcatcaccggcgtggtgaaaaaagtaaaccgcgacaacatctctctggatctgggcaacaatgctgaagccgtgatcctgcgcgaagatatgctgccgcgtgaaaacttccgccctggcgaccgcgttcgtggcgtgctctattccgttcgcccggaagcgcgtggcgcgcaactgttcgtcactcgttccaagccggaaatgctgatcgaactgttccgtattgaagtgccagaaatcggcgaagaagtgattgaaattaaagcagcggctcgcgatccgggttctcgtgcgaaaatcgcggtgaaaaccaacgataaacgtatcgatccggtaggtgcctgtgtaggtatgcgtggcgcgcgtgttcaggcggtttctactgaactgggcggcgagcgtatcgatatcgtcctgtgggatgataacccggcgcagtttgtgattaacgcaatggcaccggcagacgttgcttctatcgtggtggatgaagataaacacaccatggatatcgccgttgaagccggtaacctggcgcaggcgattggccgtaacggtcagaacgtgcgtctggcttcgcagctgagcggttgggaactcaacgtgatgaccgttgacgacctgcaggctaagcatcaggcggaagcgcacgcagcgatcgacaccttcaccaaatatctcgacatcgacgaagacttcgcgactgttctggtagaagaaggcttctcgacgctggaagaactggcctatgtgccgatgaaagagctgttggaaatcgaaggccttgatgagccgaccgttgaagcactgcgcgagcgtgctaaaaatgcactggccaccattgcacaggcccaggaagaaagcctcggtgataacaaaccggctgacgatctgctgaaccttgaaggggtagatcgtgatttggcattcaaactggccgcccgtggcgtttgtacgctggaagatctcgccgaacagggcattgatgatctggctgatatcgaagggttgaccgacgaaaaagccggagcactgattatggctgcccgtaatatttgctggttcggtgacgaagcgtaataaactgtagcaggaaggaacagcatgacagatgtaacgattaaaacgctggccgcagagcgacagacctccgtggaacgcctggtacagcaatttgctgatgcaggtatccggaagtctgctgacgactctgtgtctgcacaagagaaacagactttgattgaccacctgaatcagaaaaattcaggcccggacaaattgacgctgcagcgtaaaacacgcagcacccttaacattcctggtaccggtggaaaaagcaaatcggtacaaatcgaagtccgcaagaaacgcacctttgtgaaacgcgatccgcaagaggctgaacgccttgcagcggaagagcaagcgcagcgtgaagcggaagagcaagcccgtcgtgaggcagaagaatcggctaaacgcgaggcgcaacaaaaagctgaacgtgaggccgcagaacaagctaagcgtgaagctgctgaacaagcgaaacgtgaagctgcggaaaaagacaaagtgagcaatcaacaagacgatatgactaaaaacgcccaggctgaaaaagcccgccgtgagcaggaagctgcagagctcaagcgtaaagctgaagaagaagcgcgtcgtaaactcgaagaagaagcacgtcgcgttgctgaagaagcacgtcgtatggcggaagaaaacaaatggactgataacgcggaaccgactgaagattccagcgattatcacgtcactacttctcaacatgctcgccaggccgaagacgaaagcgatcgtgaagtcgaaggcggccgtggccgtggtcgtaacgcgaaagcagcgcgtccgaagaaaggtaacaaacacgctgaatcaaaagctgatcgtgaagaagcacgcgcagcagtacgtggcggtaaaggcggaaaacgtaaaggttcttccctgcagcaaggcttccagaagcctgctcaggccgttaaccgtgacgttgtgatcggcgaaactatcaccgttggcgaactggcgaacaagatggcggttaaaggctctcaggtcatcaaagcgatgatgaaactgggcgcaatggcaaccatcaaccaggttatcgatcaggaaaccgcacagctggttgctgaagagatgggccacaaagttatcctgcgtcgtgaaaacgagctggaagaggcggtaatgagcgaccgtgacacgggtgctgcggctgaaccgcgcgcgccggttgtgaccatcatgggtcacgttgaccacggtaaaacctctctgctggactacattcgttcaacgaaagttgcctctggcgaagcgggcggcattacccagcacattggtgcataccacgttgaaactgaaaacggcatgatcaccttcctggacaccccggggcacgccgcgtttacttcaatgcgtgcacgtggtgcgcaggcaacggacatcgtagtcctggttgttgctgccgacgacggcgtgatgccgcagaccatcgaagcaatccagcacgcgaaagcggcgcaggtaccggtggtggttgcagtgaacaagattgataaaccagaagccgatccggatcgtgttaagaacgaactctcccagtatggcatcctgccggaagagtggggcggtgaaagccagttcgtacacgtatctgcgaaagcgggtaccggcatcgatgaactgctggacgctatcctgctgcaggcggaagttctggagctgaaagcggtacgtaaaggtatggcgagcggtgcggttatcgaatccttcctcgataaaggtcgtggtccggttgctaccgttctggtacgtgaaggtactctgcacaagggcgatatcgttctgtgtggcttcgaatacggtcgtgttcgtgcgatgcgtaacgaactgggtcaggaagtgctggaagcgggtccgtccattccggtggaaatcctcggcctgtccggcgtaccggctgcgggtgatgaagttaccgttgtacgtgacgagaagaaagcgcgtgaagttgcactgtatcgtcagggtaaattccgcgaagttaaactggcgcgtcagcagaaatctaaactcgagaacatgttcgccaacatgaccgaaggcgaagttcacgaagtgaacatcgtcctgaaggcagacgtacagggttctgtggaagcgatctccgactccttgctgaaactgtctactgacgaagttaaagtgaagatcatcggttctggcgtaggtggtatcaccgaaaccgacgccaccctggctgcggcgtccaacgccatcctggttggcttcaacgtacgtgctgatgcctctgcacgtaaagtgattgaagcggaaagcctggatctgcgttactactccgtcatctataacctgattgacgaagtgaaagcggcgatgagcggtatgctgtctccggaactgaaacagcagattatcggtctggcggaagttcgtgacgtgttcaaatcgccgaaatttggtgccatcgcaggctgtatggttaccgaaggtgtggttaaacgtcacaacccgatccgcgttctgcgtgacaacgtggttatctacgaaggcgagctggagtccctgcgccgcttcaaagatgacgttaacgaagtccgtaacggtatggaatgtggtatcggcgttaagaactacaacgacgtccgcactggcgatgtgatcgaagtattcgaaatcatcgagatccaacgtaccatcgcttaaggtttttagggttccatgcgggataaggcgtttatgccgcatccggcatggattgcctgatgtgacgctggcgcgtcttatcaggccaacgtgaacagcccttccacctgaaattaattttaaaaaggggctaacagccccttttttgtcaggagaatttattatggcgaaagaatttggtcgcccgcagcgcgtagcgcaggaaatgcaaaaagagatcgctctcatcctgcagcgtgaaattaaagatcctcgcctgggcatgatgaccaccgtttccggtgtcgaaatgtctcgcgacctggcgtatgccaaagtatatgtgacgttcctcaacgacaaagatgaagacgcggttaaagcgggcatcaaagcgttgcaagaagcttctggtttcatccgcagcctgctggggaaagcgatgcgcctgcgtatcgtgccggaactgaccttcttctacgacaactctctggttgaagggatgcgcatgtcaaacctggtgaccagcgtggtcaaacatgacgaagaacgtcgtgttaacccggacgacagcaaggaggactaatgagtcgtcctcgtcgtcgcggtcgcgacattaacggcgttttgttgctggataaatcgcagggtatgtccagcaatgatgcgctgcaaaaagtgaaacggatttataacgccaaccgtgccgggcataccggtgcgctggacccgctggcaactggcatgttgccaatttgcctcggggaagcgacgaagttttcccagtatctgctggactccgacaaacgctatcgggtcattgcgcgtcttggacagcgtaccgatacttctgatgccgacggacaaatcgttgaagaacgtccggtaacctttagcgcagagcaactggcggcggcgctggatactttccgtggcgatatcgaacagatcccttcgatgtattcagcactgaaatatcagggtaaaaaactgtacgaatatgcgcgtcagggcattgaagtaccgcgtgaagcgcgcccgattaccgtttatgaattgctgtttattcgccacgaaggcaatgagctggagctggaaattcactgctcaaaaggcacttatatccgcaccatcattgatgacctgggtgaaaaactcggttgtggcgcgcatgttatttacctgcgtcgtctggcggtaagtaaatatccggttgaacggatggtgaccctggaacatctgcgtgaactggtcgaacaagccgaacagcaggatattccggctgcggagttacttgatccattactgatgccaatggacagtccagcttcggactacccggtggtgaatcttccgttaacgtcttctgtttacttcaaaaatggtaacccagttcgtacatccggtgcgccgctggaaggactggttcgcgttacagaaggtgagaacggcaaatttatcggtatgggcgaaattgacgatgaaggccgcgttgcgcctcgtcgcctggtggttgaatacccggcgtaatgttaaccgtcttgcgataacaggtcgctacgagtagaatactgccgcttaacgtcgcgtaaattgtttaacactttgcgtaacgtacactgggatcgctgaattagagatcggcgtcctttcattctatatactttggagttttaaaatgtctctaagtactgaagcaacagctaaaatcgtttctgagtttggtcgtgacgcaaacgacaccggttctaccgaagttcaggtagcactgctgactgcacagatcaaccacctgcagggccactttgcagagcacaaaaaagatcaccacagccgtcgtggtctgctgcgcatggtttctcagcgtcgtaaactgctcgactacctgaaacgtaaagacgtagcacgttacacccagctcatcgagcgcctgggtctgcgtcgctaattcttgcgagtttcagaaaagggggcctgagtggccccttttttcaagctgacggcagcaattcactggaaactaatgtattgttgctatgaatgatcttccgttgcagaggttcgcgcggctaatgagaggctttacccacatagagctgggttagggttgtcattagtcgcgaggatgcgcagaagatcgggtattaacaccagtgccgtaaggtactgtctaagaaagagaaaggatattacattgcttaatccgatcgttcgtaaattccagtacggccaacacaccgtgactctggaaaccggcatgatggctcgtcaggctactgccgctgttatggttagcatggatgacaccgcggtatttgttaccgttgttggccagaaaaaagccaaaccaggtcaggacttcttcccactgaccgttaactatcaggagcgtacctacgctgctggtcgtatcccgggtagcttcttccgtcgtgaaggtcgtccaagcgaaggcgaaaccctgatcgcgcgtctgattgaccgcccgattcgcccgctgttcccggaaggcttcgtcaacgaagttcaggttatcgccaccgtggtttctgttaacccgcaggttaacccggatatcgtcgcgatgattggtgcttccgcagcactgtctctgtctggtattccgttcaatggcccgattggtgctgcccgcgtaggttacatcaatgaccagtacgtactgaacccgactcaggacgagctgaaagagagcaaactggatctggttgttgccggtactgaagccgctgttctgatggttgaatctgaagctgaactgctgagcgaagaccagatgctgggcgcagtagtgttcggtcatgaacaacagcaggttgttattcagaacatcaatgaactggtgaaagaagccggtaaaccacgttgggactggcagccggagccggtaaacgaagcgctgaacgcgcgcgttgctgcactggctgaagctcgcctgagcgatgcttaccgcatcaccgacaaacaagagcgttatgcgcaggttgatgtcatcaaatctgaaaccatcgcgacgctgcttgctgaagacgaaaccctggacgaaaacgaactgggtgaaattctgcacgctatcgagaaaaacgttgttcgtagccgcgtactggcaggcgaaccgcgtatcgacggtcgtgaaaaagatatgatccgtggtctggatgtgcgtactggcgtgctgccgcgtactcacggttctgcgctgttcacccgcggtgaaacgcaggcactggttactgcaacgctgggtaccgctcgtgacgcgcaggttcttgatgaactgatgggcgaacgtaccgataccttcctgttccactacaacttccctccgtactccgtaggcgaaaccggcatggtcggttctccgaagcgtcgtgaaattggtcacggtcgtctggcgaagcgcggcgtgctggcagtcatgccggatatggacaaattcccgtacaccgtacgtgtagtgtctgaaatcaccgaatccaacggttcttcttctatggcttccgtgtgcggcgcgtctctggcgctgatggacgcaggtgtgccaatcaaagctgccgttgcgggtatcgcaatgggtctggtgaaagaaggcgacaactacgttgtactgtctgacattttgggcgacgaagatcacctgggcgatatggacttcaaagttgcaggttcccgcgacggtatctctgcactgcagatggatatcaaaattgaaggtatcaccaaagagatcatgcaggttgcgctgaaccaggctaaaggtgcgcgtctgcatatcctgggcgtaatggaacaggcgatcaacgcgccgcgtggcgatatctctgagttcgcaccgcgtatccataccatcaagatcaacccggataagatcaaagacgttatcggtaaaggcggctctgttatccgtgccctgaccgaagaaactggcactaccatcgaaatcgaagatgacggtactgtgaagatcgcagcgaccgacggcgagaaagcgaaacatgctattcgtcgtatcgaagagatcactgcagaaatcgaagtgggccgcgtctacactggtaaagtgacccgtatcgttgactttggcgcatttgttgccatcggcggcggtaaagaaggtctggtccacatctctcaaatcgctgacaaacgcgttgagaaagtgaccgattacctgcagatgggtcaggaagtaccggtgaaagttctggaagttgatcgccagggccgtatccgtctgagcattaaagaagcgactgagcagtctcaacctgctgcagcaccggaagctccggctgctgaacagggcgagtaaggttgccatttgccctccgctgcggcggggggcttttaaccgggcaggacgccttgttagcaaccgggaacaggacgttcattcaaccgtggtcttcgggagtgggaaatgaagccttttttgcgctggtgtttcgttgcgacagcacttacgcttgcaggatgcagtaatacttcctggcgtaaaagtgaagtcctcgcggtaccattgcaaccgactttacagcaggaagtgattctggcacgtatggaacaaatccttgccagtcgggctttaaccgatgacgaacgcgcacagcttttatatgagcgcggagtgttgtatgatagtctcggtctgagggcattagcgcgtaacgatttttcgcaagcgctggcaatccgaccggatatgcctgaagtattcaattacttaggcatatatttaacgcaggcaggcaattttgatgctgcctatgaagcgtttgattctgtacttgagcttgatccaacttacaactacgcgcacttgaatcgcgggatcgcattatattacggcggtcgtgacaagttagcgcaagatgatctgctggcgttttatcaagacgatcccaatgatcctttccgtagtctgtggctttatctcgccgagcagaagctcgatgagaagcaggctaaagaagtgttgaaacagcacttcgaaaaatcggataaggaacagtggggatggaacattgtcgagttctacctgggcaacattagcgaacaaacgttaatggaaaggctcaaggcggacgcaacggataacacctcgctcgctgagcatctcagtgaaaccaacttctatttaggtaagtactacctaagtctgggggatttggacagcgccacggcactgttcaaactggcggttgccaacaacgttcataactttgttgagcaccgatacgcattgttggaattatcgctcctgggccaggaccaagatgacctggcagaatcggaccagcaatagctgacgtacacatcagcccgtaatcttttttgattgccatcaccttaacgggtgagggcgttgttgttcgttaatacacctactttgagccggttcacacttttcaatgaaaattgctgatcaatttcatgatgagttatgtagactggccgccattaattttgaggcacacgtactacatggctgaattcgaaaccacttttgcagatctgggcctgaaggctcctatccttgaagcccttaacgatctgggttacgaaaaaccatctccaattcaggcagagtgtattccacatctgctgaatggccgcgacgttctgggtatggcccagacggggagcggaaaaactgcagcattctctttacctctgttgcagaatcttgatcctgagctgaaagcaccacagattctggtgctggcaccgacccgcgaactggcggtacaggttgctgaagcaatgacggatttctctaaacacatgcgcggcgtaaatgtggttgctctatacggcggccagcgttatgacgtgcaattacgcgccctgcgtcaggggccgcagatcgttgtcggtactccgggccgtctgctggaccacctgaaacgtggcactctggacctctctaaactgagcggtctggttctggatgaagctgacgaaatgctgcgcatgggcttcatcgaagacgttgaaaccattatggcgcagatcccggaaggtcatcagaccgctctgttctctgcaaccatgccggaagcgattcgtcgcattacccgccgctttatgaaagagccgcaggaagtgcgcattcagtccagcgtgactacccgtcctgacatcagccagagctactggactgtctggggtatgcgcaaaaacgaagcactggtacgtttcctggaagcggaagattttgatgcggcgattatcttcgttcgtaccaaaaacgcgactctggaagtggctgaagctcttgagcgtaacggctacaacagcgccgcgctgaacggtgacatgaaccaggcgctgcgtgaacagacactggaacgcctgaaagatggtcgtctggacatcctgattgcgaccgacgttgcagcccgtggcctggacgttgagcgtatcagcctggtagttaactacgatatcccgatggattctgagtcttacgttcaccgtatcggtcgtaccggtcgtgcgggtcgtgctggccgcgcgctgctgttcgttgagaaccgcgagcgtcgtctgctgcgcaacattgaacgtactatgaagctgactattccggaagtagaactgccgaacgcagaactgctgggcaaacgccgtctggaaaaattcgccgctaaagtacagcagcagctggaaagcagcgatctggatcaataccgcgcactgctgagcaaaattcagccgactgcagaaggtgaagagctggatctcgaaactctggctgcggcactgctgaaaatggcacagggtgaacgtactctgatcgtaccgccagatgcgccgatgcgtccgaaacgtgaattccgtgaccgtgatgaccgtggtccgcgcgatcgtaacgaccgtggcccgcgtggtgaccgtgaagatcgtccgcgtcgtgaacgtcgtgatgttggcgatatgcagctgtaccgcattgaagtgggccgcgatgatggtgttgaagttcgtcatatcgttggtgcgattgctaacgaaggcgacatcagcagccgttacattggtaacatcaagctgtttgcttctcactccaccatcgaactgccgaaaggtatgccgggtgaagtgctgcaacactttacgcgtactcgcattctcaacaagccgatgaacatgcagttactgggcgatgcacagccgcatactggcggtgagcgtcgtggcggtggtcgtggtttcggtggcgaacgtcgtgaaggcggtcgtaacttcagtggtgaacgccgtgaaggtggccgtggtgatggtcgtcgttttagcggcgaacgtcgtgaaggccgcgctccgcgtcgtgatgactctaccggtcgtcgtcgtttcggtggtgatgcgtaatcatcgctgaacagcgaacacaatctgtaaaataatatatacagccccgatttttaccatcggggctttttttctgtcttttgtactcgtgtactggtacagtgcaatgcataacaacgcagtcgcactatttttcactggagagaagccctcatggcaacactaaccaccacccaaacgtcaccgtcgctgcttggcggcgtggtgattatcggcggcaccattattggcgcagggatgttttctctgccagtggtcatgtccggggcgtggtttttctggtcaatggcggcgctgatctttacctggttctgtatgctgcattccggcttgatgattctggaagctaacctgaattaccgaatcggttcgagttttgacaccatcaccaaagatttgctgggcaaaggctggaacgtggtcaacggtatttccattgcctttgtgctctatatcctgacctatgcctatatttctgccagtggttcaattctgcatcacaccttcgcagagatgtcgctaaacgtcccggcacgggcggcgggttttggttttgcactgctggtagcgtttgtggtgtggttgagtactaaggccgtcagccgcatgacggcgattgtgctgggggcgaaagtcattaccttcttcctcacctttggcagcctgttggggcatgtgcagcctgcgacattgttcaacgttgcagaaagcaatgcatcttatgcgccgtatctgctgatgacattgccgttctgcctggcgtcgtttggttatcacggtaacgtgccaagcctgatgaagtattacggcaaagatccgaaaaccatcgtgaaatgcctggtgtacggtacgctgatggcactggcgctgtataccatctggttgctggcgacgatgggtaacatcccgcgtccggagtttatcggtattgcagagaagggcggtaatattgatgtgctggtacaggcattaagcggcgtgctgaacagccgtagcctggaccttctgctggtcgtgttctcaaactttgcggtagcgagttcgttccttggcgtaacgctgggtttgtttgactatctggcagatctgtttggtttcgatgactcagccctggggcgcttgaaaacggcattgctgacctttgccccgcctgttgtgggtggtctactgttcccgaacggattcctgtacgccattggttatgctggtttagcagctaccatctgggcggcaattgttccggcgctgttagcccgcgcatcgcgtaaacgctttggcagcccgaaattccgcgtctggggcggcaagccgatgattacgctgattctggtgtttggcgttggcaacgcactggtccatattttatcgagctttaatttactgccggtgtatcagtaatcagcggtgccttatccgacatttctgctgcctacacaatgcctgatgcgcttcgcttatcaggtctacgtaggacagcgttgccagctcggataaggcttcccgcgttaagacacactatcccaacaactcttccttaacatccatcgccagctcaaacgaatgcagccgcgcctggtggtcgaaaatctgcccgttgaccataatctcatcggcgtcggtttcgcgcaggatcgactgcaagccatgacgcactttcgctttatcacctaccaacgacatactcagcgcctgctgcacaccatactgttcggacggcgaccagaactgatccatattttgaatcggtggcggcagttgcccggtttcgccacggcgcaacttcacaaaggcttgctgcattgaggtaaacagaaactcagcgtcgcggttgctatcggcggcgataatattgatgcacaccatcgcgtatggtttttccagtcgtgccgacggtttgaagttgctgcgataaagatgcagcgcctggaacaacatatccggcgcgaagtgtgaggcaaacgcgaacggcagaccaagctgcgccgccagttgcgcgctgtaaaggctggagcctaacaaccacacggggattttctcgccatagcctggtaccgggcgcacatgcggattgggatcgcgggcgtcaaaccagtccaccagctccgcgacatcgcgggggaaattatcaatatcgccgctcatatggcgacgcagcgccatcattgtccgttggtcactacctggcgcacgacccagccccaaatcgattcgccccggatagagtgtattgagcgtgccgaactgttcggcaatgaccaacggtgagtggttaggcaacatcacgccgccagaccccagatgcagcgtggtggtattcgccgccagatagccaatcaataccgacgtggcagcactggcaatgccagtcatattgtggtgttctgccagccagtagcgatgatagccgcgcttttcagccagacgggcgagatcgagagagtgggagaatgcttctcgcgctgaagaaccttcgggaatgggggccagatcgagtagcgaaaacgcaatggttttatcagtcataacagctcactttgttaccgattaatctttaatactgcattaaagagtagttaaagttgttaacaaagtgagctgtgctctaaataattcgagttgcaggaaggcgacaagagagtgaatccccaggagcttacataagtaagtgactggggtgaacgaatgcagatgcagcacatgcaacttgaagtatgacgagcatatttacttaggcttgcagctccagcccggccagccgccgccagtagccgttacagtcgctgtttgccgtcaacggtagtggcgcagcgccattttcattagcgcggaaggcgtcgagcatcgcgaaagtgtcagtaccctgcggtgacaggcggaccacatcaaccagcccctgcatggatgccagctcgttaccgaggttgtaaacgtagccgctcatggtctgaatgccattgagtacaaacacttgttggttttcctgcgacagcacgttgcgcccgttcggatacttaatgcagcaggtttcacactcatctttcgggcggtcttccgaacgcgcggtaaagcagcgggcggagtaggccagcggtagatgaccgtagctcaggacttccacttcaaactggttgcgaatgcccagctcatcgcactgattaagcagattcaccagccagtcgcgggaaagctccaccggcatacaccagcgcatcatgccctgtttgagcaatattttcagcgtcaccgcgttgtagcagttcagcgcgtgcccggcgacgaacggcagtttgcgttcagcgcacatattcaccacgccgagatcgctggcttcaatcagaaactcaccgttctcaacatagcgtttcagttcgcccagttcagaggatgcctgcaccagcgccagcgtggagagcacaatctgcttgccacttccggcgagcgattttgccatctccagccagtcgccaactttggttgcccggcgcttgctgcatatcgcttcaccaagataaatcacgtcggcgctgctggtggcggcctgctgataaaaatcttccagcgtctcttttggccagtaccacagcactggccctaaggaatatttcattgctcttctcactgccatttacggtgatacgcgccaagggtggtctgcgtgccttcggacatcgacccgagcgtctccatccacgcgctttgcggtatgaagttttgcggatcggccttacaacggtcgatagcctgacgccagactttcgccacctggctgacatacgccgggctacgctggcggccttcaattttcaccgaagcaatattcgccgccattaactccggcagcagttccagggtattgagactggttggttcttccagcgcgtgatagcgctcgccgtccaccagataacgccctttacatagcgtcggataacctgcgttttcgccgtcctgataacggtcgatcagcacttcgttcaggcgggattccagcccctgcggcgtttgttgccagcgcacgaaacgggccggagaacacgcgcctacggtgttgggcgactcacccgtcagatacgacgacagatagcaacgaccttccgacataatgcacaggctgccgaaagcaaagacttccagtggtacaggtgtgacccgtgccagttgtttcacctgatgaatcgacaacacgcgcggcagcaccacgcgagcaacgtcaaaatggcgatgataaaagttaatcgcctcttcattggtcgccgaagcctgcactgacacatgacgctcaatatgcgggtaacgctcggcggcgtactctagcatggcgaggtcggcgaggatcagcgcgtcggcacccagctgcgccgccatatccacggcacgctgccaacgggcgtaaccgtccggatgcgcaaaagtgttaatcgcgatgtgaagtttgcggcgatgttgatggacaaaactcaccgcttcctgcaattttttctcggtaaagttaaggccggcgaagtgacgggcattggtatcatcttttagcccgatataaacagcatctgcgccgttttcgatggccgccttaagcgccgggagatttccggcagggcagagcagctccataatttttcctgaaggttgcgctatcaaaacgcaaaaatgttaacgaactgggattttagttaaccttgctgcgacaatttttgatttaaggcagttaaagttgtattggtggtagcagcaatttcatatggaattgttgatttataccgctatgttatttttctgatatggcaaaataggatgattgttgaaacagggagtaaaactcgtgttggataaactgcgttcccgtattgtgcatttggggccatctctgttgagtgtaccggtaaaactgacgccatttgcgctaaaacgccaggttcttgagcaggtcttaagctggcaattccgtcaggcgctggatgatggcgagctggagtttcttgaaggccgctggttaagtattcatgtgcgtgatattgacctgcaatggtttacctcggtggtgaatggcaaactggtggtcagccagaacgcgcaagctgatgtgagttttagtgccgacgccagcgatctgctgatgattgcggcgcgtaaacaagatccggatacgctcttcttccagcgtcggctggtgattgaaggcgatacggagctggggctgtatgtgaaaaacctgatggacgccattgaactggagcaaatgccgaaagccttacgcatgatgctgctgcaactggcggattttgttgaggcgggaatgaaaaccgcgcctgaaaccaaacagacatcggtaggtgaaccatgctaattcgagtagaaattcccattgatgcgccgggtattgatgccctgctacgtcgctcattcgaaagtgatgcggaagcgaagctggttcacgatctgcgtgaagatggctttctgacgctggggctggtggcgacagatgacgaaggtcaggtcattggctatgtggcatttagtccggttgatgtgcagggcgaagacctgcaatgggtcggcatggcaccgttggcggttgatgaaaaataccgtggacaggggctggcacgccaactggtctatgaaggactcgattcgcttaatgagttcggctatgccgcagtggtgacgctgggcgatccggcgctgtacagccgttttggctttgaactggcggcacatcacgacctgcgttgccgctggccaggcactgaaagcgccttccaggtacatcgtttagcggatgacgcgttgaatggcgtaactggtctggttgagtatcacgagcatttcaatcgcttttaatctccggggtttgcagactgcttaacagctctgcaaaccctgcgctttccgctaccagacgctctttttgccgtttggtcagttgcttaacgcgatattccgcccgtaacgccagcgaacgatcgcccactggcgcagaaaacgccagcgtcagttctcctttcccgcgcagtgctttcgcccctttgccgctttggtgctgctgatagcggcgttcgacatccgtggtgatcccggtataaagcttattgtcggcggtacggatcaagtaaagaaaccagggtgtcatcgtctgcgtcgcatgttaaggtcaggcccacagtataaaagagaacagcaatggaaacactcatcaccatcagccgttggttggcaaaacaacatgttgtcacctggtgtgtgcagcaggaaggggaactctggtgcgctaatgctttttatctgtttgatgcgcagaaagtcgccttctacattttgacggaagaaaaaacgcgccacgcgcagatgagtgggccgcaggctgcggttgccggaacggtaaacggtcagccgaaaacggtagcgttaattcgcggcgtgcagtttaaaggtgagatccgcaggctggaaggtgaggaaagcgacctcgcgcgcaaggcgtacaatcgtcgctttccggttgccagaatgctgtcggccccggtgtgggaaatccggctcgatgaaatcaaattcaccgacaacacgctgggctttggtaaaaaaatgatttggctacgcggctcaggcaccgagcaggcgtaacgcctcgcggttaaacgctggcagatcgtccggtgtccggctggtaaccagctgatctttatcgaccacgacttcctgatcgtaaaattccgcgcccgcgtttttaacatcaataatgatcggtttaaccgcggtcagtttgcgcccccgaatcacatcggcgctgatcagcagctgcggaccgtgacagatggcgaaaacaggtttgccgctattcacaaaatcacgggtaaaggtgacaaaacggttgtcgccacgcagataatccggtgaatggccgcccggtagcagcagggcatcaaactccgctggcgtcacttcatcgatggatttatcgatggtcacgctggcttctccttttttgcctttcaccgttttacccgcttgtttttcaatggtaatcacttcgtgtccggctttacggaactcgtctgcgggtgaagtaaattctgaatcttcaaattcatcagtgattaaaacggcaattttcttactcatgcttcctccgcgttgttgcattggatgaggcgaatttcccacaatcggggataattacctcatggtctattaagcctggtgcatgagccgtggagcgcaaggcagacaattctgtaaaggagcgaagatgagtcaggtactgattacaggcgcaacggggctggtgggcggtcacctgctgcggatgttgattaacgaaccgaaagttaacgccatagccgcgccgacgcgacgtccgttgggcgatatgcccggggtgtttaatccccatgatccgcaactgactgacgcgctggcgcaggtcaccgatcccatcgacattgtgttttgttgtctcggcaccacgcggcgagaagcggggagcaaagaggcgtttattcatgccgattacacgctggtagtggataccgcattaaccgggcggcgactgggcgcgcagcatatgctggtggtcagtgctatgggtgccaatgcccactcgccgtttttctataaccgcgtcaaaggggagatggaagaagcattaatcgcccagaactggccgaaattgaccattgctcgcccgtcgatgttactgggcgatcgtagcaaacagcggatgaacgaaacgctttttgcgccgctgttccgtttattacccggtaactggaaatccattgatgcgagagacgtggcgcgggtcatgctggcagaggcgatgcggcccgggcatgaaggtgtgacgattttaagctcttcagaattacgcaaaagagctgaataattattcccaagaattgatagtgagcgtaatattcacgcgctcaattatcataacttattcctggggaatgctatgactggtcagtcttcatctcaggcggcaacgcccattcagtggtggaaacccgcgcttttctttctcgttgtcattgccggtctctggtatgtgaaatggcaaccttactacggcaaagcgtttactgctgccgaaacccacagtatcggtaaatctatccttgcgcaggcggatgctaatccgtggcaggcggcgttggattacgcgatgatctatttcctcgcggtatggaaagcggcagtgctgggggtgatcctcggttcgttgattcaggtgctgatcccgcgtgactggttgttgcgtacgcttgggcaatcgcgctttcgcggcacgctgctgggaacgctgttttcgctgccgggcatgatgtgtacctgctgtgcggctccggtcgcggcgggaatgcgtcgccaacaggtgtcgatgggcggtgcgctggcattctggatgggcaatccggtgttaaacccggcgacgctggtgtttatggggtttgtcctcggctggggttttgcggcgattcgtctggtggccgggctggtgatggtgttgctgattgcgacgctggtgcaaaaatgggtgcgtgaaacaccgcaaacgcaggcaccggtcgaaattgacataccggaagcacagggcggtttttttagccgctggggcagggcgctatggacgcttttctggagtacgatcccggtttacatccttgcagtactggtgttgggtgccgctcgcgtctggttattcccccatgccgatggtgctgtcgataacagcctgatgtgggtgatggcgatggcggtagcaggatgcttgtttgtcattcccacggcagcagaaattccgattgtacaaacgatgatgctggcaggtatgggaactgctccggcgctggcattgttgatgacgctcccggcggtgagtttgccgtcactgattatgctgcgcaaagcgttcccagcgaaagccttatggctgacaggggcgatggtggcagtgtctggtgtgattgtcggcgggctggcgctgttgttctgatttgagggaaaacatgtcggatgcggcgtaaacgccttatccgacctacggtttgcatcgttgtaggcctgataagacgcggcaagcgtcgcatcaggcattacaaggggctgctatttaataaacgtaaacgctgtggttacccgctttacgccgctcacccggctggcaatatctgccgccgctttcgcttcacgttcagtcaccagccccatcaggaacacttcaccgttttcggtggtcactttcacgttggacgatttcaccaggtcgctggttaagagctgcgaacgcactttggtggtgatccacgtatcgttagacgcttcgcccagaccaatcggctggccctgacgaatctcgttatacacttcgttggcaccgtctacgcccatagcaatctgtttggcgcgagccgaaagttcagcgtttggtgactgcccaaccagcagcactttgccctgatacgccgtgacattaatacgggcttctttcttaatctgttcgtctttcgacaatgcgctgttcacgcgcacttccagggtaccatcgtccacctgggtgccgacactgcgtgggtcagttgcggctttggtacccacagcagcggtacccactacggcagcggcaaaacaaccttgcaacagcagcgcggaaataaggactgcgattggcgataatgccttcatgtattctccttaaacatcctggtgagggaaaagcgtgttatcgatcagatcgcacaggcaatttaccgtcagcatatgcatttcctgaatgcgagcactacgatgcgaaggaatgcggatctccacatcttgtggccctaacaaacctgcaagttcgccgccgtcatagccggtcaatgccacaatagtcatatcacgcgtaacggcagcttctaccgcttttacaatatcgcggctgttgccacgggtggaaatggctaacaatacatctcccgcatgacccagcgcccgcacctgttttgcatacacttcatcatgtaagcgatcgttggcaatcgccgttaagacaacattatcagtatttagtgcaatggcaggtaagctgggccgctccgtttcgaaacggttgatcatgctggcagcaaaatgctgtgcattggcagcggaagttccattaccacaacagaggattttgttgccattgagcagagactgaaccagcgtcatggctgcacgggagatggcatccggaagcgcctctgccgccgcaatttgagtttgaatgctttcagtgaagcaagctttaattctttcttgcacgctaatccttaaaccttaattatgagtggtcattaaaggcatccttaatccactcaacctcattcccggtgaaggctaccacatcgaaccggcaatccacagtatcaaaactcccattatgacgcgcgagccacaagcgggcagtctgtaataatttgtgttgtttgctgcgggtcacactggctgccgcgccgccataaagcgcagagcggcgatagcgtacctcgacaaaaacggtggtccggccttcacgcattatcagatcgatctcgccgccacgctcgttcacgttagcggcgacaaatcgcagtcctttgccttccagccagcgacgcgcttgtacttcccacgcatcgccggtctgtttggtggttaactggcggggactacctgaccttgttggtactgtagccatgataacttcctgttaatcacgcaatccgggtttgccgtcaggcttccggtattaccgttgatttcaaaaccctgaacctggcgcatttgtgagaaatgatttgccagcgaccaggcatcgacgcccatcgcatacatgcgagccagtgaataatcgttattcaccgcgctgagtgcctgctgcattaacggtagattaccgcctgccagcatcgggatttcgctgtactgcaagccttccatctccagtcggaaatccgggccagcggtcccttgcgcactgcgggagctggcgtacagcgttgcaccgctctggctaccgttacgcatggcgatcatcggtttgataaaagcgatttcacccggcgttgccacaatgtacaccgcatcgacacgaccgccattattggtgaactggtcatcggttggcgtggtttgcagcgttggattgttggtcgtcatgccggagtcggttgtcgctctgggagtaatcggggtacccgttaaagcgataccagaaccgccgttaacacccgcgcgtaattcgctggtggaaccaaatttttgttgcagaacggtgccgccgcccagtttctgccactcctgcgcaaacgcattggctacgcgatcgcccaatgaactgcgtgggatcagcaccagcggcgcttgtttaccctggtcacgaatatgacgcgctgcatcgcgcgcttcgtcttccggtgaaagcgcgaagtaacaaatattgacgcggttttcgatattctccggctggttcagtgccagcacgttcagcggggtgttgctcttaagcaactcttcaacgttatttttcagcaacggaccaaccacaatactcgcgccatcctgctgaacctggcttaagatctggctaagtggttgtgatgaggtatcgtagattttcagttctgcggatggattcgctggcgcgcttaccgctgtggtggttgctgccggggtgcttacaggcgctggctgtgccgcaggctgttcaccggtcagatcgctaaccgaggcttgtgccgggctggcaacgccatccacggtttgcggctgaggttgttcagctacgtctgcggcaggtgcggcagctacctgagccgccactggctgagtgccgatatttttcgccgcttcaaagccttgctgaatagtgcgaccaaataccgctgcctggccattcagcggcaacagcagggcgattttgttggtcgaggctggtttaaacgcttttacgttaaccaactgcgttggcagcattttcgcgcccggattgttcggataacgtttttgccagtcggcgatcccggctttcatcatgtcgggatcgttacggttatcaaaccagacgcgctgcagatccagccagccttgcagaatattttcgtcggcgttgatcaccagcgtattcgcctgttcctgagtcatggaggagagcgcctgccaggtggcatcaatattctgctgtttttctttcgcgccgagcagcggttcctgagcaattaacgcgcgcagtaaatcaatggaaggacgcccctggctggcatcgatttttgcctgccagtaacgcgcttgctggttttgttctaaatcggcaggtgtgattttcgccagcaagttttgcgcgccagcaaaatctttctgcgccagtttaatctctaccgccagcagtgttttctcgcgacgctgagaatcgttcagttcttgcggtagttggttaaacaactcaaccgcctgcccggttttaccttctttcaccagtgcacgaatggcgagtaattgccagttgatcctggtatcatcagagctttgctgcatctgctgaagataaaaggcagaatcagcctgcgccgtgccctgcatataagcagtggactgatcgggagtatgggtgccacaaccggcgaaaatcagggctgccagaacaacaggcagacaacgcgcggctttcaaacgagaaaatgttgagggtaccataatgtatccagtgatatttttttacgcaatgctcaatattaaatcggcaatacggacgacacaatgaaacaacaccaatcggcggataattctcagggccagctttacattgtaccgacgccaatcggcaatctggcggatatcacccagcgtgcgttagaggtattacaggccgttgatctgattgccgccgaggatactcgtcacaccggtttattgctgcaacattttgggattaatgcccggttgtttgcgctgcacgaccataacgaacaacaaaaagccgaaacgctgctggcgaagctgcaagaagggcagaacattgcgctggtttccgatgccggaacgccgctaattaacgatcctggctaccatctggtgcgtacctgccgtgaagcggggatttgcgtggtgccgctacccgggccgtgtgctgctatcactgcgttaagcgccgcgggtttaccctctgaccgtttctgttacgaaggctttttacctgccaaatcaaaaggccgccgtgatgcgctaaaagccattgaagcggagccgcgcacgctgattttttatgaatccacccaccgtctgttagatagcctggaagatatcgttgcggtattaggcgaatcccgctacgtggttctggcgcgtgagctgaccaaaacctgggaaaccattcacggcgcgcccgttggcgagctgctggcgtgggtaaaagaagatgaaaaccgtcgcaaaggcgaaatggtgctgattatcgaaggtcataaagcacaggaagaagacttacccgccgatgccctgcgcacgctggcgctgctacaggcagaactgccgttgaaaaaagcggcggcgctggcggcagaaattcacggcgtgaagaaaaatgcgctgtataagtatgcgctggagcagcaggggtaagagtgccgaagcgttgcgttaatcaaaacgcaacgtcttcttttaccgcacgatgacggtaatggtggcggtgccctgaaattttcctgtttccagctcaccaccgaccagattaactggccaggcgcgcatgttgatggtgccatgcccggaaggatcaacgggaaggataccgttctgaaaaggaatatttgcaactccgccgccgagattttcaatacgaataccgacatcgggcgcattgtctgaacttcttcgtctggcgaccaggttgtactggtctactaccccagttgtaccgtcgatgcgcatttgcaacgagtttttaatctttgaagtatcaccacagtcataagtgatattaaagtctactggagtaaaaccgtctggcatggcattgcgggtggtaaacttctgaccattgatgaatccaaaattaaccttaataacatcgccctgattaattttgcacgactgtggggcggtgagatttccctgaatcgataacttgactaaatcatggaagtcacctgtagacgggcttcccattccatcgacccatgcgcctttaatgacggcaatatccgttttcggaatggtcatcgagccgagaaatggcttggtgacatacagggtaaaggtggtatttgcaccaatattaacgggtccataacgagacgtgtcaccctggcaaacacccgtttgggttgcagcagaatatacggtgttgctttttatctgtgtgaatcgggtgttaacagaaacggtctggtcagtcacgagtcctggaatgtcattcgcctgtaatgtggttttaatatccagactatcattgagtttgtaatatcctgcttgatgtccagtggtggtaagtacagggctgaccatatagacaagtttaactgccttacccgcagagcaggtacaggcgtattgccagttagtgctacttagcgtggcagaggtaaactcccgtcctgtcacgttatctgtctggttcaccgtaacatcatcaaccacactgctgtaatttgtcgcaccgctagtgctgtcagctccacaccctcctgaggaggcataagcgcaggatgtggatatcaacaaaagtcctgttataagaggcgctcttttcatttttttatccttaatggcactgcgccgtgccttgtaatacagaggttgttggttctgaatccggtgtactaaaagcaaactgacattgttgatctgcctgatttccccagcgtacagtccagctttgtgatttactcgatatcccagagagatatagtatgccgccctcatcgacgatactttgttgccccgtctcatcgttgctggcaagagcgccaaagggcaacggtttaccgttgcgatcgctgactgtaacaagtacgcgataaccgatattggcgttgaaacgcgccgctaccattgcacctctgttgggcaccacaaactgtgttgtttgctcaagatcgacgttatcgggcagctgcgtagtatctaccgagagacggttttcctggtaagtcgtgagataaggaaccactgcatagccaaagggatcagtagcaatccccggatagttttgtatcctcacgccagaagccccattagcatcgataagcgcaaaagcgttgcccagatattgcgagagcgtcacgccatgaggatggataaccacgccgccggtaacgccgtaattgtattggctgctgtcattaccgtagctgtatccggcactgaaggtgccataaggtgaacggtaactggcgttcaggctactgttatggttgttatcgtcatccagactttgttccaggctatagctcaggcgaccatcatccagcagtgagccatcaagacgcatttcatgttgggttgggcgatctttctggctggtcatctgataggaaacccggctacgcggtaaccagcgttctaacggaatactgagattcaaagagagtgcgcggtcattattttgatccgtgtagcgactgtattgataattcaggctgtaaccaattccccattgctgaccggaaaccccaactgagatattcctgtttttatcgttattgccccaatagtcttgctgcgaaccggaggcatacagacttaccccatcaaatattgtctggctgatgttgaattgaatttcacttttttggcgactgttatagtcccaattacgggtattggcttcatcaaaactaaaatagccatcgttggtatagcgatagtagctaacagcgatattggtgttggtttccgggatatctttgatgtactgcgtacgccattgatagccatgaaaagagtgccggttatcgaattgggtgtcagctctgttgatatccatcgacaacgcgcccagtgcgccaagtgtgccgccgataccgatccccagcgcataataatcttcagaaccgagcaggccgccatacagcgtaaaagtattattcaaaccatatattgccgtggcttcagcaaattcgggttccttgctatcactgtttgcatcagcgcgatagcgtccagcggtcgcgctatattttagatgcccaggtcgctgcatcatgggtaatgaagaataaggctggataaagcgacgttgcgtaccgtcactttcttcaatcgtgacttctaaatcgccgctgttggaagaggggtagagatcgttaatttcaaaggcacccgctggcacgttgctttgatagatcacataaccattttgcctgatagtcacgattgcactactgtttgcgataccgcgtaccgttggggcaaatccgcgctggctgtttggcaacatattatcgtcggaagcgagttgcacgccagtaaaggtgtagctggaaaaaatactgccgctggtggcgctttctcccagaagcaactgagacttcaacgccttgatatcacgttgtaaataactactgatagtgttccagcttgacgcctgatcgttgcgtgtccacgtagaatagttacgtaatcgccaggggccaaaattagcaccattttgcatattcaggtactgtcgttggctacgattgccctggcggtaacggttatcagaacctgtaaacgagtagttggtaaacagcgttggtataccatcgtcccaacgagaaggggagacgtaacctcttgcatcacggtacagtgcaatttggggaatgctcaaattaagtcgctgatgattgaaatcaaattcagcagctgtaccgggaatgatttgttcaagcgagttgatcacgctatcgtcatctttttcagccagcgccgggatttcatccaccttaatacccagctcacgtagttgttctaccgtaaactgtggctgcagaagttgctctgcactgatgaatcccctaatgattttggtaaaaatcattaagttaaggtggatacacatcttgtcatatgatcaaatggtttcgcgaaaaatcaataatcagacaacaagatgtgcgaactcgatattttacacgactctctttaccaattctgccccgaattacacttaaaacgactcaacagcttaacgttggcttgccacgcattacttgactgtaaaactctcactcttaccgaacttggccgtaacctgccaaccaaagcgagaacaaaacataacatcaaacgaatcgaccgattgttaggtaatcgtcacctccacaaagagcgac

SEQ ID NO: 24 - DNA, 120168 bp, Escherichia coli
  source 1..120168: mol_type = genomic DNA
aaaatatcgagttcgcacatcttgttgtctgattattgatttttcgcgaaaccatttgatcatatgacaagatgtgtatccaccttaacttaatgatttttaccaaaatcattaggggattcatcagggcttaaccctgacggttgaaacgttgccttttaacgtccagcgttagcgtttcttctggttgtatcgcatacagtttctcaccctgctggcaaatccagccaatccccagttcacgggcgattagggcgctgtgggataccggacttccggcgctaaggcagataccttttacaaccgccggatccagttgcagtactgtggaaggataaatgttctccgccagtagaatagttggcgagttaaactgcgggagttcttctttcgtttgggtcaggtggaccagggtgcgatgcagaagatcgtccacatcaatatagcgagcttgtagatattcatcatccagttgctggtattgctggctaagttctttaagaacttgctgccaggcatattctgccgtgcaatgttcatgctgaaggagttcgcttgccgccgccagcagttccggatcatctaacagtgtatggtgaccagaaaagattgcggcaatatcgtcaagcccgctggcttctgcttttgctgttaacgtcatcagatctaataacgtgaagtcaatagcctggcgtaatcgatcttgttcttcttccacggtcagggttgattttgcctgtaccgtacataaaactggttgataataaaaggctttacccgaaacaggcggaacgggacgcagagtaggtggagcgacttcctccgtttcaccaaagttatcttcagccagctgacggaaagcgatcagtgcctcttcagcttctggccctttcgcaatcaggcgcagcgtatcgttatagcgaacttgtagtaacgcaatctggttaatactctctggtgtgacgcatttgccgtttttttccagcaacatatcggcattaaatgtcgataaggtataaaccagccgggaggccggacgtacatgcaggccgttacggttttttatgaccaccgccagagaacgggcttcttcatcgtacgcaggacatgtgtcagagattttagtgtcggaggacggtaaacccagttgttcacgtttggcttccagcgcatgcatagcgtcaaagataactttgtcgatatccgctcccgaggccgcgctgaccgttgctgccagtgtaccttcgaccaacggcgcagcacacaaacgtacttttgcggcgatcttgggagccagcaattccagcgcagtttcagcactcaataatgcgctacccatatccatcatgaccagcacatggtcggcatcagcaacagattcgatggcctccatcactttgacggcatcggtaccaataggattttgtggatcgtcaattcccgcggcaatggcgattttacaactatcactcattaacatctgacgggctaattcaccgacaccttctcccagtcggctgctatgtgaaactatgaccaggtttaccatcaccaattccttactcttttgcggctaacgccaacatttgcatcataaacatcaccgaggtcgcgccgggatcctggtgaccaatactgcgttcaccgagataactggcgcggcctttgcgggcttgcatcgtaatcgtactttgtgcagcggattcggcgattctactggcagcttcgagcgccaccggaacagagagattttgctcgctggactgacgtaacgattccaccaccggcacccacacatcacacatggttttatcgccaggttcggctttcccgcgactgattacgccgtccacgccatcgcggaacatctgataaagctcttccagtgtcaggctttgccgtgcctgggtcgcctgtgcggcgcggataaagaaggtaccgaacagcggaccactggcaccaccgacgctggaaagcagcgtcataccggtattcttgagaatgaaaccgatatctttatctgcgatagcagggagtttttccaccactttgctaaagcctcggttcatatttagcccgtggtcagcgtcgccaatttcgcgatccagtccggtaagatactcgctctcggtgctgaaaatatcgccacaacgagtgagccagttaacaatttgagttctgctcagtgacattgctttctccttatttaccccagttaagggccggggtgtggaccggggcgtcccagagtgccagcgtttcgtcatcaactttcagtaaggtgattgagaaaccggtcatatccagtgaggtgcagtacgcgccaattaaattacgttcgatagtcaatcccgcttgctggcaacgtgtggtcaggcggttatagacgccgtacagctcagaaagcggagttgcgccaagattgttaaccagcgcaatcacccgatcgccagactggagcggttgtttggtttgttgttcttcctgccaactgccttgttgataatcccagaaacgcaaagtgcgatggtatgagccattttccagcagggtgtcgaacatttcatcgacggtttgatcaagggaagagaaggagcggcggtcaatacccggctcaccatgaatgccgacgccaaactccatctcattatccgccagggtaaaagaaggtttgcccgcggcaggaacggtacaggcaccgagagcgatacctattgagtggccttgattattcaacttacgccccagttccgcacaggcgtccagtgagtcgccacgctccgccgctgcgcctacgagtttttcaattaatacggtgttggcaacgccgcgtcgcccggcggtataaagactgtcttttaccgcaacgtcgtcatcaatgaccacagtggtcacttttacgccgctatcgtgcagtaactcggtcgctgtttcaaagttaagaatatcgccggtgtaatttttgataatcaacagtacaccttcgccgccatcaatttgcatggagcattcaaagattttatcgggcgccggtgaggtgaaaatttcgcccggacaggcccccgaaagcatcccctgaccgatataaccacagtgcatcggctcgtgtccgctgccgccacccgacagcagggcgacttttcctgcaacaggggcatcagctcgggtgacatacaccggatcctgatgcagtgtcagcgatggatgcgctttcgccagtcctgccagttgttcgtccagtacgtcttgcacatcattgatcaattttttcattattttgctccagcaattacggtagggcatggatgatgttcaacgacacggcgaccactgactgccgatgaatccattgtgcatcaggcaagggaaaagaaaattagcccaaattatgtttcatagtgaaacatatgctttaatgaatgttccatattgaaacttttacgtgtattaatacttaaaattgcgagccggaacaccttttgtcataagggatgcgggatatgagtggcgcttttaacaacgatggtcggggcatatcacccttaattgcaacctcctgggagcgatgcaataagctgatgaaacgggagacatggaacgtaccacatcaggcccagggcgtgacatttgcttctatttatcggcgtaagaaagcgatgctgacgctcggtcaggctgcgctggaagatgcctgggaatatatggcaccgcgagagtgtgcgctgcttatcctcgatgaaaccgcctgcattctcagccgtaatggcgatccgcaaaccttgcagcagctaagtgcactgggattcaatgacggcacgtattgcgccgagggaattattggtacttgtgcgctatcgttagcggctatctctggtcaggccgtgaaaacgatggccgatcaacatttcaaacaggcactctggaactgggccttttgtgcaacgccgttgtttgacagcaagggccgattgacgggaacaatagcgctggcgtgtccggttgagcaaactaccgcagctgatttgccgttgacgttggcaatcgcccgcgaggtcggtaatttactgctgacggacagtttgctcgctgaaactaaccgtcatttaaatcaacttaatgccctgttagaaagtatggatgatggcgtgattagctgggacgagcagggtaatttgcaatttattaatgcccaggcggcgcgggtcttgcgccttgacgcgacggcaagtcagggacgggcaatcactgaactcttaacgttacccgccgtattgcaacaagcaataaaacaggcacatccgctcaaacacgtagaagcaacctttgaaagccagcaccagtttattgatgcggtgataacccttaaaccgataatagaaacgcagggaaccagctttattttgttgctccatcctgtggaacagatgcggcagttgatgaccagtcaattaggaaaagtcagccatacctttgctcatatgccacaggacgatccgcaaacccgccgcttgattcattttggtcgccaggcggcgcgcagtagctttcctgtcctgctttgtggagaagagggcgtgggcaaggcactgctaagtcaggcaattcataatgaaagcgagcgtgctgcaggtccttatatcgccgtcaattgtgagttatatggtgatgctgcgctggcggaagaatttattggtggcgatcgcacggacaatgaaaatggccgtctgagtcggctggaactggcacacggcggcacgctgtttcttgaaaagattgaatatctggcggtggagttacagtctgctttgcttcaggttatcaagcagggggttatcacgcgactggatgcgcggcgtttaataccaattgatgtcaaagtgattgcaacaacgaccgcggacctcgcaatgctggtggaacaaaatcgttttagtcgccagctgtattacgcgctgcatgcatttgaaattaccatcccgcctctgcgtatgcggcgtggcagcattccggcgctggtgaataacaaattacgcagtcttgaaaaacgcttctctacgcggctgaaaattgatgacgatgccctcgctcgcctggtttcttgtgcatggccaggcaacgattttgaactttacagcgtcatcgagaatcttgctctgagtagtgataacgggcgcattcgcgtcagtgatttacctgaacatctgtttaccgagcaggcgacagatgatgtcagcgccacccgcctttccaccagtctgtcatttgcggaagttgaaaaagaggcaattattaacgcagcccaggtcacaggcggtcgcattcaggaaatgtcggctttacttggaatcggccgcactacgctgtggcggaaaatgaagcaacatggcattgatgcagggcagtttaagcgccgggtatgaaagacagaaacgatttctgatacatcagagtgatctatatttcattccggcgcacgctaacaattttcagcatcgtttaagggcttgtctatcccgcacttaaaagctgaagcgatatcctccgttgacttgcttctgatcaaagaggttaccctgcgtgtaatccgcttcgagatagaatgtgtgctgtttgttatactgtgcactgactcccacgccgttattccagccattacctttgaaactgtacttctcccgggagttgttcaacagatattcggtatcccctgaaaactcgcggatagcgccagtcttcacatagacattcagctggctgttgcctgcggtgatgtcataccccagtatcatgctggcacgccccagcagcgattcgtagtgattcagatgtatattgaggccattactcgccttcatagtcatctcattctggtggctgtatgtaagctgggtttgcggctctatatagaacccataaccagtaggggacaggttgaacctctgcccggcttccagggagatgctcattccattcgcagtgccgttggcgttaacgccgttgttctgactgtccagtacgtggaaactatttttctggcgcgatgcttttataacgagatcgctgtaaaaaccgttttgtgccatgtaactggcgtacattcccatgtagtctgaacgtgcggtaccgtcgcctccgctatagtccggcgatgcatgtgttgagccaatatacagaccgacatacaacggcattacatcagagagacgtttatccccaccaaactggataccgctgtaacccatgtcaaagccgctcagtttgccactggcaaaggagtccaggcttcccccataactgcgcaaccagatattaccgtctttactgtgatttcgcaggtcacccatccgttgcatcagcgtacggttttcaacatagttcaataagtaaccgacattgagataattgccgccagcatctgcggtcgtggtgggtttaggcgtgggagcgggttcaggcgtaggatcggggttgactatgggaggctgagcgggagctggtgtgggttcaggattaggagtcggttccggaactgtcccggaagcgtaaagctcccagttagtgccatttttacgcacatcgtacagatatccccccaactcaacctgagaagacgcgctgaacgaggccgcgccgtcagtggtttttaccactgtcagaacttcatttcccgttgtggcctcgctgccctggttgcggatagccaatacgtgattaccagcactactcccgctgatattcaataaatcccctttattattaacgccattaccctcgccaacaacatcagcacgcataataaaggtactgttaccgctcaggttctctacgtttaatgtggcaaatgtgccggcagttgacccgtggctggcaaaatcgacagttgaatggctcagcgccagcgtgtcgagattagaattacttgttacgttccagacgctgttattcattgcaacgtccagttttccgccattgacattatcgctgagggaggaacctgtccaaaccgacccagggtgcatatccagattgattagcccacctttggaaagaacgctaccgttgataagcatacgacccgaggcgttgatgcggctggcggcataaccatcgtcatgttgcgttgcaatggccatctggtcgggtgtactcatatcaatgaccagatcgctcgtgaggtcgatctggctgttggtcatggcataaattcccctggctcctgccgcgccggtgatagccaaactgtctccggttattctaccgccgctgagcgcccacaaacccagcgccagactgccattacgatcaactgtaatatcggtattttgcatgttgacaacagccgttgccgtctgggccgaggcaccataagaaccgccggaaaagatgctgtttcgttgcgccgccgtgtcagaaaaattgattgtcgcgtctgaaccactggtgacgaggccaccgccctgcgcggaagaaatatggctatctgcaccgatagtggttgtaccaccacgaacttcgacgccattggccgcggctccagttacatcaacagtgagtgcattcgcgctaacctggccaaagctccagaggccgtgtgcattatcgccattggttttaatggaactgtttgttccgagatcgacaacagagtttttctgtacgtttatccccatggcgctgtagccctgaacatcgattgtcaggtctgtagccgtaaaacgcgcagcaccattggcgttattgccgttgagaccaccgatataaacacctgtacttccatcggtcgtgattttacttccgcttccaagatcgacactggtgccatagtcattgatggttaggcctataccgttcgagttttcaatggtgaattgagtggctgttagtgttgagctatgcccaataatgatgccgtcatcgttactcttaatggtgctgcctgtgcctaagtcagcatgggtatagtcaccaattaagttaatgccgatggcagaggtttgaccaacaacatctactgtgagtcggttagctgtcagggagctgtttttgccctgaataatgattccttttgcatatccagaggcgtcgttgacattgacggtgacatcattacccaggttgatattgccaggcgtgtttcctgctggggtcattacaccatagaggtttcctgatggatcggcggtatctcctgtaattctgtcaccatcattaatagtaatattggtgccatattgacttcctgtatcagcagctatcagcaggggggaaaagataattgcattcaaaccaatagcgccaaattttatcagttgaattgagggcgaacggatttttaattcagcgagacgatctgctttggtattcccattgtgttgtttgatgcccataccactcctatatagtacccagactatgggtctatggattttgtcattttgtttaaatcaatgaataatatcctcttatcatcatgatatttgtatggtgcaatcatgatgagcttctcagagaataattctctattaccgggcaaaatcaggaacacaggaattaatatatatttaacatcccccttacaaaggtgagtttatatcgagttattccctaagttgtcgttacttattccaattcgttactataaatatggcaaaaatattacaacaaacagcggttaaaaaatttggtgaagattttttgtaataatcctaattagttatgggaatttcgcttgatgtatctgcataacaaaaacaatatgcgccatttttgcattactaataagaaaaagcaaaaaacatcgatattcatttttggtcaatgggttttctggcctatcgttgttattgtgctactggttatcattttcatcttgccagcatattggagcgtgatcaattttgatcagctgtgaaggtggctgatgtgtagtgatacaaaaacttacgttatatcactgctaatgagatatccgtcatctgaacacttatgtctttaattattctcgtggttcactataggcaataagcacaaaagtgtaggatgttacaagaatgattaggactcggtgaaatgaaaaatccacgcaattgcgtggattttatatacttttgcgctcttcatgagatttagcgaaacctcatgagacaataaattaattagacgttgaaaaggaagttcatcacatcgccatctttcacgatgtaatctttaccttctgcacgcattttgcctgcttctttcgcgccttgttcacctttgtaagtgatgaaatcttcaaacgagatggtttgtgcacggataaagcctttttcaaaatcagtatggattttgcccgctgcctgcggcgcggttgctccaaccggaatggtccatgcacgcacttctttcaccccagcggtgaagtaagtttgcaggttcagcagcttataaccggcacggatcacacggttcaggcccggctcttccagcccaagctcctgcataaactcgtcacgttcttcgtcgtccagttcggcaatgtctgcttcaacagcagcacaaaccggaaccacaacagaaccttctttcgccgcgatttcacgcacctggtcaagatatgggttgttttcaaaaccgtcttcgttgacgttggcgatgtacattgttggtttcagcgtcaggaagctcaggtaacgaatagccgctttctcttcagcgcttaaatccagcgcgcgcagcatacctgcattttccaactggggcaggcatttttccaggaccgccagctcaactttcgcgtctttatcgccacctttggctttcttctgtacgcgatgaatcgcacgttcgcaggtgtcgaggtctgccagcgccagttcggtgttgataacttcaatatcgtcagccgggttaactttgccggaaacgtgaatgatgttgtcattttcaaagcagcgaacaacgtgaccgatcgcttcggtttcacggatgttggtcaggaactggttacccagaccttcgcctttcgatgcgccttttaccagaccggcgatatcgacaaattccatggtcgtgggaagcgtacgttgcggttttacgatttcagccagttgatccaggcgagggtcaggcattggtacgacgcctgtgttcggctcaatggtgcagaatggaaagttggccgcttcaataccggctttggtcagcgcgttgaacagggtagatttcccgacgttgggcaaaccgacgataccgcatttgaatcccatgatttaaatcaccttaatatcttaataatcaacctgttattgctaacagattgcagaaatggaaataactttgcctattatacacggcactcggcaaaaatgccgcagacaacgacttattgcgctttaaaggcgtgcaatcggttcgttgctttggtcaagccatctgtaaaccacatttcagtacaacgcgccgcttcgtcgatggcttcatcaattaacttctgttcactaacaggcggtttgcctaacacaaaaccgacaactttatttttatcgcccggatgaccgattccgatgcgtaaacggtgaaagttagggttattacccaatttactgatgatgtctttcagtccattgtgaccaccatggccaccgcccaatttaaatttggcgacgccaggaggcagatccagttcgtcgtgggccaccagaatttcgtccggattaatgcggaaaaaactggccatcgccgcaacggctttgccgctgagattcataaatgtagtcgggactaacaggcggacatcttcgcctccaagagtgactcgcgaagtataaccaaagaatttagcctcttcgcgcagcggagcgcgcaaacgctctgccagtaagtcaacgaaccaggcaccagcattatgtcgcgttgcggcgtattcagcaccggggttcgccaggccgacaatcaatttaatcgtcacgtttttttgtcctgagtgtgtacataactggcgcgtagtttactggttgcggccccgcttgacaaaaaactgcgtatcaaatgcagataacgtaataattgcctgagtggactattagaaagtcaaggtgttcaggcgtttatttgtaaagttttgttgaaataagggttgtaattgtgatcacgcccgcacataacccacagggtgttgtctatactttacacataaggaagaggggtattccctgttacaacccagaaagttccggaggtgacatatgaaacgcaaaaacgcttcgttactcggtaacgtgctcatggggttgggtctggtggtaatggtggtcggcgtggggtattcaatcctcaaccagttaccacagtttaatatgccccagtatttcgcacatggtgcagtgctaagtattttcgtcggtgccattctctggctggcgggtgcccgtgttggcgggcatgaacaggtgtgcgaccgttactggtgggttcgccactatgacaaacgttgccgccgtagcgataatcgccgtcatagctaacaaataatgcagtttgctgaccagtcagtttgcgctgactggtcaatctcgtacttataaatccgccatcgccgcgcgacgattcgggaagaacgcgaggcgtcccgggatcggttgaatgcctgcgcgagccatagtgcgcagtggctggaattccacgttgcacacgcgcagttcacatccttcgggcagacgcttcacaaaacgctggaacgcatcaagaccaccagcatcaagtaccggaaccgcatcccacttcagaatcacaatccgtttgccttcaagacgtgactccaggtccgtgaacaagccttcagcagcagcaaaaaacagcgggccaataacgcgcagaaccaggacatcgtctggaacatctacgactaccggtgccaggcgagtcatacgtgcgatacgacgcataaacagcagcgatgccagcacgatccccacgctgatggcaataaccatatcaaacagcacggtcagcgacatgcacagcagcatgacaatgatgtcatctttcggcgcatgacgcagcaagtcgaccactttgtgcgcttcactcatgttccacgccaccatcaacagcagggcagccatggcggaaagcggcagccaggagagcagcggtgccagtaccagcagggcaagaataaccagaatagagtggatcaccgccgagataggggaagttgccccggcacggacgttagcggcagaacgcgcgatggcagctgtagcggtaatgccaccaaagaacggagcgatgatattccccagtccctgtccaaccagttcgctattcgccttgtgttttgtcccggtcataccatccagtaccacggcgcagagcagagattcgattgcgccgagcattgccattgagaatgccgcaggcagcagtgtgcgaatagaatcccaggttagcgtgaattctgaattaggcagatcccacggcagcacaagttgcggcagcagttgcggaataccgttaccctgagaaccatcggccaggacgtagtggaattgcgaaccgatggtagcaacatgtccgccgagcagattaacaatccccatcaccgcgcaaccagccagcaaggccggaagatgaccgggtaaacgaatgcccagacgcggccagaaaaccagaataccaagcgtcacaatgccaatggcagcatcacccacattaatggtcggcagcgccataaataatgcgccgactttttgtagataatgttccgggacatgggccatttgcagaccgagaaaatctttaatctgcatggtaccgatggtgatcccgatacccgaggtgaaacctaaggtgacggaaaccggaatatactcaatcaggcgaccaaagcgtgccagacccatcagaatcaaaaagatccccgacaacaaggtcgcaaccagcagtcctgccagtccaaactgttgcgaaacgggatagagaattaccacaaatgccgcagtcggaccggaaacgctaaagcgtgacccacccgtcagagcaatgacaatccccgcaacagctgcggtatataaaccgtactggggtgccacaccactaccaatagccaacgccatcgccagcgggatagcaataatcccgacggttatcccggcaatcaggtcacgggtaaaccgtgcggcagtatatttttctttccagcaagcgtcgatcagagcgcggaaaggcatcacatgtgaggaaaatattttgttcacaataatgtttcatccgtgagcgcatcatctgtcaactaaatggcaggtgaaggaggcataggtcatacaaatggatattacagacaaaaaaacccgccgcagcgggtctttgagccgggttcgattagtgttcgaacatggcagagatcgattcttcgttgctgatacgacgaatcgcttcggccagcatacctgacagggtcagagtacgcacgttcggcagtgatttgatttcatcgctcagcggaatggtatcgcagacaacgacttcatcaattacagagttacgcaggttattcgccgcgttgccagagaagatcgggtgagtcgcgtacgcaaatacacgtttagcaccacgttctttcagagcttcagcagctttacacagcgtaccgccagtgtcgatcatatcatcgaccagtacgcagtcacgacctgcaacgtcaccgatgatatgcatcacctgggaaacgttcgcacgcggacgacgtttgtcgatgattgccatatcggtatcgttcagcagcttagcgatagcgcgggcacgcacaacgccgccgatgtccggagaaaccacaattgggttatccagattcagctgcagcatgtcttccagcaggatcgggctaccaaatacgttatcaaccggaacgtcgaagaaaccctgaatctgttcagcgtgcagatccactgtcagcacacggtcaacaccgacgctggagaggaagtctgcaaccactttcgcagtgattggtacacgagcggaacggacgcgacggtcctggcgcgcatagccaaagtaggggataacagcggtgatacgacctgcggaagcacgacgcagggcatcaaccataacgactaattccatcaggttgtcgttagtaggggcacaagtggactggatgatgaaaatatcaccaccgcgtacattttcgttgatttgtacactgacttcgccgtcgctaaagcgacctacagcggcgtcgccgagtgaagtgtacaggcggttggcaatacgttgtgctagttccggggtggcgttaccagcaaaaagcttcatatcaggcacgagaagaacctcaggcatgcgtccattggtggaaagaatctgccgaaaactgtgcgggccaggcatgatcctttccaggcggtgtattaaagagcgcgatgcaacgtctggaacaaggtgacgttgtcaccgaaactcagcttgcccggcttaaagcatggctctgtgcaatggggaaagattaacgcctttcgccacaaagccattgagccattccggggcttgctctagcacctggcgggcttcagactctgtatcaaattcagcaaagacacaggcccctgtcccagtcaggcgcgacggggcgtattctaacagccaggaaagcaccgcatcaacctcgcgaaaacgttttcttgcgataacctcgcaatcattgctgaattcacattttagcaacgtttctattgacctttttggcgtattgcgcgggagttcaggatctttaaaaatcaccggagtcggaatacttacaccagggtgcgccaccagataccacttctctggcggatccaccggcgttagtatttcaccaacgccttcggcaaacgcggcatgcccccgaacaaagacaggaacatctgcgcccagcgtcagccccatttccgccagctcatccatgcttagcccgcattgccagagatgatttaatgccaccaggaccgtcgcggcattggatgaaccaccgccgagaccgccgcccatcggcaaacgcttgtcaatgctgatattcgcaccgcttcccgtcggaagacgcccgctgtctgccgcagttttcatcaacaaccgcgctgcgcgaacgatcaggttatcttcatgttccacgccttcaacgggcgttaacagacgaatatccccatcgtcacgaagctcaatgatgatggtgtcgccgtaatcaagaaactgaaacagcgtttgcagcgtgtggtaaccatccgcacgctgaccggtaatgtataaaaacagattaagttttgccggagagggccactgtgtccgcattatttcactatccagttatccatttttaacttgatgcgttgaccaccgtcggtgagttccatattggctggcatcgcaggttgcgttttggtgtcataaccaccataaacaaccttccagtttttgccattctggctgtaggtaatttcgctcaggcggtactggtcgtccagtttgtagtcggttgcatcacccggtaaacctaaaatccactggcgcaagctgttgagcggaattggcattccggtcaatttgccaatcatctcttcggcgtcatcggcggtataacgctgacctttattgtcgactaactgcacgttacccggttgagcattcagctccagttccgtgctgcccaatgggttagtgagcagcagacggtagcgatcctggccggtttgctgccagaaaaagcgggcgtacactttttgttggtcagaaatataagcgaacgcgccgcgagtctgatactgattaagattgcgcacgtcttgctgatgctgacgccattgtggcgaatccgggcttttgccaggacctttgggcgtggtaacggaacaggcagtaagcacaagagcagccagcggtagcaggcggataagacgaaaatcgggcaggggcatagtgatgacaagtccttgagatacgttgcagttataacccttaatgctagcgttaccgtccgctatcgtctatgttcaagttgtcttaattgccagaatctaacggctttcggcaattactccaaaagggggcgctctcttttattgatcttacgcatcctgtatgatgcaagcagactaaccctatcaacgttggtattatttcccgcagacatgacccttttagcactcggtatcaaccataaaacggcacctgtatcgctgcgagaacgtgtatcgttttcgccggataagctcgatcaggcgcttgacagcctgcttgcgcagccgatggtgcagggcggcgtggtgctgtcgacgtgcaaccgcacggaactttatcttagcgttgaagagcaggataacctgcaagaggcgttaatccgctggctttgcgattatcacaatcttaatgaagaagatctgcgtaaaagcctctactggcatcaggataacgacgcggttagccatttaatgcgtgttgccagcggcctggattcactggttcttggggagccgcagatcctcggtcaggttaaaaaagcgtttgccgattcgcaaaaaggtcatatgaaggccagcgaactggaacgcatgttccagaaatctttctctgtcgcgaaacgcgttcgcactgaaacagatatcggtgccagtgctgtgtctgtcgcttttgcggcttgtacgctggcgcggcagatctttgaatcgctctctacggtcacagtgttgctggtaggcgcgggcgaaaccatcgagctggtagcgcgtcatctgcgcgaacataaagtacagaagatgattatcgccaaccgcactcgcgaacgtgcccaaattctggcagatgaagttggcgcggaagtgattgccctgagtgagatcgacgaacgtctgcgcgaagccgatatcatcatcagttccaccgccagcccgttaccgattatcgggaaaggcatggtggagcgcgcattaaaaagccgtcgcaaccaaccaatgctgttggtggatattgccgttccgcgcgatgttgagccggaagttggcaaactggcgaatgcttatctttatagtgtggacgatctgcaaagcatcatttcgcacaacctggcgcagcgtaaagccgcagcggttgaggcggaaactattgtcgctcaggaaaccagcgaatttatggcgtggctgcgagcacaaagcgccagcgaaaccattcgcgagtatcgcagccaggcagagcacgttcgcgatgagttaaccgccaaagcgttagcggcccttgagcagggcggcgacgcgcaagccattatgcaggatctggcatggaaactgactaaccgcttgatccatgcgccaacgaaatcacttcaacaggccgcccgtgacggggataacgaacgcctgaatattctgcgcgacagcctcgggctggagtagcagtacatcattttctttttttacagggtgcatttacgcctatgaagccttctatcgttgccaaactggaagccctgcatgaacgccatgaagaagttcaggcgttgctgggtgacgcgcaaactatcgccgaccaggaacgttttcgcgcattatcacgcgaatatgcgcagttaagtgatgtttcgcgctgttttaccgactggcaacaggttcaggaagatatcgaaaccgcacagatgatgctcgatgatcctgaaatgcgtgagatggcgcaggatgaactgcgcgaagctaaagaaaaaagcgagcaactggaacagcaattacaggttctgttactgccaaaagatcctgatgacgaacgtaacgccttcctcgaagtccgagccggaaccggcggcgacgaagcggcgctgttcgcaggcgatctgttccgtatgtacagccgttacgccgaagcccgccgctggcgggtagaaatcatgagcgccagcgagggtgaacatggtggttataaagagatcatcgccaaaattagcggtgatggtgtgtatggtcgtctgaaatttgaatctggcggtcatcgcgtgcagcgtgttcctgctacggaatcgcagggtcgtattcatacttctgcttgtaccgttgcggtaatgccagaactgcctgacgcagaactgccggacatcaacccagcagatttacgcattgatactttccgctcgtcaggggcgggtggtcagcacgttaacaccaccgattcggcaattcgtattactcacttgccgaccgggattgttgttgaatgtcaggatgaacgttcacaacataaaaacaaagcgaaggcgctttcagtgctcggtgctcgcatccacgctgctgaaatggcaaaacgccaacaggccgaagcgtctacccgtcgtaacctgctggggagtggcgatcgcagcgaccgtaaccgtacttacaatttcccgcaggggcgcgttaccgatcaccgcatcaacctgacgctctaccgcctggatgaagtgatggaaggtaagctggatatgctgattgaaccgattatccaggaacatcaggccgaccaactggcggcgttgtccgagcaggaataatggaatatcaacactggttacgtgaagcaataagccaacttcaggcgagcgaaagcccgcggcgtgatgctgaaatcctgctggagcatgttaccggcagagggcgtacttttattctcgcctttggtgaaacgcagctgactgacgaacaatgtcagcaacttgatgcgctactgacacgtcgtcgcgatggtgaacccattgctcatttaaccggggggcgagaattctggtcgttgccgttatttgtttcgccagcgaccttaattccgcgcccggatacggagtgtctggtggagcaggcactggcgcggttgcctgaacaaccttgccgtattcttgatctcgggacgggtaccggggcgattgcgcttgcgctggctagcgagcgcccggactgcgaaattatcgctgtagatcgtatgcctgatgctgtctccctggcacaacgtaatgcccagcatctggcgatcaaaaatatccacattctgcaaagcgactggtttagcgcgctagccgggcagcagtttgcgatgattgtcagcaatccgccgtatattgacgagcaggacccacatcttcaacaaggcgatgtccgctttgagccgctcactgcgctggttgcggcagacagtggaatggcagacatcgtgcatatcatcgaacagtcgcgtaacgcgctggtatccggcggctttctgcttctggaacatggctggcagcagggcgaagcggtgcgacaagcatttatcctcgcggggtatcatgacgtcgaaacctgccgtgactatggtgataacgagcgcgtaacgctcggccgctattatcaatgacaagtttttctacactgcttagtgttcatcttattagtctcgcgctttctgttgggctattaaccttacgtttctggctacgttatcagaagcatccacaggcatttgctcgctggacgcgcattgtgccgccggttgtcgatacggtgttattgttaagcggcattgcgttgatggctaaagcgcacatcctgccattttccgggcaggcacagtggctgactgaaaagctgtttggagttatcatttatatcgttttgggttttattgcactcgattatcgtcgtatgcacagtcagcaggcgcgcattattgccttcccgctggcgttggtggtgctgtacatcatcattaaactcgccaccacaaaagtaccgttactggggtaagtcatgagatcgttagctgatttcgaatttaataaagcgccattgtgcgaaggcatgatcctggcttgcgaagcaatccgccgcgattttccctcgcaagatgtttacgacgaactggagcgtctcgttagtctggcgaaggaagaaatcagccagcttctgcctttagaagagcagctggaaaaactgatcgcgctgttttacggcgactggggatttaaagcctcacgcggcgtttatcgtctttccgatgcattatggctggaccaggtgttaaagaatcgacagggcagtgcggtatcattaggtgcggttttattatgggtcgcgaatcgtctcgatttgccgctgctgccggtgattttccctacgcagctgatattgcgcattgaatgtccggatggcgaaatttggctgattaatccttttaacggtgaatcgttaagcgaacatatgctggacgtatggttaaagggaaatatcagcccgtcggcggaactgttttatgaagaccttgatgaagctgataacattgaggtaatccgcaaattgctggatacactcaaagcctcgttgatggaagaaaatcagatggagctggcgttacgcaccagcgaagctttattacaattcaaccctgaagatccctatgaaattcgcgatcgcgggttgatttatgcgcaactggattgcgaacacgttgcgttgaacgatttaagttatttcgttgaacagtgtccggaagacccgatcagcgaaatgatccgtgcgcaaataaataacatcgcgcataaacatattgtgctgcattaattaatcgacattttactcaagattaaggcgatcctatgaaacaaaaagtggttagcattggcgacatcaacgtagcaaatgacctgccgttcgtactgtttggcggtatgaacgtgctggaatctcgcgatctggcgatgcgcatttgcgagcactacgtaactgtgacccagaaactgggtatcccttacgtgttcaaagcctcttttgacaaagccaaccgctcctccatccactcttatcgtggaccgggcctggaagaagggatgaaaatcttccaggagttgaagcagacttttggcgtgaaaattatcaccgacgttcacgaaccaagtcaggcacagcccgttgctgatgtcgtggatgtgattcagttgccggcgtttcttgctcgccagactgacctggttgaagccatggcgaaaaccggtgcggtaattaacgtcaagaaaccacagtttgtcagcccgggacagatgggtaatatcgttgataaattcaaagaaggcggcaacgaaaaagtgattctttgcgatcgtggtgctaacttcggctatgacaacctggttgtcgatatgctgggcttcagcattatgaagaaagtgtctggtaactcgccggtgattttcgacgtgacccacgcactgcaatgccgcgatccgtttggcgcagcttccggtggtcgtcgtgctcaggtggctgagctggcacgagccggtatggcggtaggtctggcggggctgtttattgaagcgcatccggatccggaacatgcgaaatgtgatggtccatccgcgctgccgctggctaaactggaaccgttcctcaagcagatgaaagcgattgatgatctggtgaaaggtttcgaagaactggataccagcaagtaatcttttttgcttgaaaaataaagtcttagcgttctgcgttaagacttttttcatgggtgccagatacaaaaaaggccgcaggctgttacccctgcggccggtttcgggcgcatattgccatcacggcagcctgacgcccgttttcaccttacttccggttacgccaccagccgacaatcgctgcggtaataattcccgccaggatcggtgctgccaggtcgtgccagaaaatcatggcaaactgcgcgagcgtcatatagccgccttgttgtaatgacaacattttgcggctattcttgaattgttctggttcaagattagcccccgttctgttgtcaggttaaacctctcaacgtgcgggggttttctctttccagcaaccaatgccaccagggataaagcccccgcaacattgcgcctcaccggataacgccggcttgatgtggatactacgtctcaattcatcttcacttcatccctgaaatgtttgcaatgaagagtgcattccggtttttcaacagctgttacagtcgtttcatgagggctctggatgatgcttccagctcgggttgccaatatttacttgtggaagagataaagacaaaaatggccgcaggctgttacccctgcggccggtttcgggcgcatattgccatcacggcagcctgacgcnnnnnnnnnnnnnnnnnnnnnnnnnnnnnnnnnnnnnnnnnnnnnnnnnnnnnnnnnnnnnnnnnnnnnnnnnnnnnnnnnnnnnnnnnnnnnnnnnngctctggatgatgcttccagctcgggttgccaatatttacttgtggaagagataaagacaaaaatggccgcaggctgttacccctgcggccggtttcgggcgcatattgccatcacggcagcctgacgcccgttttcaccttacttccggttacgccaccagccgacaatcgctgcggtaataatccccgccaggatcggtgctgccaggtcgtgccagaaaatcatggcaaacttcgcgagcgtcatatagccgccttgttgtaatgacaacattttgcggctattcttgaattgttgatggttcaagattagcccccgttctgttgtcaggttttacctctcaacgtgcgggggttttctctttccagcaaccaatgccaccagggataaagcccccgcaacattgcgcctcaccggataattccggcttggtgtggatactacgactcaattcatcttcacttcatccctgaaatgtttgcaatgaagagtgcattccggtttttcaacagctgttacagtcgtttcatgagtactctggatgatgcttccagctcgggttgccaatatttacttgtggaagagataaagacaaaaatggccgcaggctgttacccctgcggccggtttcgggcgcatattgccatcacggcagcctgacgcccgttttcaccttacttccggttacgccaccagctgacaatcgctgcggtaataatccccgccaggatcggtgctgccaggtcgtgccagaaagtcatggtaaactgcgcgagcgtcatatagccgccttgttgtaatgacaacattttgcggctattcttgaagtgtctggtttcaagattagcccccgttttgttgtcaggttttacctctcaacgtgcgggggttttctctttccagcaaccaatgccaccagggataaagcccccgcaacattgcgcctcaccggataattccggcttggtgtggatactacgtctcaattcatcttcacttcatccctgaaatgtttgcaataaagagtacattccggcttttcaacagctgttgcagtggtttcgtgcaggttgtggtacaggctcgcaattctgattaacgagctgtccaggtagtatgaagaaatacaataagcaggaatttatcttatctcccccgatttccgtcatcggaggagatataactgtcaggcaaatatcgtcatcaaataggcggcaaacagtgccagatgcgctgcgccattgagcacgttagtacgtccggtggagaaggagatatggcacagcactaaagaggccaccatcaccaccatttctggcgcaccaagtgcaaactgtaattcgttacccgtcataaaggcaattagcgtgacgacaggtacggtaagcgaaatggttgctaacactgaaccaaagaacagattcatcgcgcgctggacctggttgttcaacactgcttttaacgcacctaaaccttccggcgacagaatcaacagagccaccaggaagccagtaaaggcgacaggggcattcatgctgtcgagcaatgtctccagcgggctggcattcattttggtgactgcaataacggcaatcagatggataatcaaccagatagcatgccacacgctgctatgggcagacggtttaccgtgatgcgggtcgtcgtcatcactgtcatcttcgtgctcgtagacaaacaaactttgatgcgttttggtctggatcagcaaaaatacgccatacattgccgcagaaattaatgctaccagtaacgcctgaccggttgaaaaattcgccgcaggcagagccattggaaataccagtacgattatcgccagggggaacagcgcaattaaatactgcttgataccaaacagattcatatattgggtggcaaacttacgaccgcccaacaataatgaaaagccaaccagcccaccggtaacaatcataatgattgaatagagcgtatcacgcattagcgttggcgcggcgtcgccggttgccattaaagctgaaatcaaactgacttcaagaataaccactgaaaggctaagaataagcgaaccgtaaggttctcccaggcgatgggctaatacgtccgcatgacggacaacactaaaggcgctacttaaaataccaataagcgcaagaagattgatggcaatgaccactggtagtgtctggctgcttccccacaggaacagcactaccagcgccagaaccgggaaaataagcgaagtctccttgtggcgggtttttaccgcctcttgagcatttgacattatggttatccctttgcagatgaatttatcgaaaatgtaaaaaataggtagggaaaataacagaaagtgtctggatatcggtaacattttacgaatttttaccccgctgtcgattttttactcattggggcataaaaataagtattacgtttagacaatgtttgttttagcgtttcttaagaagagtctgacatgaaaattcttatgttttggcaagagtagatattgttgaccacacttaatgttcaactttgtaaaaggagtcaacgatgccgtataaaacgaaaagcgatctgccggaaagcgtaaagcacgttctaccgtctcatgcccaggatatctataaagaagcgttcaacagcgcatgggatcaatataaagataaagacgatcggcgtgatgacgccagtcgcgaagaaaccgcgcataaagtggcctgggctgctgtgaagcatgaatatgccaaaggggatgatgataaatggcataaaaaatcgtaaaaccggtagcttagttaaagctattcgtgcggtgttgccttgcaagtggtccgtggattgcatattgtcccgttagtggtttcaaaatgagcagtaaaaatgtccggaagacaccaaaaagttgtcgcagggaagtatgcagtggcggaggtgtaaggtgataacgcgtgatttcttgatgaatgccgattgtaaaacggcatttggtgccattgaagaatcactcttatggtcagcagaacaacgggcggcttcgctggcggcgacgctggcttgtcgacctgatgagggaccggtgtggatcttcggttatggatcgttgatgtggaatccggcactggagtttaccgagtcgtgcaccggtacactggttggatggcatcgcgcattttgcctgcgcctgaccgccgggcgcgggactgcgcaccagccgggacggatgcttgcactgaaagagggcggacgcaccacaggcgtcgcctatcgactgccagaagagacgctggagcaggaactaaccctattgtggaagcgcgagatgattaccggctgttatctgccaacctggtgtcagcttgatcttgatgatggacgcacagtaaacgccattgtgtttattatggacccgcgacatccagaatatgaatctgacactcgcgctcaggtcatcgcgccgttgattgcggcggcgagcggtccgctgggaaccaacgcacaatacctgttttcactggaacaggagcttatcaaactgggaatgcaggacgatgggctgaatgatttgctggtatcggtaaaaaaactgctggcggagaattatccggatggtgtgttacggccgggattcgcctgagtaaacttccctcatagtggggcgtcagacgccccctcaaacattaaaatgtgagcactttatcggctgacagcgtccattgcgccagttccacaagagtaccgatttccaccccatcaataagaggaagtgtgctaatcccgcgcccgtcggtacaggttttgcacaatttcaccggtacattctgagcggtaaggatctccagcatttgctgaatgttgtagccttcccctggtttttgcccgcgcaacccggctgtgaccgcatcagacatcaggaacagacgcagatccagattgctctcctgctctcgtaacgcaatggccagccgcaagctgttaaacaaggattcgctcccgtaaggtgcgccattggcaacgatcacgattttttgcattatttactcctgtattcagggaattagacattcatcttctatcttactgcttctgcagcgtctgaccaatcggtcacatttttaaggattttcctgaaagcgcgagaaaatacgacaaaagttgccagtaatcgttattctttaaggctatggtttttcattattaccggaagttaccgacgttttgagccgtttcgttcctcgcattatcccgttttatttactcttgcttgtagcaggcggtacagctaacgcacaatctaccttcgagcaaaaagcggcaaatccctttgataataacaatgatggtctgccggatttaggcatggctcccgaaaatcatgatggggaaaaacactttgctgaaattgtgaaagatttcggcgaaaccagtatgaatgataacgggctggatactggcgagcaggcaaaagctttcgcattgggaaaagtccgcgacgcgcttagtcaacaggttaatcagcacgtagagtcctggctatcaccgtggggaaatgccagtgttgacgtcaaagtggataacgaaggacatttcaccggcagtcgtggaagctggtttgtgccgttacaagataatgatcgttatctcacctggagccagcttggtcttactcagcaggatgatgggttggtgagcaatgtgggcgttgggcaacgctgggcgcgcggcaactggctggtgggttataacactttttatgacaacttgctggacgaaaatcttcagcgagcgggctttggtgccgaagcgtggggcgaatatttgcgactatcggcaaacttttatcagccgtttgctgcatggcatgaacagacagccacgcaggaacaacggatggcgcgcgggtatgacctgacagcccggatgcgcatgccgttctatcaacacctcaataccagtgtcagcgtagaacagtattttggtgatcgtgttgatttgtttaactctggtacgggttatcacaatcccgtcgcgttgagtctgggattaaattacacccctgtgccattagtcactgtgacggcccagcataaacagggtgaaagtggcgagaatcaaaataacctcgggctgaatcttaattaccgctttggtgtaccgctcaaaaaacaactttctgcgggcgaggttgccgaaagtcagtcgttacgtggtagtcgctatgacaatccgcagcgaaataatctaccgactcttgagtaccgacagcgaaaaacgttaacggtgtttctggcgacacctccgtgggatctaaaacctggcgaaacagtgccactgaaattacaaatccgcagtcgttacggtattcggcaactgatttggcagggcgatacgcagatattaagtttaacgccaggcgcacaagccaacagcgcggagggctggacgctgatcatgcctgactggcagaacggggaaagggcgagcaatcactggcgattgtctgtggtggtggaagataaccaggggcagcgtgtctcctccaatgagatcacgctaacgcttgtcgaaccgttcgatgcattgtcaaacgacgaactgcgctgggaaccgtaatcagaaaatgcgctcctgatgcacccataccgctgcttccacgcgagacttgagcttcattttcttcagcatgtgcttgacgtgcacttttactgtgctttcggtgatgtccaggcggcgggcaatcatcttgttcggcaaaccctgggcaatcagcttgagaatatcgcgctcgcgtggggttaactggttaacatcgcgctcagtagtggcacggttagcacgcaagctggcggccagaacaggcgttaatgcttcgcttaataccatttcgccagcagctgcctgatgcaatgctttcagcagatcttccggttccatatcttttaacagatagccatccgcgccgcgtttcagtgcggtgaccacatcttcttcatggttagagacgctgaataccacaatgcgccctgagagggacttttcgcgcagtttatccagcgtttccagaccgttcatgccgggcatattgagatctaacaggatcagatcgggatcaagagactccgccagttcaataccctgttcgccattactcgcttcgccaaccacggtgatatctggtgccatactgataagctgttttacgccagttcgcagcatcgggtgatcgtcaatcagcaggatagtagccggttcctgattactcatgggtatctccttggacgtctgtgaaagttttttcgggaataaaggtgaccaccacttcggtgccacctgattcacgacggcggacgcggcaatcgcctcgtaaactttgcgcacggtcacgcattattatcatgccgtagtgattgctgcggatggcattttcaggcacgccgcagccgttatcctggacggtcagtttgacctgattatcgttttgcgccaccgtcaccacgacctcactcgcttgcgaatgtttgagggcgttacttaatgcctcacgggcaatttgcaacaagtggattgcctgatgcgaaggcaccagacgaggcggcaattgataatccagcttcaccgggaagccaaatttggcgctgtactcttcgcaactcgcctccagcgccggacgtaatccaggctcggtgagctgcaagcggaatgtggtgagcaattcacgcaactgcgcccaggatgcattcagttcgttacggatctgacttaacagttcgcggctgctttctggcagcgcatcgccctgcatctgtaaacaactcacctgcatcttcatacaagagagagattgggcaatagaatcatgcagttcgcgcgcaatggtggcacgctcttccatcacgatcaactgttgctgacgttcctgatggcgatccagcgccagcgtggcggtgagttgttcaaccagggtatccaccagttgttgttgatcatggctaagatgacgcccctgcggcagggtcgccagcaaaataccgtactgcgtatgagagtcagccagccgccacttcagggttgtgccgcgatcgccaacgggtaatacgccgcgcgggcagagctggcagcctttatcatcacaagtcatatctggctggcaggtaaactcctgatgattctcttcatcatcagtatcataaacccgcagttcgatatcacgtagcagggttaaattctgtaagccgttgagtaccggtgacaggcgttcacacagcggggcgcgggaatgcaaacggcggttagcctgccataaaaatgagaggatctgatttttatgctccagcccggcggttttctcctgaacccgctgctcaagtacggcataactttcggccagttctgcagacatattgttcaacgcagttccaagcatcgccatttcgttgcgcccgctgatgtttgcgcgttgggtaaaatcgcgatggctgacggcactcgccattgccagcagttgccgccacggttgtagcagtcgcgcccgcaaccagataatagtgaacaccagtaaaagtgccataaataccgccattacccgatggaccagtaccactgtctcgatgcgcatttccgtggtgcggtcaaaaccagataccagctgatcaagcccggcaacaaactggctgacatccgctgacaccgtttctcggttttgtgcacgcatcaacgcagggatcagttcattacgccagtaatcttgtaaaccctgtaattgcgccagttgtccgtctcgttctgctgctcgagtcaactcggcgctaaatgccgtttgttccatctctttaattaagggcttgtctttctcgcttaatggcactgctgccaacagacggtaactttgcatgcgcagcgatcccgctttgttgatcgcatgggcgctgccctgaacgccttgcaccagccagccagaaaccgccatccctgccagtccaatagcagtagaaagcaacacaataagcgcaacctgattaaccagggtgagcggagagagacaacgtttaagcatgtaaacctcttccttcaggctttaaatgagcaataaccttaatgaatgtgacgatacattctggaatggcagtattctcggctattggctgaagtatacccatacctggaaagagttactccttatttgccgtgtggttagtcgctttacatcggtaagggtagggattctacagcaccgtgaaaaatctcataatttttatgaaatcactgtactcactatgggtaatgataaatatcaatgatagataaagttatcttatcgtttgatttacatcaaattgcctttagctacagacactaaggtggcagacatcgaaacgagtatcagaggtgtctatgagtcactcatccgcccccgaaagggctactggagctgtcattacagattggcgaccggaagatcctgcgttctggcaacaacgcggtcaacgtattgccagccgcaacctgtggatttccgttccctgtctgctgctggcgttttgcgtatggatgttgttcagcgctgttgcggtgaacctaccgaaagtcggctttaattttacgaccgatcagctatttatgttgactgcgctgccttcggtttctggcgcgttattacgtgttccatactcctttatggttcctatcttcggtggtcgtcgctggacggcgttcagcaccggtattctgattattccttgcgtctggctggggtttgccgtgcaggatacctccacgccttatagcgtcttcatcatcatctctctgctatgcggctttgctggcgcgaacttcgcctccagtatggcaaacatcagcttcttctttccgaaacagaagcagggtggcgcgctgggtctgaatggtggtctgggcaacatgggcgtcagcgtcatgcagttggttgctccgctggtggtatcactgtcgattttcgcagtatttggtagccagggcgtcaaacagccggatgggactgagctgtatctggcgaatgcgtcctggatatgggtgccgttccttgccatcttcactattgcggcgtggtttggcatgaacgatcttgctacctcgaaagcctccatcaaggagcagttgccggtactcaaacggggtcatctgtggattatgagcctgctgtatctggcaaccttcggctccttcatcggcttctccgcgggctttgcaatgctgtcaaaaacgcagttcccggatgttcagattctgcaatacgctttcttcgggccgtttattggtgcgctggcgcgttctgcaggtggtgcattatctgaccgtctgggcggaactcgtgtcacgctggtgaactttattctgatggcgattttcagcggcctgctgttcctgaccttacctactgacgggcagggcggaagcttcatggcgttcttcgcggtcttcctggcgctgttcctgacagctgggctgggtagtggttccactttccagatgatttcagtgatcttccgtaaactgacaatggatcgcgtgaaagcagaagggggttctgacgaacgtgcgatgcgtgaagcggcaaccgacacggcggcggcgttgggtttcatctctgcgattggcgcgataggtggcttctttatcccgaaagcgttcggtagctcgctggcattaacgggttcgccagttggcgcaatgaaagtatttttgattttctatatcgcctgcgtagtgattacctgggcggtatatggtcggcattctaaaaaataaaccgttactcgtcatacttcgggttacatgtgctgcggctgcgttcattcaccccagtcacttactttagtaagctcctgggattcattcacttgccgccttcctgtaaaccgaattatatagagtaaaatatttgattatcctttgcgcggcatgatgtcgcgctttttttatgcgttatttagttacaacatactaatgttatatggcttattcgccggatttcattaagagccattaatatgttacccatggggaatactccttaatacccatctgcataaaaatcttcatgctttaaataactacaggtataaaacgtcttaatttacagcatgttatgctttaactgttaattatcctaaaggggtatcttaggaatttactttatttttcatccccatcacacttgatcgttatcaattcccacgctgtttcagagcgttaccttgcccttaaacattagcaatgtcgatttatcagagggccgacaggctcccacaggagaaaaccgatgagtaaattcctggaccggtttcgctacttcaaacagaagggtgaaacctttgccgatgggcatggccagcttctcaataccaaccgtgactgggaggatggatatcgccagcgttggcagcatgacaaaatcgtccgctctacccacggggtaaactgcaccggctcctgcagctggaaaatctacgtcaaaaacggtctggtcacctgggaaacccagcagactgactatccgcgtacccgtccggatctgccaaaccatgaacctcgcggctgcccgcgcggtgccagctactcctggtatctttacagtgccaaccgcctgaaatacccgatgatgcgcaaacgcctgatgaaaatgtggcgtgaagcgaaggcgctgcatagcgatccggttgaggcatgggcttctatcattgaagacgccgataaagcgaaaagctttaagcaggcgcgtggacgcggtggatttgttcgttcttcctggcaggaggtgaacgaactgatcgccgcatctaacgtttacaccatcaaaaactacggcccggaccgtgttgctggtttctcgccaattccggcaatgtcgatggtttcttacgcatcgggtgcacgctatctctcgctgattggcggtacttgcttaagcttctacgactggtactgcgacttgcctcctgcgtctccgcaaacctggggcgagcaaactgacgtaccggaatctgctgactggtacaactccagctacatcatcgcctgggggtcaaacgtgccgcagacgcgtaccccggatgctcacttctttactgaagtgcgttacaaagggaccaaaactgttgccgtcacaccagactacgctgaaatcgccaaactgtgcgatctgtggctggcaccgaaacagggcaccgatgcggcaatggcgctggcgatgggccacgtaatgctgcgtgaattccacctcgacaacccaagccagtatttcaccgactatgtgcgtcgctacaccgacatgccgatgctggtgatgctggaagaacgcgacggttactacgctgcaggtcgtatgctgcgcgctgctgatctggttgatgcgctgggccaggaaaacaatccggaatggaaaactgtcgcctttaataccaatggcgaaatggttgcgccgaacggttctattggcttccgctggggcgagaagggcaaatggaatcttgagcagcgcgacggcaaaactggcgaagaaaccgagctgcaactgagcctgctgggtagccaggatgagatcgctgaggtaggcttcccgtactttggtggcgacggcacggaacacttcaacaaagtggaactggaaaacgtgctgctgcacaaactgccggtgaaacgcctgcaactggctgatggcagcaccgccctggtgaccaccgtttatgatctgacgctggcaaactacggtctggaacgtggcctgaacgacgttaactgtgcaaccagctatgacgatgtgaaagcttataccccggcctgggccgagcagattaccggcgtttctcgcagccagattattcgcatcgcccgtgaatttgccgataacgctgataaaacgcacggtcgttcgatgattatcgtcggtgcggggctgaaccactggtatcacctcgatatgaactatcgtggtctgatcaacatgctgattttctgcggctgtgtcggtcagagcgggggcggctgggcgcactatgtaggtcaggaaaaactgcgtccgcaaaccggctggcagccgctggcgtttgcccttgactggcagcgtccggcgcgtcacatgaacagcacttcttatttctataaccactccagccagtggcgttatgaaaccgtcacggcggaagagttgctgtcaccgatggcggacaaatcccgctataccggacacttgatcgactttaacgtccgtgcggaacgcatgggctggctgccgtctgcaccgcagttaggcactaacccgctgactatcgctggcgaagcggaaaaagccgggatgaatccggtggactatacggtgaaatccctgaaagagggttccatccgttttgcggcagaacaaccagaaaacggtaaaaaccacccgcgcaacctgttcatctggcgttctaacctgctcggttcttccggtaaaggtcatgagtttatgctcaagtacctgctggggacggagcacggtatccagggtaaagatctggggcaacagggcggcgtgaagccggaagaagtggactggcaggacaatggtctggaaggcaagctggatctggtggtgacgctggacttccgtctgtcgagcacctgtctctattccgacatcattttgccgacggcgacctggtacgaaaaagacgacatgaatacttcggatatgcatccgtttattcacccgctgtctgcggcggtcgatccggcctgggaagcgaaaagcgactgggaaatctacaaagccatcgcgaagaaattctccgaagtgtgcgtcggccatctgggtaaagaaaccgacatcgtcacgctgcctatccagcatgactctgccgctgaactggcgcagccgctggatgtgaaagactggaaaaaaggcgagtgcgacctgatcccaggtaaaaccgcgccacacattatggtcgtagagcgtgattatccggcgacttacgaacgctttacctctatcggcccgctgatggagaaaatcggtaatggcggtaaagggattgcctggaacacccagagcgagatggatctgctgcgtaagctcaactacaccaaagcggaaggtccggcgaaaggccagccgatgctgaacaccgcaattgatgcggcagagatgatcctgacactggcaccggaaaccaacggtcaggtagccgtgaaagcctgggctgccctgagcgaatttaccggtcgtgaccatacgcatctggcgctgaataaagaagacgagaagatccgcttccgcgatattcaggcacagccgcgcaaaattatctccagcccgacctggtctggtctggaagatgaacacgtttcttacaacgccggttacaccaacgttcacgagctgatcccatggcgtacgctctctggtcgtcagcaactgtatcaggatcaccagtggatgcgtgatttcggtgaaagcctgctggtttatcgtccgccgatcgacacccgttcggtgaaagaagtgataggccagaaatccaacggcaacccggaaaaagcgctcaacttcctgacgccgcaccagaagtggggtatccactccacctacagcgacaacctgctgatgctgactttaggtcgcggtggtccggtggtctggttgagtgaagccgatgccaaagatctgggtatcgccgataacgactggattgaagtattcaacagcaacggtgctctgactgcccgtgcggttgtcagccagcgtgttccggcagggatgaccatgatgtaccacgcgcaggaacgtatcgttaacctgcctggttcggaaattacccaacagcgtggtggtatccataactcggtcacccgtatcacgccgaaaccgacgcatatgatcggcggctatgcccatctggcatacggctttaactactacggcaccgtaggttctaaccgcgatgagtttgttgtagtgcgtaagatgaagaacattgactggttagatggcgaaggcaatgaccaggtacaggagagcgtaaaatgaaaattcgttcacaagtcggcatggtgctgaatctcgataagtgcatcggctgccacacctgttcagttacctgtaaaaacgtctggaccagccgtgaaggcgtggaatacgcgtggttcaacaacgtggaaaccaagccgggtcagggcttcccgactgactgggaaaaccaggaaaaatacaaaggcggctggatccgtaaaatcaacggcaaactgcagccgcgcatgggtaaccgtgccatgttgctgggtaaaatcttcgctaacccgcatctgccggggatcgacgattattacgagccgttcgattttgactatcagaacctgcataccgcgccggaaggcagcaaatcgcagccgattgcccgtccgcgttcgctgattaccggggaacggatggcgaaaatcgaaaaagggccgaactgggaagatgacctgggcggtgagtttgacaaactggcgaaagacaagaacttcgacaacatccagaaggcgatgtatagccagttcgaaaacaccttcatgatgtatttgccgcgcctgtgcgaacactgcctgaacccggcatgtgtggcgacctgcccgagcggtgcgatttacaagcgtgaagaagatggcatcgtcctgatcgaccaggataaatgccgtggctggcgtatgtgcatcaccggatgcccgtacaaaaaaatctacttcaactggaagagcggtaagtctgagaagtgcatcttctgctatccgcgtattgaagcgggtcagccgaccgtgtgctcagaaacctgtgtcggtcgtatccgttatcttggcgtgctgctgtacgatgccgacgcgattgaacgtgcagccagcaccgagaacgagaaagatctttaccagcgtcagctggaggtgttcctcgatccgaacgatccgaaagtcatcgagcaggcgattaaagacggtattccgctgagcgttattgaagccgcacagcagtcgccggtttataaaatggcaatggaatggaaactggcgctgccgctgcatccagaatatcgcacactgccgatggtctggtacgtgccgcctctgtctccgattcagtctgcagcagacgcgggtgagctgggtagcaacggcattctgccagacgtcgaaagcttgcgtattccggtacagtatctggcgaatctgctgaccgccggtgataccaaaccggtactgcgcgcactgaaacgtatgctggcgatgcgtcattacaaacgtgctgaaaccgttgacggtaaagttgatacccgtgcgctggaagaggtcggtctgaccgaagcccaggcacaggagatgtaccgttatctggcgattgctaactacgaagatcgctttgtggtgccgagtagtcatcgtgaactggcacgggaagccttcccggagaaaaatggctgcggctttacctttggtgatggctgccacggttcagataccaaattcaatctgttcaacagccgtcgtatcgatgccatcgatgtgaccagcaaaacggagccgcatccatgatcgaactcgtgattgtatcgcgtctccttgaatatccggatgctgccttatggcagcatcaacaagagatgtttgaggcgattgctgcgtcgaaaaatctgtcgaaagaagatgcccatgcgctgggcattttcctgcgcgatttaacggcgatggatccgctcgatgcccaggcccagtacagcgaactgttcgaccgtggccgcgccacgtcactgttgctatttgaacatgttcacggtgaatcccgtgaccgcggccaggcgatggtggacctgctggcgcagtacgagcagcacggcttgcagttaaacagccgcgaattaccggaccatctgccgctgtatctggagtacctgtcgcagctgccgcaaagcgaagccgtggaaggtttgaaagatatcgcgccgattctggcattgctgagcgcacgtctgcaacagcgtgaaagccgttatgccgtgatgtttgatctgctgctgaaattggccaataccgctatcgacagcgacaaagtggcggaaaaaattgccgacgaagcgcgcgatgatacgccgcaggcgctggatgctgtctgggaagaagagcaggttaaattctttgctgacaaaggctgcggtgattcagcaatcactgctcatcagcgtcgctttgccggtgccgtcgcgccgcaatatctgaatatcaccaccggaggacagcactaatgcaattcctgaatatgttcttctttgatatctacccgtacatagccggggcggtcttcctgattggtagctggctgcgttatgactacgggcagtacacctggcgcgcggcgtccagccagatgctggatcgcaaagggatgaacctggcgtcgaacctgttccatatcggtattctggggatttttgttggtcacttcttcggtatgctgacgccgcactggatgtatgaagcctggctgccgattgaagtgaaacagaaaatggcgatgtttgctggtggtgccagcggcgtgctgtgtctgattggcggcgtgctgttgctgaagcgtcgtctgttcagcccacgcgtgcgtgcaaccactaccggagcggatatcctgatcctgtcgctgctcgttatccagtgcgcgctgggcctgttgaccattccgttctccgctcagcatatggacggtagcgagatgatgaaactggttggctgggcgcagtcggtggtgaccttccacggtggcgcttctcaacacctcgatggtgtggcgtttatcttccgtctgcacctggtgctggggatgacgttattcctgctgttcccgttctcgcgtctggtacacatctggagcgtaccggtggagtatctgacacgtaagtaccagctggtgcgcgctcgtcactaagcgaattttagttcacatagaccctgcttcggcggggtttttttatgggcacggtgcggggtgagttgtcggatgcgcttcgcttatccgacctacaggggaggatattgtaggcccggtaaacgtggtgccatcgggcaaaattagctcggagtaacaggttttgattatttaaggaagcgatggtggtgggggaaggattactcagcgctgcgcgcttcgcccttcgggtcgttgcctgcggcaacgctctctcgctggcgctcaagtcgaaccttggtcgaagcttctcatccttccccgcttgggcagaatatttaattgcggattcgtttgagagtttacggacttttgaaagtgatggtggtgggggaaggattactcagcgctgcgcgcttcgcccttcgggtcgttgcctgcggcaacgctctctcgctgacgctcgagccgaaccttagtcgaagcttctcatccttccccgcatgggcagaatatttgattgcggattcgcttgagagttcagggacttttgaaagtgatggtggtgggggaaggattcgaaccttcgaagtcgatgacggcagatttacagtctgctccctttggccgctcgggaaccccaccaggggtaattcatattgtaggtaatgcttgagatggtggtgggggaaggattcgaaccttcgaagtcgatgacggcagatttacagtctgctccctttggccgctcgggaaccccaccacggggtaatgctttttactggcctgctcccttatcgggaagcggggcgcatcatatcaaatgacgcgccgctgtaaagtgttacgttgagaaaaatgaactggttgcgtaattttcatccgtaacggattaaaggtaaccagttatttttgctggcgattaaagaataatcgtccgattaccgtaaacaaagacgcgctgtgccagtactttgtatagcgcacgacttaagacgtttttctcgacgtcacgacctgcgcgcatcatatcttcagctgtgtaggtatgatcgacatgaataacgtcctgcatgatgattgggccttcgtccagattgtcattcacatagtgagcggttgcgccaataatcttcacaccacgttcataggcctggtgataaggacgtgcgccgataaacgcaggcaggaatgaatggtgaatattgatgattttattcgggaagcgtgccacaaattccggcgttaatacccgcatatacttcgccagcaccacatagtcaggttgataagcatcaatggcgtccgccatcttttgatcgtgctcgttgcggcttaacccttcatggcttaccagctcaaacggaatatcaaaacgctcaaccagagaacgtaaagtatcgtggttaccaataactgccgcgatttcgacatccaggccgccgtaattggctttcatcaacaaatcgccaaggcaatgcgcttctttagtgaccagaatcactatccggcgacgaccggcaggattcagctcacgcacggagccttctggcaatgcgctatcgagatccgccagaagggtggaatcattaaaaatcccttccagttccgtgcgcataaaaaagcgcccggtacggtgatcaacaaattcattgttctgcacgatatttaactcgtgcttgtagcaaatattggtaatacgtgcgatcagacctttttggtccggacaaatagtacgcagaactttacgttggagtgaatgcattgctggaaaaaccttgttgagagtgtttgctaaaccgtaccgtcaaccattattggccgcagcactttttaaattttttacctgaaccacaagggcagggatcgttgcggccaaactgcggacgtgtaccgtcaatatagtaccattgaccgttttctttcaaaaatcgcgaacgttcaattattgcacctgttttgccaccttcggtaaatcgagcaacaaaactgacaaatccgatattgtcggcgtcctgccaacaatgttcaaatacggtcaatcccaaccattcagtatgcgcaaatccggcaatcaattcggcacgtaacgccgctgctccacaagatggatgccaggtctttattaaataatctgcgtcttgcatcacaaaagcgcagtaacgcgaacgcatgagatgttctggatcaggtgcaaccttttcaccagacacataagggtggcaacataggctatactcgacagcactaccacagggacaaagctgagacacaaataatctccctggaaacaataacggcgtattaaccgcctgagtagcactatgttaaccgagcagtagcgatgtggctacgattgcattccaggggaatcttgcgggaataatgagaaagataaaaatagggctggcgctgggatctggcgcggcgagaggttggtcgcatattggcgttattaatgcgctaaaaaaagtgggtattgaaattgatatcgttgcaggatgttcaattggttcgctggtgggcgcggcctatgcatgcgatcgattatctgcgctggaagattgggtaacctctttcagttattgggatgttttacgcctgatggatctctcctggcagcgcggtgggttactgcgcggcgagcgtgtcttcaatcaataccgcgagataatgccggaaacagagatcgaaaattgttcccgtcgcttcgcggctgttgccaccaatttaagtactgggcgtgaattatggtttactgaaggcgatctccatcttgctattcgcgcgtcatgcagtattccaggactcatggcaccagtcgcgcataacggctactggctggttgatggggcagtcgttaacccaattcctatttcgctcacgcgtgcattgggtgctgatattgtgatagcggtcgacctgcagcacgatgctcatttaatgcaacaagatttgctctcctttaatgtcagtgaagaaaatagcgagaatggtgattctctgccgtggcatgcgcgtctgaaagaaaggttaggcagcataacgacacgtcgggcggtgacagcaccaacggcaacagagattatgaccacttctatccaggtgctggagaaccgccttaaaaggaaccgcatggcaggtgatccgcccgatattctgattcaacctgtttgcccgcaaatatctacgcttgatttccatcgcgcgcacgctgccattgcggccggacagctggcagtggaaaggaaaatggacgaacttttgccgttggtacgcaccaacatttgaccagaatttttatctacacttaagttaattctgacaggcgcaggtggcaatagcatgccactattgagtaaagccagtcaggggagagaacatgacgcagccattggtcggaaaacagattctcattgttgaagatgagcaggtatttcgctcgcttctggattcatggttttcctcattgggagcgacaacggtactggcggctgatggggtggatgcccttgagttgctgggaggtttcactccagacctgatgatatgtgatatcgcgatgccacgaatgaacgggcttaaactgctggagcatatacgtaacagaggcgaccagaccccggttctggtgatatctgccactgaaaatatggcagatattgccaaagcgttacgtctgggcgttgaagatgttttgctgaaaccagttaaagatctgaatcgcttgcgcgagatggtttttgcctgtctctatcccagcatgtttaattcgcgcgttgaggaagaggaaaggctttttcgcgactgggatgcaatggttgataaccctgccgcagcggcgaaattattacaggaactacaaccgccggttcagcaggtgatttcccattgccgggttaattatcgtcaattggttgccgcggacaaacccggcctggtgcttgatattgccgcactttcggaaaacgatctggcattttattgccttgatgtcacccgagctggacataatggcgtacttgctgccttgttattacgcgcattgtttaacggattattacaggaacagcttgcacaccaaaatcaacggttgccagagttgggcgcgttattgaagcaggtaaaccatttactccgtcaggccaatctgccggggcagtttccgctattagttggctattatcatcgcgaactgaaaaatctcattctggtttctgcgggtctgaatgcgacgttaaataccggcgaacaccaggtgcaaatcagtaatggtgttccgttaggcactttaggtaacgcttatttgaatcaattgagccagcgatgcgatgcctggcaatgccaaatatggggaaccggtggtcgactgcgcttgatgttgtctgcagaatgagcaaacgataacgcgggctaaatttgcattacctgctaatgtcggctggtggtactatcgtcgccattcgtataagtaattgtcttaattatgctaactcgcctccttttcagaacttagccccttcggggtgctgatatactgggatgcgatacagaaatatgaacacgttcaaaacacgaacagtccaggagaatttaaatggctgccattaatacgaaagtcaaaaaagccgttatccccgttgcgggattaggaaccaggatgttgccggcgacgaaagccatcccgaaagagatgctgccacttgtcgataagccattaattcaatacgtcgtgaatgaatgtattgcggctggcattactgaaattgtgctggttacacactcatctaaaaactctattgaaaaccactttgataccagttttgaactggaagcaatgctggaaaaacgtgtaaaacgtcaactgcttgatgaagtgcagtctatttgtccaccgcacgtgactattatgcaagttcgtcagggtctggcgaaaggcctgggacacgcggtattgtgtgctcacccggtagtgggtgatgaaccggtagctgttattttgcctgatgttattctggatgaatatgaatccgatttgtcacaggataacctggcagagatgatccgccgctttgatgaaacgggtcatagccagatcatggttgaaccggttgctgatgtgaccgcatatggcgttgtggattgcaaaggcgttgaattagcgcctggtgaaagcgtaccgatggttggtgtggtagaaaaaccgaaagcggatgttgcgccgtctaatctcgctattgtgggtcgttacgtacttagcgcggatatttggccgttgctggcaaaaacccctccgggagctggtgatgaaattcagctcaccgacgcaattgatatgctgatcgaaaaagaaacggtggaagcctatcatatgaaagggaagagccatgactgcggtaataaattaggttacatgcaggccttcgttgaatacggtattcgtcataacacccttggcacggaatttaaagcctggcttgaagaagagatgggcattaagaagtaacatccgtatcggtgttatccacgaaacggcgttgagcaatcgacgccgtttttttatagcttattcttattaaattgtcttaaaccggacaataaaaaatcccgccgctggcgggattttaagcaagtgcaatctacaaaagattattgcttgatcaggaaatcgtcgagggatttaccttgctcatccattgcttttttgattacagctggagtacggccttggccagtccaggttttagtttcgccgttttcgtcaacgtagctatattttgccggacgctgagcacgtttagctttggtgccagatttaacggcagcaaggctattcagcagttcgttcgggtcaataccgtcagcgatcagcatttcgcgatattgctgcagcttacgagtgcgctcttcaacttcagcagcagccgcgctttcttcttcgcgacgttcgttaacaacaacttctaatttttccagcatttcttccagcgtttcaagtgtacattctcttgcctgcgcacgaagagtacggatgttgttcagaattttaagtgcttcgctcattgtagtaatctcaaacttatattggggtggtttgttgaggtaataatagagccttaaattcagttgtgcaatagccaggaatgtaaggaattcaaaattgttctttattttgtgccgccaataaatatcttttcataaaattagccagaaaagacgcggcatatagccctatttacaccgatgatttcgcagcacgtgaggttaaaacttcctgattcatgtcacattttatggggagattatcgtaggctgacgacctttcagtcttctgtattagttgtgtttacgagaattccctattaagcgaatgatgaaaagtagaacagtcgcaataagagcatggacttagtattgcactatctcctggaggtcaacagagggctattacttgcgcaacaggttaaagattgtgaatagttaccagcagtcatttacccgcttataacaagcgaggcagttgtaatgatagctcagaaggattatgcaaggcttcgtaagggagaacgcatatacccacttctgtgcatactgttgagctgaaaaactgacgaattatgataaactccagccaactttatttcatatcattgagggcctgtggctgatggcacagctatatttctactattccgcaatgaatgcgggtaagtctacagcattgttgcaatcttcatacaattaccaggaacgcggcatgcgcactgtcgtatatacggcagaaattgatgatcgctttggtgccgggaaagtcagttcgcgtataggtttgtcatcgcctgcaaaattatttaaccaaaattcatcattatttgatgagattcgtgcggaacatgaacagcaggcaattcattgcgtactggttgatgaatgccagtttttaaccagacaacaagtatatgaattatcggaggttgtcgatcaactcgatatacccgtactttgttatggtttacgtaccgattttcgaggtgaattatttattggcagccaatacttactggcatggtccgacaaactggttgaattaaaaaccatctgtttttgtggccgtaaagcaagcatggtgctgcgtcttgatcaagcaggcagaccttataacgaaggtgagcaggtggtaattggtggtaatgaacgatacgtttctgtatgccgtaaacactataaagaggcgttacaagtcggctcattaacggctattcaggaaaggcatcgccacgattaataagaatttctttactgacagggtgagcagggcacttttatcctgtcagttcgttttacgcacttcttccgggctatacacccttctcggcagttttttaacgccgctatacgcctcacagggctcttaagcaccgacgttgacttgtgacctgtaaagtacaatatccctgtgtttaggcgttatacatcgtcgcaaatatgatgaaggctaatgctgtcggtttatggaaaagttgctttgggtaaacaaaaaatacggccccagaagggcaatgccgttcacttaagaggagcggcactatgtttcacaggataacgggtttttgatatcttaaccgacctcggccttgatggtcgggggcgttttgttatgaacaccacttccagagcaccccgaagatgctccagtcgtttcgggatggtccctggtgacgccgtgtttcccagctctatcatttctgatgcgatattcttccacgcaggcagtagccagtggcggttacaacccttctggttcagcgtcagcagcaggtcttcgctgtaaaaaagtttatcaaacaacgtaatagagttatccgggatggtggcgagcatggagtgggccagcacagtttcgctctgccggtaaggtgcggtcacggcattcagcagaatgtgacttcccaggttcattaaggccaccagacgcataaccgggtaggcgttctgccgcttagtggatgtgttggcagacccataatattcacgcagctcgggtttatcaggtgtcctgaactgtgcgccatcaatggcaaaaagttgcaggccgtgccagtcatccttcaggtaacgttccgcgcccctgtctgtgcggtctggcggaagagccattccactggggcggcccccacgcgctgacgcgcctgggtgacagcgctgcgggccagcaggttcatccccgcttcgccatccgcgctcaggttcagacggcgaacaacatcggtaattggctcattgcaccaccatccagataaccatgtcccccggtaaacgacggcggcgaacggtcgcatgagcagaaagcgtcaggcagtgttgtatccactcggtgggaaggtgttctgcaaatagttgtgcagagggcggaggcataagcggatggtcactgaaatcgagcagatcattgagaagtggcataagaaaacggctccctgttgtggaagccgttatagtgcctcagtttaaggatcggtcaactaatccttaactgatcggcattgcccagaaggggccgtttatgttgccagacagcgctactgattaagcggattttttcgcttttttctcagctttagccggagcagcttctttcttcgctgcagtttcaccttctacataatcacgaccgtagtaggtatccagcagaatctgtttcagctcggagatcagcgggtaacgcgggttagcgccggtgcactggtcatcgaatgcatcttcagacagtttatccacgttcgccaggaagtctgcttcctgaacgccagcttcacggatagatttcggaatacccagttcagccttcagcgtttccagccatgccagcagtttctcgatcttagcagcagtacggtcgcccggtgcgctcagacccaagtggtcggcaatttcagcataacgacggcgagcctgcggacggtcatactggctgaatgcagtctgcttggtcgggttgtcgttcgcattgtagcgaataacgttacaaatcagcagggcgtttgccagaccgtgcggaatatggaactgggaacccagtttgtgcgccattgagtgacatacacccaggaaggcgttcgcaaacgcgatacccgcgatagtcgctgcactgtgaacacgttcacgcgctaccggatttttagacccttcgtggtaggacgctggcagatattctttcagcagtttcagtgcctgcagagcctgaccatcagagaactcagatgccagtacagaaacataagcttccatggcgtgagttactgcgtccagaccaccgaaagcacacagggacttcggcatgtccataaccaggttggcgtcgacaatcgccatatccggagtcagcgcatagtctgccagcggatatttctgaccagtagcgtcgtcagttacaaccgcaaacggagtgacttcagaacctgtaccagaagtggtggtgacagcgatcattttcgctttcacgcccattttcgggaacttgtagatacgtttacggatatccataaagcgcagcgccagctcttcgaagtgagtttccggatgttcgtacataacccacatgatcttcgcggcgtccatcggggaaccaccacccagcgcgataatcacgtctggtttgaaggagtttgccagttctgcacctttacgaacgatgctcagcgtcgggtccgcttctacttcgaagaagacttcagtttcaacgcctgctgctttcagtacggaagtgatctgatcagcataaccattgttgaacaggaagcggtcagtcacgatgagcgcacgtttgtggccatcagtaatcacttcatccagcgcgattggcagggagccacggcggaagtagatagatttcggaagtttgtgccacaacatgttttcagctcgcttagcaacggttttcttgttgatcaggtgtttcggaccaacgttttcagagatggagttaccaccccaagaaccacaacccagagtcagggaaggtgcgagtttgaagttatacaggtcaccgataccaccctgagacgctggggtgttaatcaggatacgagccgttttcattttctgaccgaagtaagaaacgcgagccggttggttatcctggtcagtgtacaggcaagaggtatgaccgataccgcccatagcaaccagtttctctgctttttctaccgcgtcttcgaaatctttagcgcggtacattgccagagtcggggacagtttttcatgtgcgaacggttcgctttcatcaacaacggtcacttcaccgatcagaatcttggtgttttctggtacagagaagcctgccagttcagcaattttataggctggctgaccaacgatagccgcgttcagcgcaccgtttttcaggataacatcctgaacagctttcagctctttaccctgcaacagatagccgccgtgggttgcaaaacgttcacgtacagcgtcataaacagagtcaacaacaacaacagactgttcagaagcacagattacgccgttgtcgaaggttttggacatcagtacagatgcaactgcacgtttgatatcagcagtttcatcgataacaactggagtgttgcccgcgcctacaccgatagctggtttaccggagctgtatgcggctttaaccatgcccggaccaccagtcgcgaggatcaggttgatgtctgggtggtgcatcagtgcgttagacagttcaacagaaggttgatcgatccagccgatcagatctttcggagcaccggcagcgatagcagcctgcagaacgatatcagccgctttgttggtggcatcttttgcacgcgggtgcggggagaagataatggcgttacgggtcttcagactgatcagcgatttgaagatagcagttgaagtcgggttagtggtcggaacgataccgcaaataataccgattggttcagcgatagtgatggtaccaaaagtgtcgtcttcagacagaacaccacaggttttttcatctttataggcgttgtagatatattcagaagcaaagtggtttttgatcactttatcttcgacgatacccatgccggattcggcaacggccattttcgcgagtgggattcgagcatctgcagcagccagagcggcggcgcggaagattttgtctacttgctcttgagtgaaactggcatattcacgctgggctttttttacacgctctacgagtgcgttaagttcagcgacattagtaacagccataatgctctcctgataatgttaaacttttttagtaaatcatctgctcgaatacgagagtatagtcagtgcggtgatgatttgcttaacctatgaaaatcaaaagcttactcgcgctcacactcactgtgatttactaaaagagtttaaacattagagttattatctctaatgcgtcacttccaggtggcgtaagcaagattactcacttctgggtactgattacgtgatccaaatcaaatttttgcaaagctgacacctttcagcatcgcttttcgccattatagctaacagttaataaattgtagtatgatttggtggctacattagcatgttttgcacaactagataacaataacgaatgatagcaattttaagtagttaggaggtgaaaaatgctgtcaaaaggcgtattgtcagcgcgtcttttcaaccttatttatggctaacattatccggcttttgcttcggagctaaccgtgattcagaccttttttgattttcccgtttacttcaaatttttcatcgggttatttgcgctggtcaacccggtagggattattcccgtctttatcagcatgaccagttatcagacagcggcagcgcgaaacaaaactaaccttacagccaacctgtctgtggccattatcttgtggatctcgctttttctcggcgacacgattctgcaactttttggtatatcaattgattcgttccgtatcgccgggggcatcctggtggtgacgatagcgatgtcgatgatcagcggcaagcttggcgaggataaacagaacaagcaagaaaaatcagaaaccgcggtacgtgaaagcattggtgtggtgccattggcgttgccgttgatggcggggccaggggcgatcagttctaccatcgtctggggtacgcgttatcacagcattagctatctgtttggtttctttgtggctattgcattgttcgctttatgttgctggggattgttccgcatggcaccgtggctggtacgggttttacgccagaccggcatcaacgtgattacgcgtattatggggctattgctgatggcattggggattgaatttatcgttactggtattaaggggattttccccggcctgcttaattaattcctttcaaatgaaacggagctgccatgctccgtttacttcgtcattatttttactttgttcccgcgcagttatcaaaagcaaaaggaataggtaaaaatattcttctcaaattacagttagttataaggatttccttaactgcttctcctcaccatcatgttattttcgccacatcataatcctgggcttgctgaagaataattgaaatgatattagtaattccactgcctttggtagaggaaagtgctaaataataatcaattgttaaattattgtgcatttcactactggaactgtaatcagaaaagatagacatgcttagccaatctctatttgattgaattgaaagatgtttgttaaggcatggatgcaagctatagattctgatacggtcaataaaagagaattgcttaacaattttgcaaaatgtattggcgagtaagaaccgcatttggtactttccgggcaaccgccagacgattatttattggtaatgagaataattaacaattaaagagcgtcgcgaaagaataatgtgtctcgacaggggagacacagtacgaatcgacataaggtgatcgtctgaatcaccagaataaataaagtcggtgatagtaatacgtaacgataaagtaacctgacagcagaaagtctccgagcctgtgcagggtcccaatccgggattacacatgctggttaataccagtaattataatgagggagtccaaaaaacaatgaccaacatcaccaagagaagtttagtagcagctggcgttctggctgcgctaatggcagggaatgtcgcgctggcagctgatgtacccgcaggcgtcacactggcggaaaaacaaacactggtacgtaacaatggttcagaagttcagtcattagatccgcacaaaattgaaggtgttccggagtctaatatcagccgagacctgtttgaaggcttactggtcagcgatcttgacggtcatccagcacctggcgtcgctgaatcctgggataataaagacgcgaaagtctggaccttccatttgcgtaaagatgcgaaatggtctgatggcacgccagtcacagcacaagactttgtgtatagctggcaacgttctgttgatccgaacactgcttctccgtatgccagttatctgcaatatgggcatatcgccggtattgatgaaattcttgaagggaaaaaaccgattaccgatctcggcgtgaaagctattgatgatcacacattagaagtcaccttaagtgaacccgttccgtacttctataaattacttgttcacccatcaacttcaccggtgccaaaagccgctatcgagaaattcggcgaaaaatggacccagcctggtaatatcgtcaccaacggtgcctataccttaaaagattgggtcgtaaacgaacgaatcgttcttgaacgcagcccgacctactggaacaacgcgaaaaccgttattaaccaggtaacctatttgcctattgcttctgaagttaccgatgtcaaccgctaccgtagtggtgaaatcgacatgacttataacaacatgccgatcgaattgttccagaagctgaaaaaagagatcccggacgaagttcacgttgatccatacctgtgcacttactattacgaaattaacaaccagaaaccgccattcaacgatgtgcgtgtgcgtaccgcactgaaactaggtatggaccgcgatatcattgttaataaagtgaaagcgcagggcgacatgcccgcctatggttacactccaccgtatactgatggcgcaaaattgactcagccggaatggtttggctggagccaggaaaaacgtaacgaagaagcgaaaaaactgctggctgaagcgggttataccgcagacaaaccgttgaccatcaacctgttgtataacacctccgatctgcataaaaagctggcgattgctgcctcttcattgtggaagaaaaacattggtgtaaacgtcaaactggttaaccaggagtggaaaacgttcctcgacacccgtcaccagggtacttttgatgtggcccgtgcaggctggtgtgctgactacaacgaaccaacttccttcctgaacaccatgctttcgaacagctcgatgaataccgcgcattataagagcccggcctttgacagcattatggcggaaacgctgaaagtgactgacgaggcgcagcgcacagctctgtacactaaagcagaacaacagctggataaggattcggccattgttcctgtttattactacgtgaatgcgcgtctggtgaaaccgtgggttggtggctataccggcaaagatccgctggataatacctatacccggaatatgtacattgtgaagcactaatggcaatacgtggggcaggagtgtcctgctccacggtgtctgatttttatcgcattacagaaggcacaggccagaaggtagggcaatgttaaaatttattctacgtcgctgtctggaagcgattccgacgctatttattcttattactatttcgttctttatgatgcgcctcgcgccgggaagcccttttaccggcgaacgtactttaccgccagaagtgatggccaatatcgaagcgaaatatcatcttaatgatccgatcatgacacagtatttcagctacctgaaacaactggcgcacggtgatttcggtccatcgtttaaatataaagattattcggtcaatgacttggttgcatccagttttcccgtttctgccaaactgggagccgcagcatttttccttgcggtaatactgggtgttagtgctggcgttattgccgcattaaaacaaaacaccaaatgggactataccgtgatggggctggcaatgaccggggttgttatccccagttttgtggttgcaccattattagtcatgatatttgcgatcattttgcattggctgccgggcggtggctggaatggtggggcgcttaaattcatgatattgccgatggtggcgttgtcactcgcttatatcgccagtattgcgcgtattacccgtggctctatgattgaagtattacactccaattttattcgtactgcccgggcgaaagggttacctatgcggcggatcattttacgtcacgcattaaaacctgctctgttacccgtgctctcttatatgggccccgcatttgtcggcattattaccggttctatggttatcgaaaccatttatggtttgccggggattggacaactgttcgttaatggcgcattgaaccgtgactattccttagtgttaagcctgaccatcctggttggtgctttaaccattttgtttaatgccattgtcgatgtgctatatgcggttatcgacccgaaaatccgttactgatactggagctcgcgatgatgttaagtaagaaaaacagcgagacgctggaaaatttcagtgaaaagctggaggtcgaagggcgcagcttgtggcaggacgcacgtcgacgttttatgcataaccgtgcggcggttgccagtctgatagtgctggtgctgatcgcgttatttgtaatcctggcaccgatgctttcccagtttgcctatgacgatactgactgggcgatgatgtccagcgccccggatatggagtccggtcactactttggtactgactcatccggtcgcgacctgcttgtgcgcgttgcgattggtgggcgtatctcactcatggtcggtgttgctgcggcactggtggctgtggtcgtcgggacactttatggttcgctttccggttatctgggcggtaaagtggattcggtaatgatgcgtctgctggaaatcctcaactccttcccattcatgttcttcgtcattttgctggtgacctttttcggtcaaaacatcctgctgattttcgtggcgataggcatggtttcctggctggatatggctcgtattgtgcgtgggcaaaccctgagtctgaagcgcaaagagtttattgaggcggcacaagttggcggtgtatcgacatcgggcattgttattcgccacattgtgccgaatgtactcggtgtggtggtggtctacgcatcacttctggtgcccagcatgatcctctttgaatctttccttagcttcctggggttgggtacgcaagagccgttaagcagctggggtgcattgctgagtgatggcgcgaactcgatggaagtctctccatggttattgttgttcccagcgggattcctcgtggtgacgctgttttgtttcaactttatcggcgatggcttgcgtgatgccctcgacccgaaagatcgttaaggagtgcagccatgagcgtaattgaaactgcaactgtgccgctcgcacaacaacaggctgacgcactgctgaacgtgaaagatttgcgtgtcacctttagtaccccggacggcgacgtcacggcggtcaatgatttgaatttttccctacgtgccggagaaacgctgggtattgtaggtgagtctggttcgggtaaatcgcaaactgcatttgcgttgatgggcctgttggctgccaacggacgtattggcggatcggcaaccttcaatgggcgtgaaatcctcaatttgccagagcatgaactcaataaactgcgcgctgaacaaatctcaatgatttttcaggacccaatgacttcgttgaatccctatatgcgcgtcggtgagcagttaatggaagtgctgatgctgcataagaacatgagcaaagctgaggcgtttgaagagtcggtgcggatgctcgatgcggtaaaaatgccggaagcgcgtaaacgcatgaaaatgtacccgcacgaattttctggcggcatgcgtcagcgagtcatgattgcgatggcattgctatgtcgacctaagctactgattgcggatgaacccactactgcgctggacgtcaccgtacaggcgcagatcatgacgctattaaatgaactgaagcgggaatttaataccgccatcattatgatcacccacgatcttggcgtggtggcggggatctgcgacaaagtgctggtaatgtacgccgggcgcacgatggaatatggcaatgcgcgcgatgtcttttatcaacccgttcatccttattctatcggtttgctcaacgcggtgccgcgtcttgatgcggaaggtgaaacaatgttgaccatccctggtaatccgccaaacttgctgcgattaccgaaaggttgcccgttccagccacgttgtccacatgcgatggaaatttgtagtagcgcaccgccgctggaagagtttacgcctggccgtctgcgtgcttgctttaaaccggtggaggaactgttatgaatgctgtaactgaaggaagaaaagtcctccttgaaatcgccgatcttaaagtgcactttgaaatcaaagatggcaaacagtggttctggcaaccgccgaaaacgctcaaagccgtcgatggtgtcactcttcgcctgtatgaaggggaaacattaggtgtggtaggggaatcgggatgcggtaagtccacctttgctcgcgccatcatcggtttggtcaaggcgaccgacggtcatgttgcctggttaggtaaagagttgctgggcatgaagcccgatgaatggcgtgccgttcgcagtgatattcagatgattttccaggatccgttggcatcgctaaacccgcgtatgaccatcggcgagatcatcgctgaaccactgcgtacttatcatccgaaaatgtcacgccaggaagttcgcgagcgcgtgaaggcgatgatgctgaaagtcgggttattgcctaacctgattaaccgctatccgcatgagttctccggtgggcagtgccagcgtatcgggattgctcgtgctcttattcttgaaccgaagctgattatctgcgatgagccggtttcggcgctggacgtgtcaattcaggcgcaggtggtcaacctgctccagcagctgcaacgtgagatgggattgtcattaatttttatcgctcatgacctggccgtggtaaaacacatttccgatcgtgtgttggtgatgtatctcggccatgcggtagaactggggacctatgatgaggtctaccacaatccactacatccttacaccagggcattgatgtcggcagtccccatacctgatccggatctggagaagaacaaaaccatccagttactggaaggggaattaccgtcgccgatcaacccgccttccggttgtgttttccgtacccgttgcccgattgccggtccggagtgcgccaaaacacgtcctgttctggaggggagtttcagacacgccgtttcttgcctgaaagtcgatccgctttaaacacaataagggctgacagttgtcagccctttttcacgccgaaagcgattatttattcccgccagatgatatggcaaagtttgtgatctttttcgcggcataacagaatgcgggcgaaaacatcgttgatttcaccatcttcactgtccgccagaccaatcaccacttcggcaaaaaagtctgggttcaaatcgaaatcaacatgttcctgccagtcttccgccggatcgaataactccgcgccgccgcgctcttcaaactgaagattgaacagcagaacatcagctggatcgagattgtcggcagccagttcgagaaaaatatcgtaggcctgctcaagcgtttcatcttcagtcaggcgattgtttagatccatatccatagtcactacctgtttaacctctgttggcgacgttttacagcaacgggctgaagaagtaaaacagtcgctcggcgacacgttgccataatggacgttttagccataaacgggcatcgagcagacgtgaacgcgaaatataatcgtcctgaacggcggcaaggtctgcaccaaaacctttatcgtcgattgccagggtaatctcgaaattcagccacagactacgcatatcaaggttaacggtgccaaccagacttagttcgccatcgaccagcacgctcttggtatgcagtaacccgccttcaaactgataaattttaaccccagcagccaacagctccgtaaagaatgcgcgactggcccagccgaccagcatcgagtcattttttcgcggaaggataatactgacatccaccccgcgctgcgccgccgtgcaaatcgcatgaagtaaatcatcgcttggcacaaagtagggcgttgtcatgatcaaatattcacgcgccgaataagccgcagtcaataatgcctggtgaatgagatcttccggaaagccggggccagaagcaattgtgtgaatggtgtgaccgctggcctgttcaaacggcataatattgacatctggtggtggcggcagaatacgttttccggtttcaatctcccagtcgcaggaataaataatccccatcgcggtggcgatggggccttccatacgcgccatcagatcaatccattgccctacgcccgcatcttgtttgaagtagcgaggatcgaccatattcatgctgccggtgtacgcgatgtaattatcgatcatgatcatcttgcgatgttggcgcaggtccatacggcgtaaaaacacacgcatcagattgacctttaaggcttcgaccacttcaataccggcattacgcattagctcgggccacgggctgcggaaaaaagccacactcccggcggagtcgagcatcaatcggcaatgaatgccgcgtcgcgcagcggccattaatgattcagccacctggtccgccatgccgccgggctgccagatataaaacaccatctcaatattatggcgcgcgagctggatgtcgcggattaacgcctgcatcacatcatctgactcggtcatcagttgtagctgattccctttgaccccagcgatcccctgacgacgctcgcaaagcttgaataatggcgcagcgacactgctattttcttcggcgaagatatgcttacaggctttaaggtcgttaagccattttgcggtggaaggccacatcgctctggcgcgctcagcgcggcgtttgcctaaatggagctcgccaacggcaagataggcaataattccgactaacggcagaatgtaaataatcaacagccaggccatcgcggagggaactgcgcgtcgtttcattagaatgcgtaaagttacgcctgcaatgagcaaccagtatcccagaatggccaaccaactcaccaacgtataaacggttgtcatagattagaaatccttttgaaagcgcattgttatgagtttacgcatatggattcatctggcaaataaaaacgcgggaaaagcactggtcagcgtcgggggtgggggtataatgaccattctgttattgcatagagtagttaacatgaagcggagtagaacggaagtggggcgctggcgcatgcagcgtcaggctagccgacgtaaatcgcgttggcttgaggggcaatcgcgccgaaatatgcgtatccacagcatcaggaagtgcattctaaacaaacagcgtaactcgttattgtttgcgatctacaatatctaaatatactgggcaccattgcggtgcccaataagtttactctttcgtctttaaactctatttttgcactgattctttactgtcagctttcgtttcttgttcatcgttatcgctgaaaatgccatgaccggagttcaacaacattgaaacgagcatatcattattaatctcttcaccatttaaaactcgcgccagaatttcgctgccaaacagttgcggtgagagaatgatatccggatgtaccatcttaatcttattcaggtttttgctatcactgacggcgagaactgttttgacatcactgctcatatcttttgccgagagtacaacaaacgcgttatctgcatcgttatcactcagcgccagaatggcccggcaacgatcgattcccgctttctttaatactgaactgtcattactgtcaccggggataacatcagcgttatcgcctaagcgttgctcaagttgcttgatatcatcttcaggcaagttgctgataaccgttacgttttgtccgcgttgattcagttgcaggatcgtattgatggcgagaatcgaatgtccgcaaacaataaaatgatctttacgatgcattgtatgattgtttccttttacaagtttgttgaatcccccgcggataagcggaccaaaaattgaggtcatagatgtggcaaaaacggtaatgccggaaataatgaccgaaatagtgaacaatcgtgctgattcagaaacagggacaatatcgccatagccgacggttgacatggtttctatcgaaaaatagaacgcggtcatcaaactttctattcgcggattaaaaccttcgcttaaataaagcgcaccgtaggttgagtaaaacagtaatgtcgtgaaactaataaatgcaaaaattgtcccggctgcggcgctactgtgggagaagtctttgcgcagtatcagcaaaaacaccagcgtaaaaatgcaaaatccaatactaaatttcagccagggataaaaatgcagggtgtaaattagcgctatcaacaacaaaatgatactgattgcccatgcgagctttgcccggaacagtaagccaatggagttcaggacaagaaagacgccgagcataaatagtggggcgtttgccagcaaggagagatccaactctgaaaatgctttgatatggaaaatatcaagcaaattgaccgacataccatagattgttttaaaaataagcaatccatttaaaaagacggccagcgcgagaatgtcgtgccgtagggtcacccataaatttgttgctgtttgtttgaatgtagcccagtgactcactgatacctctgtaaccacaattttgtttaataatcttagcgtgcacattttctgaacatacatgcagcgcgtgaatgtgttaaacaatagtagatgactttatcggcagtaatcaaaggttttgagcgagcaactctgcgtcaggaaagggcattttcctgaatatgttcacatcatataaagaaatacagataaagttattatctgcttgtggtggtgaatgcactgaccggctataaggaaaggccaaacaagaacacggttgcaaaaaccgtgcccttaaatattgaatctctattcagaacactttcttaaatggtttcactgaaacgtgttcatagactcctgccgctacgtacgggtcagcatcggcccaggcctgagctgcttccagcgattcaaattcagcaataacggttgagccagtaaatcccgcagcccctggatcgttactgtctaccgctggcattggaccagctgtcaacaaacgaccttcatcatgcagtaactgtaaacgtgctaaatgtgccggacgaacggaaaggcgtttttcgaggctatcagctttgtcttgagcgtaaataacatacaacacgggcacaactccttgttcgggaaagttgtaaagtacgttatttgaaagggcgaagatctgcaacggaaagatgatgtctttgttaagaccatgcataaattaaggtcaattacgccaaaaatgacattttcactgatcctgatcgtcttgccttattgaatatgattgctatttgcatttaaaatcgagacctggtttttctactgaaatgattatgacttcaatgacccttgatttacctcgccgcttcccctggccgacgttactttcggtctgcattcatggtgctgttgtggcgggtctgctctatacctcggtacatcaggttattgaactacctgcgcctgcgcagccaatttctgtcacgatggttgcgcctgctgatctcgaaccgccacaagccgttcagccgccaccggagccggtggtagagccagaaccggaacctgagccgatccccgaaccaccaaaagaagcaccggcggtcattgaaaagccgaagccgaaacctaagccaaaaccgaagccggtgaaaaaggtacaggagcagccaaaacgcgatgtcaaacccgtagagtcgcgtccggcatcaccgtttgaaaatacggcacccgcacgcctgacatcaagtacggcaacggctgcaaccagcaagccggttaccagtgtggcttcaggaccacgcgcattaagccgtaatcagccgcagtatccggcacgagcacaggcattgcgcattgaagggcaggttaaagttaaatttgacgtcacgccggatggtcgcgtggataacgtacaaatcctctcagccaagcctgcgaacatgtttgagcgtgaggtgaaaaatgcgatgcgcagatggcgttatgagccgggtaagccaggcagtgggattgtggtgaatatcctgtttaaaattaacggcaccaccgaaattcagtaagcagaaagtcaaaagcctccgaccggaggcttttgactattactcaacaggtaaggcgcgaggttttccttcaggatcaaccgcgacatacttaaataatgcttctgtcgctttatagcgttgcccgattggttcagacgctacttttttcacccacacttcaatattaatgctgaccgatgtcgtccctttctggacacagcgtgcatagcagcacaccacatcgccgaccgcaaccggccgtaagaaagtcattccttcaacccgcacagtcactacgcgaccgtgggcaatttctttcgccagaatagcgccgccaatatccatttgtgacattaaccaaccaccaaagatgtcaccattggcattggtatcggcgggcatggctaaagtacgtaaaacaagatcgccctgagggacgttatgtgttgtagacatggtaaaaccgacttaaaaggaaaatcacaggcgcgatgctactatgattttcctgaggagaacagaggagatacagcgccagccccgaaggactggcagtctggttaggatttatcttcctgcggcatgtggcggtagatatagataccgcttaacaatgtgaagattaaggtaagggcggtcaggccaaagactttaaagttgacccaaatattttgcggcagccagaatgcgatgtagatgtttgccagaccgcaaaggataaagaaaacagcccaagccagatttagcttcgaccataccggttgcggcagcgtgagttctttacccagcatccgctgaattagcggctttttcatcacccattggctgactaacagggctcccgcaaacagagcataaatgactgtaaccttccatttaataaactcatcattgtggaagaacagcgtcaagccaccgaagacgaccaccagaacaaaagtgatcagggccatcttctcaaccttacgaaagcgaacccagctatagataagcacaatcgccgtggcgacgatcagcgccgcagtagccgcatagatgtcataaatcttgtaaaacgcgaaaaagacaaccagcggtaaaaaatcaagaaactgcttcattttacgattccgtaatcaaatgcttaaggttattggcgaatcaacatatacaggcggaacagatagatgagcaatatggcagaaatcaggttgctcaaggtgttcgccagtacggcaccaatttccggggttaatgcggcaaaagaagaggcaaaaagcagcaacagtgtttttgccagcaaccagctcagtactgcgggtgccaccagacgcatattcgcccaagtcagccgcatactgctacgcatcgaggcaaaaatgcccattttgtcctgtaccagcatcaccggtgccagggccagtaaaatggccatgataattcccggaacgaccaccagcatgatgccaatctgtactaaaagggtagtcagaaaaatcagaataaataacttgggcaatatcggcgcactggcaccaatagctcgcagcgcactgactctctgacccgcagacaccagctggataattaatattacgcctccggcgagaatggcgttaccgattaatcctgaaaaagtggacgccgctgaagcctgcagcaaaatttgttgctgttccggtgacatattctgaaccaggtcgaacaacccactactgccgctaacgggcacgccgtcattgagctgcgcaagctgtgcatcactgggtgagaaaacatgccctaacaccactgtgataaacgcacatagcaacgataccaacagaatggtcataaattgattacggaagaaatttccggtgtcacggtatacggactgcgccgtgatagacatgcactctccttgagttttatgcaggtgttaattagcgggcaattgtaccctggttaagcctcgggtggcagcatcaggtcttgtatggaaaagcatatctttgtaaagcggaagtaattgctggccttcaggcgtgggcaaaccgcggcaagtggcgatcgagttaatatttgcgtagagaaaatatttaaaaattgatttaaatcacattaaccaggattctcaatgcaacttctaaattaatccagatcaataaatggtgaattatcatatgtaatgtgatctatgtaggatcatttgttactccaatgtaggtatattcgtcacgtttttataaccataacgacggagcggatatgaaaaagttaacagtggcggctttggcagtaacaactcttctttctggcagtgcctttgcgcatgaagcaggcgaattttttatgcgtgcaggttctgcaaccgtacgtccaacagaaggtgctggtggtacgttaggaagtctgggtggattcagcgtgaccaataacactcaactgggcttgacgtttacttatatggcgaccgacaacattggtgtggaattactggcagcgacgccgttccgccataaaatcggcacccgggcgaccggcgatattgcaaccgttcaccatctgccgccaacactgatggcgcagtggtattttggtgatgccagcagcaaattccgtccttacgttggggccggtattaactacaccaccttctttgataatggatttaacgatcatggcaaagaggcagggctttccgatctcagtctgaaagattcctggggagctgccgggcaggtgggggttgattatctgattaaccgtgactggttggttaacatgtcagtgtggtacatggatatcgataccaccgccaattataagctgggcggtgcacagcaacacgatagcgtacgcctcgatccgtgggtgtttatgttctcagcaggatatcgtttttaattccgcacaaaaacgaccccgtaatatacggggtcaataaggacatggtataaagggtattatttcttcgcttctacgccatcagtttcagagcgaattaaaaatttctcagttgtttgcggaatattctgaatcagccagtcggccatttgcttttcctcatttaaaatcgcttcgatggttggaattgaagctgtatcaccggcattttttgctgctgctaatagtgaggtgtaacaggcgatttcaaattgctcgaagacatatccgctaatagagcctttgactatttcatcagaagggaatataccaccgattgactgcccaagcgcagccattttactcatggaatctttaatgactgaacgtgaaatgtcattacgatcaagaatagtttccagttgaacaatctggtttttggtttcactaagatgttgttcaatacgagcgcgtagttcaggataattatctatacggctggccatggattcaagcatagattcggcttgcttttccattgcgtgggcgtcacgtaaccagtcatgataatgttcaatacgattcatgaaaatgtcctctttataaaatgactaaaagttaaaattcatatttcaggctttattttcggctttcttatttacgttattaatggccagatcagtcagtttgatgtcggtggccttttcttcttccagggtttctttcagaagtttcgctgctttacggtaacctaattgttcagccagcgtcgctaatgtcccgtaactggcaatctcataatgctcgactttctgtgctgcggcaatcagtgcggcatcacgcacttcgtttttctcggtactttcgatgacctcattagcttcttcaataagaccttccattgccacacatttcatgcgcttaattttcaggttcgattcggactccacaacttgatcaatacgttcaatctgtccatgagtttcctcgaggtgcgcatgaaaagcctgacttaatttttcatttgatgttgctcttgcgagttttgccagtgcccgggttaattgtttttctgcgctgtaggtatctgaaagcaggtgaataaatacatcttcaatggtcttcatattcatatttttctccagtgaaatcactgcgagccatacggcccgcagatgcaattatctttatcagctgatattaataattaacggtgaatcaggatttgcctgatttattaccaccgctttgttgaccgccttttttacccgcttcagatgcgcgttgcggatcatttttaaaattaccgccgctatgctgaccgcctttacggcctgcgtcggatgccttctcacggtcttcggcgaaatttcctgaaccaccacgatgttcggccatgttatttctcccgttgcgttgcattgtttcattaatatgagtgttgtgtgtcgacactcattaaaattagtcgctaatgagaattagtcaaattaagcgcaacgagaagatagagggaaaatatattttgaggaacattctggatatattaacaattacctgaggaataagtgacttagagaaaattattgattttactggtgttatgttgcgggattaatttgtttgattatattactgttgggcggaaaaatgacgtaagttgacgttcgaccggggtaagcgaaacggtaaaaagataaatattaaatgaatttaggatttttccggcttcattaaagaaagttaaaatgccgccagcggaactggcggctgtgggattaactgcgcgtcgccgctttcatcggttgtacaaaaactttcagtgccgccagcattttctctggctcattaatatgttgctcgatgattttaacaatggccgaaccagaaatcgcgcccgcagctcctgcatcaatcgctgcttttacctgatccggggcggaaataccaaacccctgcaatggaggtgcagcgttgtactctttcagcttcgcaaccagatgattgaggggtaacgcggcgcggttttctgcgccggtcacgcccgctcgtgacagcaaataggtgtaaccacgaccgtaagaggctatctggcgcagcaggtcgtcatcggcatttggcgggcagatgaagataggtgcgacattatggcgcaacgcggcctggcggaagggcgcggactcttcaattggcacatcggcaaccagcaccgaatcgacgccgactttctcgcactgggcataaaactcatcaatgcctttgttaaacaccagattggcatacatcaacaggccaatgggaatggtcgggtgtttctggcgaatcagtgccagcatttcaaaacattgtgccggagtcacacctgccgcaaaggcgcgcagagtggcgttttgaatggtcgggccatccgctagtgggtcggagaaggggatacctaactccagcgcgtcagcaccggcttcaattagcgtatcgataattttcaatgactgctcaatgcccggatcaccgagcgtgacgaaaggaacgaatgcgccttctttgcgctccttcaactgggcaaacagagattcgtagcgttccatcagatttcccctcgtgctttcaaaatatcgtgaacggtgaagatgtctttatcgccgcgaccggaaaggttaaccaccagtagctgctctttatccgggttttcgcgcatcattttcaacgcatgggccagggcgtgggaggattccagcgccgggatgatcccttcgtgcaggcacagcgttttgaaggcttcaagggcttcatcatcggtaatagacacgtaatcagcgcgtccagtgctgttaagatacgcgtgttgtgggccgacagacgggaaatccagtccggcggagatggagtaagattcttcaatctgcccgtcttcggtttgcatcatcggcgctttcataccgaaatagatgcccacgcgaccatgttttaacggtgcgccgtgctcgccagtttcgataccgtgaccacctggctccacaccaatcaggccgacgttggtttcattgatgaaatcagcaaacatgccgatggcattcgaaccgccgccaacacaggcgataacggcatccggcaggcgaccttctctttccagaatctgcgctttggtttcttcgccaatcatccgctgaaactcacgcacaatggtcggataaggatgcgggccagctgcggtgcccagcatatagtgcgcggtttcgtaactaccggaccagtcgcgcagcgcctcgttacaggcatctttcagcgtcgcggaaccgctatgcaccgggatcacttccgcacccattaagcgcatacgaaaaacgttaggcgactggcgttctacgtctttggcacccatataaatacggcatttcaggccgagcagggcgctggcaagggccgacgccacgccatgctgaccggcaccggtttcggcgatgatttcggttttacccatccgcttcgccagtaaagcctgaccgagcacctggttagttttatgcgcgccgccgtgcagcaaatcttcacgcttgagatacagagtggtgttcgtcccggctgtaatgttctggcatttggtcagcgcggttggacgcccggcatagtttttcagcaggtcgttgaactgagcctgaaattcaggatctttttgcgcactgacaaaagcttcttccagctggcgcagagcaggcatcaggatttgtggcacgtacatgccgccaaactcaccaaaataggggttaagtaatgttgtcattgttcctttccttaatatgcgcgcagcgtctggaaaaccgaggccaaaagacgtgcgtctttgatgcccggttgcgactctacagcagaattaaaatcaagtccggcgcagccggtttgtgccgcttccacgcagttatctgcgcctaagccccccgccagcagaacgttgccaagcgattgaccatttaatagtgaccagtcgaaacgttgcccgcttccaccctggccgttgtctaaaacatatttatcaacgtgctgaagctcgcgggcgggcagggtttcaccgacgcttaatgctttccagatggcaacgtgtgctggcagagcttcacgcagcgtatcgatatacagctgatcttcattaccatgcagttgcactgccgccagcgataacaccttagctttgtccaccacatcggcaatatcgtgattgcggaacacgccaacatactgcaacggtgccgcagccatcacttcctgcgcctgttcaacgttgacgcaacgcggtgatgtcgcaacaaaaatcaacccaccgtaaatcgcgcccgcgtcataagctgctttagcatcttgcccacgcgtcaggccacatactttattctcacccagcaacacccggcgcacggcggcgtgcaaatcgtcatgggccatcaacgccgaaccaatcagaaaaccgttagcgaagtggcttaactcgcgcacctgagcgtaagtattgatgccggattcgctgattaccgttacgttgtgccccagtttcggcgcaagctcgcgggtacggttgagatcaatcgacaaatcacgcagatcgcggttgttgatgccaacgacctttgcccccaatgcaatggcacgctccagttcctcttcattactgacttcggtcagcacacccatctccagactgtgggcgacggcggcaagctggcgatattgttcgtcatccagtactgaaagcattaataagcaggcatcagcctggtaatagcgcgccagatagatctggtaaggatcgataatgaagtctttacataaaatcggctgcggggcgatttggctgacgatggggaggaaatcaaagctcccctgaaaatatttctcatcagtcagcaccgaaattgccgaagcgtaatgtttataaatggcggcaatgcgtgctggatcgaaatcatcacggatcacgccttttgacggcgacgctttcttgcactccagaataaacgccgtgcgcgcaccctgtagcgcatcataaaaatgtcgcgtgctcggctgaacctcattctgaaaactggccagcggttgctgctgtttgcgggtttctacccaaatcgccttgtctgcgacgattttcgctaaaacggtttgcatcatttaccctcgtgccgccagtgcggtaactctgtcgtaagcggaaccactgcgcagtacctcaagaacggtttgcgcattggcttgcagatcttcatggccatgcaggcgcattaacatggcgacgttcgcagcgacggctgcttcatgggcggcgtcgcctttaccttgtaacaagcgtgttaaaatgtcacggttttcttccggtgttccgcctgccagttgctcctggtggtagggagtcaggccaaaatcttcagcggtcaattgatagctcttaatttcgccgtcatgcagctcggcaacgattgtcggcgcgtgtaatgaaacttcatccatcccgccgctgtgcaccaccgccgcgcgttgataccccagcacgcgcaaggtttcggcaatcggcagcaccagttccggactataaacaccaattaacgccagcggcggatgcgccgggttaatcaatggccccagcacattgaacagggtgcgggttttcagttgctggcgaaccggcatcgcgtggcggaatccggtgtgatacttcggcgcaaagaggaaacatacacctaactcatccagcgcctggcgcgatttatcggcgttcatatcaagattaataccgaacgccgccagcagatcggacgaaccagatttactggagacgctacggttgccgtgtttcgccactttcagcccacaggctgcggcgacaaacgcactggcggtagaaatattgatactgttgctgccgtcaccgccagtaccgacgatatcagcaaacagataatccgggcgcgggaacggcgcggcgttttccagtagcgcggttgctgctccggcgatctcgttcgggtgctcaccgcgaattttcatgctcaccagcgccgccgccagttgttccggcttcagctcgccacgcaccaccgctgaaaacagctggtggctttcttgttggctaagcgtctgcgcctgatacagtttttccagaatcggttgcagcgtgttggctggctctagtttctgctgcgcccaggccagcgtttgttccagcaggcgagcgccctgggtggtgagaatggattccggatggaactggaatccacaaacgcgatccgcatcgtgacgtactgccatcaccatgccattaaaatgggcgttgatggttaaaccggccggaatgttactgccaaccagcgagtgataacgcgccaccggcagcgggtttgttaatccggcaaacatcgcctgaccgtcatgttcaatgctcgacgctttaccgtgaagaatttcgcccgcctgaccgacatagcccccgtaagcttcgacaattgcctgatgtccgaggcaaatgccaataatgggcagcttgccacgcaagcgggtgaggagttccggcatacaaccggcttcgctcggcacaccggggccaggagaaagcatcagtaccggattgctcatcgtcgccaggcgttcaattaaggtctgcgccggaatatggttgcggtaaatcaccacattatgcccattgctgcgcaactgatctgccaggttgtacgtaaaagagtcgatattatcgagcagcagaatgtcagccatcagaaagtctcctgtgcatgatgcgcggtggcaatagcgcgcagtacagcgcgggctttattacgggtttcgtcggcttccgactgcggaatagaatcaaggactacgccagcaccggcttgcacggtggcgataccgttttccaccagcgccgagcggatcacaatgcaggtgtcgagatcgccgtgcgcggtgaaataacctaccgcgccgccgtagctgccgcggcgacgaccttccgcctcggcaattaactgcatggcgcgcactttcggcgcaccgcttaacgtccccatattcatacaggcgcggtaagcgtgtagggcgtcgagatcgtggcgcagctcaccgaccacgcgggagaccaggtgcatcacgtaagagtaacggtcaactttggtgaggtcggcgacgtagcggctgccgggggtgcaaatgcgtgccagatcattacgggcaagatccaccagcatcagatgttcagaaagctctttatgatcggtacgcatttccagttcgatgcggctgtcgaggtctctgtccagcgagccatcggcacgacgaccgcgtggacgtgttccggcaatcgggtagatctcaatctggcggctggtggcgtcatacttgagcgaactttccggcgacgcgccaaacagggtgaaatcattatcctgcataaaaaacatgtacgggctgggattactctttttcagcacgtaataggccgccagcggtgacgggcagggcagagagaaacggcgagatggcaccacctggaaaatttctccagcgcgaatcgctttttgcaacaaacgcactacgccaccgaactcttcatcgctctgattacattcacaacgcatatgcggcacggaaaccaccggcagcggcggcgcggcttcggtcagttgctgacgtagttcgttcaggcgagcagtgagacgttgtttttcttcttcattcggagcaaacaggctggcctgaatacgggtgctttttttctgatggtcaatcaccatcagcgtttcagcgagataaaaacagaaatcagggcagttattttccgctgacagttgcggtaaatcttcaaatcccgccacaaggtcataagagaacaggccgccgaagaacattgcttctcgttcttccttcggtacattcaacagattctgcaataaacggaaagcgtcaaaaaccgaaagggagcataagcgagcgtcttcatccagcagtggactgacaggggggaagcgcagcacacggcagtttggtaattgttcattttccacacccgcaggcagggcgttatccagtagtgtcagcagggcttcgccgttgccggaaaatgcctggattgtgacagtgtcacctaaagctgtaatgcgcagcgcactgtctgccagcagcaggctttttaaatcatctttgctgtcgatatctgcggattccagcagcagcgttgccggacgattcccacacaactggtgaaaaagcgcagtcgggttgtcgcgataagcgccttcgcaggttagcagttcgagagtcggtttttgtgtttgcattgttattctctaattttgttcaaaaaaaagcccgctcattaggcgggctgggtatctgattgctttacgcatggtgaatacactgcccgtttcaggaagtgcgccaccaacctttcagtacgaaaattgctttcattgtcgataccctttttacgtgaactttcgtactagttaactagttcgatgattaattgtcaacagctcatttcagaatatttgccagaaccgttatgatgtcggcgcaaaaaacattatccagaacgggagtgcgccttgagcgacacgaattacgcagtgatttacgacctgcacagccataccacagcttccgatggctgcctgacgccagaagcattggtgcaccgtgcagtcgagatgcgcgtcggcaccctggcgatcaccgaccatgacaccacagctgcaatcgcgccagcaagagaggaaatttcacgttcgggactggcgctgaatcttattcccggcgtggaaatttccacggtctgggaaaatcatgaaattcatattgtcgggctgaatattgatattactcatccgctaatgtgtgagttcctcgcgcagcagacagaacggcgcaatcagcgggcgcagctaattgccgaaagacttgaaaaagcgcaaatacctggggcgctggaaggcgcacaacgactggcgcagggcggcgcggtgacgcgcggtcattttgcgcgtttccttgtggagtgcggcaaagccagttcaatggcggatgtctttaaaaagtatctggcgcgcgggaaaaccggatacgttccgccacagtggtgtacaatagaacaagctattgatgtcattcatcattctggcggtaaggcggtgctagctcatcctgggcggtacaatcttagtgctaaatggctgaaaagattggttgcgcattttgccgaacaccatggcgacgcgatggaagtcgcgcagtgccagcaatcgcccaatgaacgcacccagctggcgacacttgcgcgtcagcatcatttatgggcatcacaaggatctgattttcatcagccatgcccgtggatcgaactgggtcgtaaactctggctgcccgcaggcgttaaaggcgtctggcagctatgggaacagccgcagaacaccacagagagggaattatgagccagtttttttatattcatcctgataacccgcagcaacgtctgatcaaccaggcggtggagatcgtgcgtaaaggcggggtgattgtttatccaactgattccggctatgcgctcggctgtaaaattgaagataaaaacgccatggagcgtatttgtcgtattcgccagctgccggacggtcacaactttaccctgatgtgtcgcgatctttctgaactctcgacctattcatttgtcgataacgttgcgtttcgtttaatgaaaaacaacacgccgggcaactataccttcatcctgaaggggacgaaggaggtgccacgccgtctgttgcaggaaaaacgcaaaaccatcggtatgcgtgtgccttctaacccgattgcgcaggcgttgcttgaagcactgggcgaaccgatgctttccacttcgctaatgctgccaggcagcgaatttaccgaatccgatcccgaagaaattaaagaccgtctggaaaaacaggtagatttgattattcacggcggctatctcgggcagaaaccaacaacggttattgatcttaccgatgatacgccggttgtggtgcgtgaaggcgtaggtgatgtgaagcctttcttataagtgcgtaactctgtatactacgcggccttaaaatggcgctatacggcgccattgattctcctgttcgacgcctgtgaaggcgacactaaaaggaagctctatgagcgaaaaattacagaaagtgctggcccgcgctggccacggctcccgccgtgaaatcgaatctattattgaagccggtcgtgtgagtgttgatggcaaaattgctaaactcggcgatcgcgttgaagttacccctgggctgaaaattcgtatcgatggtcatctgatttcggtacgtgagtccgctgaacaaatttgtcgcgttctggcctattacaaaccggaaggtgagttgtgtacccgtaacgatccggaagggcgtccgacggtgtttgaccgtctgccaaagctgcgtggcgcacgctggattgccgtaggtcgtctggacgttaacacctgtggtctgctgctgttcaccaccgatggtgaactggcaaaccgtttaatgcatccaagccgtgaagttgaacgtgaatacgccgtgcgtgtatttggtcaggttgacgacgcgaaactgcgtgatttgagtcgtggcgtgcaactggaagatggtccggcagcttttaaaaccatcaagttcagcggcggcgaagggatcaaccagtggtacaacgtgactctgaccgaaggccgtaaccgtgaagttcgtcgtctgtgggaagcggttggtgtgcaggtgagccgcctgatccgtgttcgttacggtgatatcccactgccaaaaggtctgccacgcggtggctggacggagctggacctcgcccagactaactatctgcgcgaactggtggagctaccgccagaaaccagctctaaagtcgctgtagaaaaagaccgtcgtcgcatgaaggcgaatcagattcgtcgtgcggtgaaacgtcacagtcaggtgagcggcggtcgtcgttctggcgggcgtaataacggttaatcaaagtatgccggacgtcatatccggcatttttacagattaataatcaatccctatttgcgccttaacaccggcatcaaacgcatgtttgatggggcgcagctcacttaccgtatccgccagttcaagaatatcccgatgacagcctcgacccgtgataatcaccgtctgttgatgtggacgttcatttaacgcctgcaccacttcttccagtggcaaatagtcatacgccaccatatacgtcagttcatcaagcaaaaccatatccagtgaggaatcagcaagcatccgctttgcatgttgccagacttcgcggcaggcggcggtatcagactcgcggttttgtgtatcccaggtaaagcccgttgccatcacctgaaactcaacgccatgtggctccagcagattgcgttcgccattaggccaggtgcctttaataaactgcacgacgcctactttttttccgtgaccaactgcgcgtgttgccgtaccaaatgccgcggtggttttgccttttccattgccggtaaagacgatgataataccgcgttcatcctgggcctgggccacacgagcatctactttttctttcactcgctgctgacgctgttggtagcgttcatcactcattgggaaattcctggtttacggcccggttgggcgtcaaaggtcatgccggttttacggcggctgtcatcgcccatcagccagaggtagagcggcatgatatcagcgggtgttttaagtttctgtggatcttcggtcgggaaggcgctggcacgcattgcggtgcgcgtaccgcctgggttaatgcagttgacgcgcaggcgctgctgatattcatcggccagtacctgcatcatcccttcggtggcaaatttcgacgctgcatatgcaccccagttagctcgtccctgacgtccaacgcttgatgaagtaaagaccagtgaaccggcgtccgatttgagtaataaaggaagcagtgcctgggtgagcataaaggtggcattaacgttgacctgcatgacgtcctgccagacctgcggattttgttcgctcattgggcaaatatcgccgagcaatccggcattatgcaaaacaccatccagacgcggataattaacgacaatgcgctgtgccagttgttggcaatcttcggacgtgcaggtcagcaaatcgagaataaaccactgtggctgacgtccagtttcttcgtttatgtggctggctacctgacgtaatttttcttcattacggcccaacagaatcactgtcgcaccatagcgtgcatacgtcatcgcggcttcacggccaatcccatcgctggctcccgtcaccaggataatgcgatcattgagtaaatcttgttttggctggtaatgcatggctactcctcaacgacgttgtctgtcgcgctgccagtgtactttatgactttggggctttatgcctgaaacagaagggcatttcaatcagcctggggcgataacaccgcaaaatggatactttgtcatactttcgctgcaataacatctctgcgagacggcttaacatgcctgttgtaaactgtgagccaaagcgttgtttaaccaaggtggggactcgtggaattgttgtctgaatatggtttgtttttggcgaaaatcgttaccgttgtgctagcgattgcggcgattgccgccattattgtcaatgttgctcaacgtaataaacgccagcgtggcgagttacgggtcaacaatctcagcgaacagtataaggagatgaaagaagaactggccgcggcgctgatggactcacatcagcaaaaacagtggcacaaagcgcagaagaaaaagcacaagcaagaagcgaaagcagcaaaagcgaaagccaaactgggcgaggtggcaactgacagtaaacctcgcgtctgggtgctggattttaaaggcagcatggacgcccatgaagtgaactcgctacgtgaagagataacggctgtactcgcagcattcaaaccgcaggatcaggttgtgctacgtctggaaagccctggtggcatggtgcatggttacgggttggcggcttcgcagctgcagcgtctgcgtgataaaaacattcctttaactgttacggtagacaaagtcgctgccagcggcggttacatgatggcctgtgtggcggacaaaattgtttccgcaccgtttgctattgtgggttccattggggtggtggcgcaaatgcccaactttaaccgcttcctgaaaagcaaagatattgatatcgaactgcacactgccgggcagtataagcgtactctgacgttgctgggtgacaataccgaagaagggcgggagaaattccgcgaagagttgaacgaaacgcatcagttgtttaaagattttgtgaagcgtatgcgtccgtctctggatattgaacaggtggcaacgggtgaacactggtacggacaacaggcggtagagaaaggcctggttgatgaaatcaacaccagtgatgaagttattcttagcctgatggaaggccgtgaagtggttaatgtacgctatatgcagcgtaaacgactcattgaccgattcaccggcagcgcggcagagagcgccgatcgattgttgctacgctggtggcagcggggtcaaaagccattgatgtaaaagacaaacgcgaggctaagacctcgcgttttgctttaatcaaccagatgatatttttctgaaagcacatgggccaggtgtttgaacatattaaacaccgcggtgcttttggctgttggcaatccttgttcatctaaaaagtagtcgccggtaaataccagcacgccattacgctgcgtgacgccggtggcttcaatccctgcgagcgtatcctcatgctcacgaatgattttgttggcctctttcaacagcgtttcgcggtcgatgggttgtgtctctttgttcattatttactccttaaacaaggacattagtctacgccaggcatggcttgcagacaaatataccacgctggtggcaagagcgccttactggtaactttggattttgcatgctaataaagttgcgtatcggattttatcaggtacagtgtgacgctttcgtcaatctggcaatagatttgcttgacattcgaccaaaattccgtcgtgctatagcgcctgtaggccaagacctgttaactcagtcacctgaattttcgtgaacagagtcacgacaaggggttgatatccgcagagaacgagtccatatcggtaactcgttgccattggaaggtttatcaacgtgcgacgcattcctggaagaatcaaattaggtaaggtgaatatgggtaaagctcttgtcatcgttgagtccccggcaaaagccaaaacgatcaacaagtatctgggtagtgactacgtggtgaaatccagcgtcggtcacatccgcgatttgccgaccagtggctcagctgccaaaaagagtgccgactctacctccaccaagacggctaaaaagcctaaaaaggatgaacgtggcgctctcgtcaaccgtatgggggttgacccgtggcacaattgggaggcgcactatgaagtgttgcctggtaaagagaaggtcgtctctgaactgaaacaactggctgaaaaagccgaccacatctatctcgcaaccgaccttgaccgcgaaggggaagccattgcatggcacctgcgggaagtgattggtggtgatgatgcgcgctatagccgagtggtgtttaacgaaattactaaaaacgcgatccgccaggcatttaacaaaccgggtgagctgaatattgatcgtgttaatgcccagcaggcgcgtcgctttatggaccgcgtggttgggtatatggtttcgccgctgctatggaaaaagatcgctcgtggtctgtctgccggtcgtgtgcagtcggtggcggttcgcctggtggtcgagcgtgagcgtgaaattaaagcgttcgtgccggaagagttctgggaagtcgatgccagcacgaccacgccatctggtgaagcgttggcgttacaggtgactcatcagaacgacaaaccgttccgtccggtcaacaaagaacaaactcaggctgcggtaagtctgctggaaaaagtgcgctacagcgtgctggaacgtgaagacaaaccgacaaccagtaaacctggcgctccttttattacctctacgctgcaacaagctgccagcacccgtcttggatttggcgtgaaaaaaaccatgatgatggcgcagcgtttgtatgaagcaggctatatcacttacatgcgtaccgactccactaacctgagtcaggacgcggtaaatatggttcgcggttatatcagcgataattttggtaagaaatatctgccggaaagtccgaatcagtacgccagcaaagaaaactcacaggaagcgcacgaagcgattcgtccttctgacgtcaatgtgatggcggaatcgctgaaggatatggaagcagatgcgcagaaactgtaccagttaatctggcgtcagttcgtagcctgccagatgaccccagcgaaatatgactccacgacgctgaccgttggtgcgggcgatttccgcctgaaagcacgcggtcgtattttgcgttttgatggctggacaaaagtgatgcctgcgttgcgtaaaggcgatgaagatcgcatcttaccagcagttaataaaggcgatgctctgacgctcgttgaacttacaccagcccagcactttaccaagccgccagcccgtttcagtgaagcatcgctggttaaagagctggaaaaacgtggtatcggtcgtccgtctacctatgcgtcgatcatttcgaccattcaggatcgtggctacgtgcgagtagaaaatcgtcgtttctatgcggaaaaaatgggcgaaatcgtcaccgatcgccttgaagaaaatttccgcgagttaatgaactacgactttaccgcgcagatggaaaacagcctcgaccaggtggcaaatcacgaagcagagtggaaagctgtactggatcacttcttctcggatttcacccagcagttagataaagctgaaaaagatccggaagagggtggtatgcgcccgaaccagatggttctgaccagcattgactgcccgacttgtggtcgcaaaatggggattcgcacagcgagcaccggggtattccttggctgttctggctatgcgctgccgccgaaagagcgttgcaaaaccaccattaacctggtgccggaaaacgaagtgctgaacgtgctggaaggcgaagatgctgaaaccaacgcgctgcgcgcaaaacgtcgttgcccgaaatgcggcacggcgatggacagctatctcatcgatccgaaacgtaagttgcatgtctgtggtaataacccaacctgcgacggttacgagatcgaagagggcgaattccgcattaaaggttatgacggcccgatcgttgagtgtgaaaaatgtggctctgaaatgcacctgaaaatggggcgtttcggtaaatacatggcctgcaccaacgaagagtgtaaaaacacacgtaagattttacgtaacggcgaagtggcaccaccgaaagaagatccggtgccattacctgagctgccgtgcgaaaaatcagatgcttatttcgtgctgcgtgacggtgctgccggtgtgttcctggctgccaacactttcccgaaatcgcgtgaaacgcgtgcgccactggtggaagagctttatcgcttccgcgaccgtctgccggaaaaactgcgttatctggccgatgcgccacagcaggatccggaaggtaataagaccatggttcgctttagccgtaaaaccaaacagcaatatgtctcttcggaaaaagacggaaaggcgactggctggtcagcattttatgttgatggcaaatgggttgaaggaaaaaaataacctttaattctgtcaggtttttataaacaaagggtcgcgaaagcggcccttttttattgcatattattttttcttcacacctatacactaaggctataaatgatatagtggttatagttagcaccttttttattattaaatcgtattagtcacccgccaggtgtgacgaaaaaacgatgttctgatggcgtctaagtggatggtttaacatgaaattacaacaacttcgctatattgttgaggtggtcaatcataacctgaatgtctcatcaacagcggaaggactttacacatcacaacccgggatcagtaaacaagtcagaatgctggaagacgagctaggcattcaaattttttcccgaagcggcaagcacctgacgcaggtaacgccagcaggacaagaaataattcgtatcgctcgcgaagtcctgtcgaaagtcgatgccataaaatcggttgccggtgagcacacctggccggataaaggctcgctgtatatcgccaccacgcatacccaggcacgctacgcgttaccaaacgttatcaaaggctttattgagcgttatccccgcgtttctttgcatatgcaccagggctcgccgacacaaattgctgatgccgtctctaaaggcaatgctgatttcgctatcgccacagaagcgctgcatctgtatgaagatttagtgatgttaccgtgctaccactggaatcgggctattgtagtcactccggatcacccgctggcaggcaaaaaagccattaccattgaagaactggcgcaatatccgttggtgacatataccttcggctttaccggacgttcagaactggatactgcctttaaccgcgcagggttaacgccgcgtatcgtcttcacggcaacggatgctgacgtcattaaaacttacgtccggttagggctgggggtaggggtcattgccagcatggcggtggatccggtcgccgatcccgaccttgtgcgtgttgatgctcacgatatcttcagccacagtacaaccaaaattggttttcgccgtagtactttcttgcgcagttatatgtatgatttcattcagcgttttgcaccgcatttaacgcgtgatgtcgttgatgcggctgtcgcattgcgctctaatgaagaaattgaggtcatgtttaaagatataaaactgccggaaaaataatttcttgcgttattttcggcaccttttatgtagcgaaggtgccggaatatattctcttttgttacttatttctataccgtgcacaatatttttatccctcatatttatagggtaaattacctgtaaagtagtgtctaattacccgcctcgcaaactccagttttcaaatatctatttcaggtcaaaagattgaattattcactggagacgattcgtaaattcgctggatttttgactaaagtttctttaggatttgtctcatcgtatgattaattacaccaatcgttcaacgtcttgctgataagtgatggcgattatatgaggttagcaatgccttctggaaatcaggaaccccgccgcgatcctgaattaaaacgtaaagcctggctggcggtttttcttggttctgcacttttctgggtggttgtcgcactgctgatttggaaagtgtggggataactatggtcggtcaggagcaactggagtcgtcaccattatgccagcatagtgacaatgaaacagaaacgaaacgggaatgttccgtcgttattccagacgactggcaactaacatcgcagcagcaagcctttatagaactgtttgctgaagatgatcagccgaaacaataattatcatcattcttattacccatttttaatgaattaaagggcttttaatacaccgcagcaataacagcttgagttatctcaacacaaaataataaccgttaagggtgtagcctatgatcaacacaaatatgaaatattggtcctggatgggcgcgttttctctgtcgatgctcttctgggccgaactcctctggatcattactcactgatccttgaccccgctgcggcggggttgtcatttgctttgccacaaggtttctcctcttttatcaatttgggttgttatcaaatcgttacgcgatgtttgtgttatctttaatattcaccctgaagagaatcagggcttcgcaaccctgtcattaaggaggagctatgtcgtcaaccctacgagaagccagtaaggacacgttgcaggccaaagataaaacttaccactactacagcctgccgcttgctgctaaatcactgggcgatatcacccgtctacccaagtcactcaaagttttgctcgaaaacctgctgcgctggcaggatggtaactcggttaccgaagaggatatccacgcgctggcaggatggctgaaaaatgcccatgctgaccgtgaaattgcctaccgcccggcaagggtgctgatgcaggactttaccggcgtacctgccgttgttgatctggcggcaatgcgcgaagcggttaaacgcctcggcggcgatactgcaaaggttaacccgctctcaccggtcgacctggtcattgaccactcggtgaccgtcgatcgttttggtgatgatgaggcatttgaagaaaacgtacgcctggaaatggagcgcaaccacgaacgttatgtgttcctgaaatggggaaagcaagcgttcagtcggtttagcgtcgtgccgccaggcacaggcatttgccatcaggttaacctcgaatatctcggcaaagcagtgtggagtgaattgcaggacggtgaatggattgcttatccggatacactcgttggtactgactcgcacaccactatgatcaacggccttggcgtgctggggtggggcgtgggtgggatcgaagcagaagccgcaatgttaggccagccggtttccatgcttatcccggacgtagtgggctttaaacttaccggtaaattacgtgaaggtattaccgccacagacctggttctcactgttacccaaatgctgcgcaaacatggcgtggtggggaaattcgtcgaattttatggtgatggtctggattcactaccgctggcggatcgcgccaccattgccaatatgtcgccagaatatggtgccacctgtggcttcttcccaatcgatgctgtaaccctcgattacatgcgtttaagcgggcgcagcgaagatcaggttgagttggtcgaaaaatatgccaaagcgcagggcatgtggcgtaacccgggcgatgaaccgatttttaccagtacgttagaactggatatgaatgacgttgaagcgagcctggcagggccaaaacgcccacaggatcgcgttgcactgcccgatgtaccaaaagcatttgccgccagtaacgaactggaagtgaatgccacgcataaagatcgccagccggtcgattatgttatgaacggacatcagtatcagttacctgatggcgctgtggtcattgctgcgataacctcgtgcaccaacacctctaacccaagtgtgctgatggccgcaggcttgctggcgaaaaaagccgtaactctgggcctcaagcggcaaccgtgggtcaaagcgtcgctggcaccgggttcgaaagtcgtttctgattatctggcaaaagcgaaactgacaccgtatctcgacgaactggggtttaaccttgtgggatacggttgtaccacctgtattggtaactctgggccgctgcccgatcctatcgaaacggcaatcaaaaaaggcgatttaaccgtcggtgcggtgctgtccggcaaccgtaactttgaaggccgtatccatccgctggttaaaactaactggctggcctcgccgccgctggtggttgcctatgcgctggcgggaaatatgaatatcaacctggctgctgagcctattggtcatgatcgtaaaggcgacccggtttatctgaaagatatctggccatcggcacaagaaattgcccgtgcggtagaacaagtctccacagaaatgttccgcaaagagtacgcagaagtttttgaaggcacagcagagtggaaggaaattaacgtcacacgatccgatacctacggttggcaggaggactcaacctatattcgcttatcgcctttctttgatgaaatgcaggcaacaccagcaccagtggaagatattcacggtgcgcggatcctcgcaatgctgggggattcagtcaccactgaccatatctctccggcgggcagtattaagcccgacagcccagcgggtcgatatctacaaggtcggggtgttgagcgaaaagactttaactcctacggttcgcggcgtggtaaccatgaagtgatgatgcgcggcaccttcgccaatattcgcatccgtaatgaaatggtgcctggcgttgaaggggggatgacgcggcatttacctgacagcgacgtagtctctatttatgatgctgcgatgcgctataagcaggaacaaacgccgctggcggtgattgccgggaaagagtatggatcaggctcaagccgtgactgggcggcaaaaggtcctcgtctgcttggaattcgtgtggtgattgccgaatcgtttgaacgaattcaccgttcgaatttaattggcatgggcatcctgccgctggaatttccgcaaggcgtaacgcgtaaaacgttaggactaaccggggaagagaagattgatattggcgatctgcaaaatctacaacccggtgcgacggttccggtgacgcttacgcgcgcggatggtagccaggaggtcgtaccctgccgttgtcgtatcgacaccgcgacggagttgacctactaccagaacgacggcattttgcattatgtcattcgtaatatgttgaagtaacaagtatttgcttgccggttattttgcttccggcaagcaaactaattacacaatgcaagagggttatttgttcagcaaatggcccattttctcggctttggtatcgagataatgttcgttattggggttacgacctacaatcaatggtacgcgttcaacaatattaatccctgcttcggtcagaatttcgacttttttcgggttattggttaacaagcggacttcattgacgccaaggagtttgaacatatcagcgcaaagagtgaagtcgcgctcatcagcggcgaagcctaactggtggttagcctctacggtatcgtaaccttgatcctgcagtgcgtaagcgcggattttattcagcagaccaatgttacgaccttcctgacggtgatacagcaaaataccacggccttcctcggcaatttgcgtcaatgccgcttcgagctggaagccacaatcgcagcgcaagctgaacagggcgtcaccggtcagacattcggaatggacgcgcgcaagtaccggggtatgcccggaaatatcgccatagactagcgcgacatgatcgtgtccggttgccagttcttcaaatcccaccatcaggaaatcgccccatggggttggcagtttggcttctgccacacgtttaagctgcatgaaattctccagataatgctggttctgtattggcttattttgccataacgagaaggggttcacctaatcacgacgcgtcgatcgttcacggaatggcacaaatctgtcaatttttcctggaactggcgttttcagttatgattgtgggacttaccaaaaaggagaggccatgcgttcgattgccagacgtaccgcagtgggagctgcactattgcttgtcatgccagtagccgtatggatttctggctggcgttggcaacctggagaacaaagttggctactaaaagcggctttttgggttactgaaactgtcacccagccctggggcgtcattacacatttgattttattcggctggtttctctggtgtctgcgttttcgcattaaggctgcctttgtattatttgccattctggcggccgcaatccttgtgggacaaggcgttaaatcctggatcaaagacaaagtccaggaaccacgaccttttgttatctggctggaaaaaacacatcatattccggttgatgagttctacactttaaagcgagcagaacgcggaaatttagtgaaagaacagttggctgaagagaaaaatatcccacaatatttgcgttcacactggcagaaagagacggggtttgcctttccttccggtcacacgatgtttgctgccagttgggcactgctggccgttggtttgctgtggccgcgtcggcgaacgttaaccattgctatcttgctggtctgggcaacgggagtcatgggaagccgcctgctgctcgggatgcattggccacgcgatctggtagtagctacgttgatttcgtgggcgctggtggcggtggcaacgtggcttgcgcaacgaatttgtgggccattaacaccacctgcggaagaaaatcgcgaaatagcgcaacgagaacaagaaagttaacgctggttgattttccgaatttagcccttaaatcatcaacaatgcgcgtggatgccatttcgcagacggcgcgaaaatggtactttaaagggctattgcggtaagttgaccataatttattcgctctaaccacataacgggaagtaatgtgaaatatttactcattttcttactggtgttagcgatcttcgtgatttcggtcacgttgggtgcgcagaacgatcaacaggtgacgtttaattatctgttagcgcaaggggagtaccgtatttccacattgctggcggtattgtttgctgcggggtttgctatcggttggttgatttgtggcctgttctggctgcgagttcgtgtttccctggcgcgcgctgaacgtaaaataaagcgactggaaaaccagctttcacccgcgactgacgtggctgtagtgccgcactcgtcagcggcgaaggaataactttctatgctggagttgttgtttctgcttttgcctgtagccgctgcctatggctggtatatgggccgcagaagtgcgcaacaaaacaagcaagatgaagccaaccgcttgtcgcgtgattacgtagcgggggttaacttcctacttagtaatcaacaggataaagcggtagacctgtttctcgatatgcttaaagaggatacaggcaccgttgaagcccaccttacgctcggaaacctgttccgttcgcgtggcgaagttgatcgcgctattcgcatccatcagaccctaatggaaagcgcctcgctgacctatgaacagcgtctgttggcgattcaacaactagggcgtgattacatggccgccgggttatacgaccgcgcggaagacatgttcaatcagctgaccgatgaaactgacttccgcattggcgcgctgcaacagttgctacaaatctaccaggctaccagtgagtggcagaaagcaattgatgttgccgaacgcctggtgaagctgggtaaagataaacagcgcgtcgaaattgcccatttctactgtgagttagccctgcagcatatggccagcgacgatctcgatcgtgccatgaccttgctaaaaaaaggggcggcggcagataaaaacagcgcccgcgtatccatcatgatgggacgcgtgtttatggcgaaaggagaatacgccaaaaccgtcgaaagtttgcaacgcgtgatatcccaggacagagaactggtcagcgaaacgctggaaatgttgcaaacctgctatcagcagttgggtaaaactgccgaatgggcagaattcctgcaacgcgcggtggaagagaacaccggtgccgatgctgaattgatgcttgctgatatcatcgaagcgcgcgacggtagtgaggccgcacaggtctatattacgcgccagcttcagcgtcatccgaccatgcgtgtgttccataagttaatggattaccacttaaatgaagcggaagaagggcgtgccaaagagagcctgatggtgctgcgtgacatggttggcgaaaaggtacgtagtaagcctcgttatcgctgccagaaatgtggttttaccgcatacaccctctactggcattgtccgtcttgtcgggcctggtcaaccattaaaccgattcgcggtcttgatggcctgtaatttttaaaaaaatccgactttagttacaacatactagttattgatgttccattgtgctccggcaacgacggcgcagaaaaagcctgccaggggaaaaatcgcaactgttaattttttatttccacgggtagaatgctcgccgtttacctgtttcgcgccacttccggtgcccatcatcaagaaggtctggtcatgacgttaactgcttcatcttcttcccgcgctgttacgaattctcctgtggttgttgcccttgattatcataatcgtgatgacgcgctgtcctttgtcgacaagatcgacccacgcgattgtcgtctgaaggtcggcaaagagatgtttacattgtttgggccacagtttgtgcgcgaacttcaacagcgtggttttgatatctttcttgacctgaaattccacgatattcctaacactgctgcgcacgctgtcgctgctgcagctgacttaggcgtgtggatggtgaatgttcatgcctctggtggggcgcgtatgatgaccgcagcgcgtgaggcactggttccgtttggcaaagatgcaccgcttttgattgctgtgacagtgttgaccagcatggaagccagcgacctggtcgatcttggcatgacactgtcacctgcagattatgcagaacgtctggcggcactgacgcaaaaatgtggccttgatggtgtggtgtgttctgctcaggaagctgtgcgctttaaacaggtattcggtcaggagttcaaactggttacgccgggcattcgtccgcaggggagtgaagctggtgaccagcgccgcattatgacgccagaacaggcgttgtcggctggtgttgattatatggtgattggtcgcccggtaacgcaatcggtagatccagcgcagacgctgaaagcgatcaacgcctctttacagcggagtgcatgatgagtgattccaacagccgtctggtctactcaacggaaaccggacgtattgatgagcccaaagcggcccctgtacgccctaaaggcgacggtgtggtgcgtattcagcgtcagaccagtggacgtaaaggtaagggcgtttgcctgattaccggtgtcgatctcgatgatgccgaactgacaaaacttgcagcggaactgaagaaaaaatgcggctgcggcggagcagttaaagatggagttattgaaatccagggcgataagcgtgatttattaaaatcactacttgaagcgaaagggatgaaggtaaaactcgcaggtggttaacataaaaagccacggatatatccgtggctttcgaatattttactgtgtgtattattcagttatttcgtactgaacagaatcaagcgtattataattgcgagtcgataatcgacatttatttacgattatttaccgacctggtgaccaataacaccaccgacagctgcaccacctaatgtacccaacgtactgccatcggtcagtactgcaccgcctaatgcccctgcacccgcgccgattgcggtgttgcggtcccgtttagaccagttagaacaggcactcagagacattgccagggtaattgccagaacagccgcggtcatttttttgctcgttacaaacataatactctctcctgaatttatgattcacggaagtaagctctctataactataatagctaagaataagcctggtgaaattattccgtgaaatctgctcgcgcgcagggttatatcacgcaggtgataatgacttcctgttatatcgctgataataattttatatcttgagagtgttaataacaggtaaatagtcttaattatcaaccaggaatcatcttagagcggatgatttgccaaactgcaaatcatccgtagagaagggaaatggttaaatgtcaacgacgtgaacggtgagtttactgtgctcaagatgcatcagatcgctggcgcgtattttcgaatcggtaatcacgcgattgaatcgctcaacgggaccgatggagtatgaatgtacagcaccaaatttcgagctgtcagtcaggactatcgcttcgcactctttttccagcacggcattgaccacatcggtacgcatcatatcgcgaccggtgaatccagtttcaggttgccagccatcaataccaataaatgctttgctgaaatgtacctgctggatgcactggcgtgtcaaagggccaaccatactttcgctttttttctggtacacgccaccgagcaaaatgacttcacaaggcgcgtctttcagcaaatgcgcaatgtagctgctgactgtgatgatagtgacatttttcttctgttcgcccagagtccgggcgagcagggcattgctgctaccattttcgataaagatggtttcgcccggttgaaccagtgacgcggcaaactcggcgagttcacgcttcagcgtatagttgctcatcatacgggtttcgacgtcatcactatcaagcgaaactgcaaagccatgtgcacggcggaggtaactcagtttttcgagggtgttgagatcctggcgaatggtaacttcagaaactccagtggcttttgccagatcggttacgctaacctgaccctggtcaatgaccatctgtagaatagtttgttgtcgggaattcatcgctgtaattcttataacgttataatactaaataaaaaaatactgacgcgccgggcatcctcaaataggaaaacctgaaggcacgattgttaaatctcccacggtgccttcgggatgtctggcgtagattcagcaacctggcgcaagagttctgctttaagtatctcgagattatggatcgcagagtggtaatcgcctgccacaaggatatctaacacaatatcaatacgttcggcaacgcgctgggcatcaaattcagacatcaaggacatccttatagcaaaagtggaaaatgaataatgcaaaaattgccgctaaaagagaagtgtttaacagcaacggctaattatcatccaggaatacgatatataatgacgggatatagcgctaagtatatatattcatctacttatgcgcgcttcagatagcgtttataccagcgttcgaaggcgacggcgggcatcggtttggcaaacaaaaatccttgccgctcattgatcccgttcttggttaaaaaagcatcttcctttgcactctctacaccttcggcgatcacctgaagattcaatgcctgggccacagcgacgatcgcccggaccagtgactgcgagacaggttgtttgtgaatatctcgaacaaaaacctggtcaagtttgatggcatcgatcggaaagcgcgccagttgcgaaagtgaagagtagccggtaccaaaatcatccagatgcacttgcgcacctagttggctaaattgttgaataacagacagtgccagttcatcattctcaatcagacaactctctgtcagttcaacatctatagggcagtattcaaaattgagttcctggagaacctgtttcagggcggtgaaaatggtttgatcggcgagctgacgtgcagaaatatttaccgccactcgcaggttaatacctttatcccgccacttcgccacctggcgtacgacatcgagaatcacccaacggcctaaaggcacaattagccctgactcttcggcgtaggaaatgaagtccaacggtggaatcaacccacgttcaggtgactgccaacgtactagtgcttccagactgcgcacttcgccacgccaggtgattttcggttgatagtgaataaccaactgatcgttttccagtgctttacgcaagttggtatccagccagagatattcaaatacccgttgattcatttctggggtaaaaacgcaaaattgtcctcgtccgccttccttcgctgtgtacattgctgtgtcggcgtgacgaataatagcagtgctgtctgaaccatgttcgggagagagtgcaatacctactgaacagctggtataaacttcaattaaaccaatgcgaaaggggagccgtaagcgggtcaaaattcgtgatgccattgcttccagcgcgctttgtgaggtgttggatgccagtaccagaaactcatcgccacctggacgcgccaacacctggtcatgttcgagacagcttaaaatagccaatgacacgtcgcgtaataactggtcaccaaacaaatgcccataggcgtcgttgacctttttgaaattatccaaatcaagatacacaaccccaactttattgttatctgcatgattaatagcgtgatcgattaaatcctgcattgcgttacgattcggcagtccggtgatactgtcggtatttgccagaatacgcagtcgctcctgagcgcggcgctcttcggtaatgtcggtgccggaacagattaaaaaaatctcgtttttgccactgccgctgtggacaaatttattgcgaaacagaaacagccgctggcctttacgtgttggtatccacagttcgacttcatatgcattgccgcttcgaaaaaatacacggttattgcgcctggatgccgcagcttcacgacggctcataaacagtttaaacacgctttggccaatgacgtcgtgttctttcaacccagtgtaatcttcacataaccgattgaagcgttggatattcccccggctgtcgagaatcactattgcggaatgtgcttcagaaactacctgctcagcaaaggaaagcccgtgtgataaatcacgagcaactgccggtgtgtcatgccatgcagacgcgttgccagcccattcccgtttattgatttttcgtcctaccagatgcacagaaagatcgctctcatcgacggtcagactcatcatcaggctggaggtgatgaccgtcatttccctgatgcgagcagcctgttcggcagataactgcaaagtacgatcaggttctgtggtttcggtggtagaaaagcgcaaaacatcgctgctttccgtcaaccgccagtatggattgtgcgatccgagaaagttgtacaacgttgtggactccctaacggttttcatgatgcatatcctccggttaactgcggagtccgcggttaaataaaaggaacaacatgacttacatgaaattaacggcggctaaacgcattgttttttttatatatttatttgtaatccagttttggaaaaacgccagttttcaaacgaaagtcagttaaaaaatctgcctggatataacgaaggtagagcggggaaataaacggcccatccatgaggaatgggccgtgaaaggagattacgcgaccgggcgcgcaataatgctgcgggtttccatgcggacttcggcaatggtgacgtcaataacgtcagttactttgtaaaccgtttcacctttaatttgtacagtgccgttttcctggctgcaaaccagttcatcgcgcatagcgtgtaagaaaggtgccggaataaaggcgatagcgccgttatcaaccaaacgcacacgcatgccgccacggctgatatcgacaatttccgccgcgaaacgggtgtcggtcccggctttgtctttcaggaagcgtgcgtataaccagtcgccaacatcacgttctgccatccggttgagacggcgacgctcggccatttggacagtgatttcatcctgtgggcgcgtcgcagtttcgcctttgataaccgctttcagcagacggtggttgatcatgtcgccatatttacggatcggcgaagtccaggtggcgtatgcttccagaccgaggccaaagtgaggaccgggttcagtgctaatttcagcaaatgactggaagcgacgaatgcggctgtcgaggaaaccagttggttgcgcatccagttcacgacgcagtttgcagaaaccgtccagcgtgagcacttcttcggcatcgacatgcagaccgtgcgttttcagcaacgctgccagcgcgtcggcattcgccggatcaaagcccatatgcacgttatagatgccaaaaccgagcttatcgcgcagtacgcgggccgcacaaatgttagcggcaatcatcgcttcttcgacgatacggttggcaatgcgacgaggctcggcgacgatatccagcacttcacctttttcaccgagaataaagcggtaatccgggcgatctttaaacaccagtgcgtggttatgacgccactcgccgcggcgttggcaaatttgcgctaacaaacggacttgttcggcaattgcttcactttcaggctgccagtcaccggtattttccagccagtcagaaacctggtcatacaccagcttcgctttggattcgatggtggcggcaaagaattcgatattatcttcaatggtgccatcagcggagagcgtcatgcggcatgccagtaccgggcggacttcattggcgcgcagtgagcagagatcgtcagaaagctcgcgaggcagcatagggatgttgaagccaggcagatagttggtgaatgcgcgaattttcgcggctttgtccagcttgctgccttcagcaatccacgcggttggatcggcaatcgccacaatcagctgaagtttgtcatccggcaacgccttagcgaaaagggcgtcatccatatcttctgtgctggcactgtcgatggtgacaaaatccagcgcggtcagatcttcacgaaccagaccttcatcgagcatttcggtagcgacgccgtctggtgcttctttttccagattatggcgcgcaagggtaacccaccacggtacaaagtggtcgtcaccaaaagtgatgtattgtatcagttcagcatagaaagaacgatcgcctttcagcggatgacggcgcatttcggcaaccgcccagtcgccttctttaaactcgtggttcaggccacgggctgcgcggcaaggaatggcgtcttttaagagtggatgatcaggaacgatggccagacggtcatttttgccctgaactttacccacgaaacgagtcaggaacggttcaaccagttcttctggctctgcggattcacgttctttttcactgtggatcaccgcgataattcggtcgccatgcatgacttttttcatctgcggcggcggaatgaaataacttttttgcgcgtcgacttccaggaagccaaagcctttttctgtggcttttaccaccccttcagcgcgtggcgtctgggaatgcagttgctgtttaagctgcgctagcagcgggttgtcctgaaacataattgtctattttggtggccattagagcggctgacagttttacgcgaatctgtctgacgcggcaaggttaatatgtctcacccaacgcgatttttaagcgatttatccagccacacagcccgctccataccagcagattaataatctgcgttgatgatttttcgtgttcgagtaaagggctgaactgggcggcgctaaagcgatcgggtgctcgggtcagccattgtatcgcctgaacggtagcgtgctcaacagaatgacggtcagcccattggttaattttattttcgcccttgcgcagaagggggctgatttttttatattcatttgatgaatccatacaggcggcaaaacaagcaggactgccatttatccgcgcgcataacaacgccgcaagcttattatccggctgtgtattaacccgtgtactgtttaacaacctttcgagaagggaaagtgaaatagggtggagagagagtgtttcggccagttggcaaagttctgctgttgaactttttgtgtactcttcaggtagtttttccacctcatagctgcttcgccagcgtattgattcatcagcaaacagtgacgcgtcggcgtagttttgtatttccagaccgggtaaccagcgtaccgggtgcccgagataagcctgaaatgtcgcaatggtccgcgcctgaaagccaataaaaccaatgatttggttaatgatcacacagtccccggcagtaagaccgacgtcattcagatgctggcgcgatcggttgtcgataatagaaggcgagctagccagttggcgggcatattgcgtgatttgtgccaacctatgattgctttccctggaggaatcaggcccggggagcggcgtaagtcgcgccgaatagtagttacataaccgctggacgccgcaaacctgagcaaccgtcagggccgtagacaagcgttcataagcggtgaaggtctgtgaacgggtcacggtaagctggtcagggaacaattccactgcaagaacgcgcgcagggaccagccatgaaaggaagggagccagcgtttcttcatcaaggatcacgtcgagcagaaagggatcgctgacctttgcggcttccgggaccagaggcagaacgtcatactccgcagtactggattgcgtttcatgataccagtggcttttgccggtgatgtggcgttgttccatgggcgctccttggtcgtaaaggaaatcgttatcctgacgcaaggcgggaaggggagaaagacggatcggcgataacaaatatcagaaaggtataacagagataacgggcggcagaacgccgcccaatatttaccaacagaatgattatttcaattcgagttcgttcattgcagcgatgctgaaaccgccgtcaacgtggaccacttcaccggagataccggcagagagatcggagcacaggaatgccgcggagttacccacatcttcaatagtaacggtacggcgaatcggggtaacggcttcgcaatgagccagcattttgcggaagtctttgataccggaggccgccagagtacggatcggaccagcagagatggcgttaacacgcacaccttccggacccatcgcgttcgccatatagcgcacgttcgcttccagagacgcttttgccagacccataacgttgtagttcgggatagcgcgctcagcgccaaggtaggaaagggtcagcagggcagaacccggattcagcatggagcggcaagcttttgccattgcaacgaagctgtaggagctgatgtcgtgggcaattttgaagccttcacgggtaacggcgttaacatagtcaccatccagctgatcgccaggtgcaaaaccaatagagtgtacgaaaccgtcaaatttcggccaaactttccccagttcagcgaacatggtgtcgatgctggcatcttctgcaacatcgcactgcagaacgatgtcagaacccaattgagcggcaaattcttctacgcggcctttcagtttgtcgttctggtaggtgaatgccagttcagctccttcgcggtgcatcgcctgagcgataccgtaggcgatggatagtttgctggcaacaccggttaccagaatgcgcttaccggaaagaaaacccatagctttaatccttattgttgatgcttgttgtgcctgaaaatcaggcgattcgtcgttttagtaaacagtacgaacagataaacggttattataatcaacctggctgtgagtagctatagttgccaggtccgaccggagcaggctgcggcagggtgggcgcttttccccttaccctaaccctctccccagaggggcgaggggaccatattgtgcaaatattgttaccccagcaacaaacaggctcatacagcccctaacccttttatggcgatggctgggatggttcagaccttgccgaatattctccagcactgtctccatgttttcaccacaacagctattcggctcggtcggccccctcgccctttcagggtgagggtgaccggcggttcagttcctgcagaataatctccagcaccgcctcctcattacaatcaatctcgttatgccagaaacgcagcacggtccagctctgcgactcaagccagctagtgcgcctggtatcataggcaactgccaaatcatgctgcccaccatccagctcaacgactacgcgcgccgagcagcaagcaaaatcgagaatgtagctccccaccggatgttgacggcgaaatttgaaatcaccaaaacgtcggctgcgaagatatcgccagagctttcgttcctgcaaagtgagattgcgtcttaaatcacgcgcatttgattttattttatccatcacctcattctgacaagatttaatctcttgtcagaatgaggtggataatctggaaggaggattcagaaaattagcgatctttacgccacgcatccgctgtcaatgcttcgccaaagtgcccggcaatcagccgtttggtgagttcatgcagcggcgatgccagcacatccgcggtgctccctcgttcgacaacctcgccctgatgcatcaccagcacctggtcgctaatgtgcttcatcattccgatatgctgggtaacataaatatacgaaatgccctgtttttcctgtaattccagcatcagattaatcaactgcgaacgcatcgacatatccagtgaagcgagggcttcatcggcaataatgacttttgggcgcaatatcagcgcgcgcgccagacccagacgctgtttttgtccgggtgccaacatatgcggatagtaactgacgtgatccggtagcagcccaaccatacgcatcgtttcaataatctgtttgcgacgctgttccggttccaggtcggtgttcaggcgcagtggaaaatccagaatttgcgagatacgttgacggggattcaacgaggtcgaaggatcctgaaaaatcatgcgaatacgctgactgcggaaggaataatcgccaaaatgcagtggatgatcgtcaatcaataactcgccgctggtaggctctatcattcccgccagcatttttgccagcgtggatttacccgaaccattctcgccaataatcgccagtgtctggccttcacgtagcgtaaagctcaagggttttaccgcttctacggtctgacgacgaaaccagccggtccggtagcggaacgttttacttaaattacgcacttcaagcagcgtttcgatcatctcactctttctccatgttcagcgggaaatgacaggcatagagatgatttttcgcccccgtcaaacgtggcgtcacaatgcattctcgttgtgcatacgggcaacgtggccccagacgacaaccaatcggtaactgttccagcagtgggatagcgccgggcagcgtattgaggcgacttttatgcggcatcgcgctgccgaagtctggtatcgcgcggatcagcgcctgggtataaggatgatgtggcatcgtcaccaactccttactcggcgcggtttccactgtttgaccgcagtaaagcacgttaattttatccgcccattggctaagcatttgtaagtcatggctgataagcaaaatagtggtattgctgttttggttgagacgcgtcagcaggcgaaagatttgcgcctgggttgttggctccattgagttggtcggttcgtcagcaatcagcagacgcggttgattcgccagtgcaatggctatcatcactttctgacattcaccttcggtcaactcatagggaaaactgcgcatcgcatctttgtgatctttaatccccacgcggtgcagcagttcaatggcacggcgtttgcgccagccaaaacgctgccaccaacggcctttataggtccaggctgggatgttttgcatcaactggcgacccacacgttctgaagggtcaagacacgactgcggttcctggaaaatcatcgacacgttatggccaaccagtttgcgccgttcgcgtgcggagagacgcagcaaatcgatatcatcaaaacgcatacggtcagcagtaacacgccagttatctttattcaccccacaaatcgctttcgcaatcaaactcttgccggaaccggattcaccaacaagaccgcggatttcaccttcggttaaggtcatacttacccggtcgacggctttaacccactcatcaccggttttaaattcaatggtcaggttacgaatatcgagtaatggcattattccacccccgcaataatcgcacgacgaacgccatcgccaaggaggttaaccaacaacacgctaatcataattgccgcacctggcagcatgacagtccacggggcgacataaatcagttccagcgcatcaccgagcatcgctccccattcaggcgaggggagttgtgcgccgagatcgagaaagcccagcgcggcgatatcgagaattgccatcgacagtgcgcgggtgatctcggtgaccagcccggcggtgatgtttggcatcacagcaaaccagagaatattcagcgttgatgcgccatccagacgggcggcgataacgtactctttttccagttcgtcatgcaccatgctgtaaatcgaacgtaccatacgcggcagcaatgccagccagacagcaaacatagcgtgggacaaactcggtccggcaaacgctacaacgataattgccaacagcagcgaagggatcgccagtaaggtatccagaatatggttaagcaccgctgagcggaggccgtgtgtcgccccggcgaaggtgcccagtaccaggccacagatcgtcgcggcaagcgtcaccacaaatgcgccacccacggttggcgcagctccgctcagtaaacggcttaaaacatcgcgtccgaggtcgtcagtccccaggaagaaagaaacttcgccatagcgcgaccatgacggcggcaataattgataaccgagaaattgctggtcgatgccgtaaggcgcaaaccagccgccaaaaatacacagtacagccagccccgcgcagccgtacaggccgaccatcgcagaggcgtcactataaaatttgcgccaggcggtacgcagcgtgcccggcgggcgcttttcgctgtatacgctatcgtaaggcataccattccttatgtttcagagggttagccatggcacccaaaatatcagaaatcacgttaacaataatgaccagtgatccacacaccatcactccggcggaaatggctgcgtaatcctgctggcggatggcgttaattaaccagcgccctaaacccggccagctaaaaaccatttcggtgatcatcgccagcgtcagcatggtggaaaactgtaagcccaggcgaggaataaccggcggtaacgcgttatgcagaacgtggcgacgcaaaatagtaaagcgcgacaaaccgcgggtcgccgccgcttttacatagttctggtcatacacttcgatagtgctgatacgcatcaggcggatcacttcagttgttggcgcaaccgacagggtgatcacgggcaatatcatatggcggattgcgctcatgatcatttcatcccgccatggtgagtccgaaagccaggcatcaatcaacgcaaaaccggtaatcggtttcacttcgtagagcagatcgaaacgccctgaaacgggcaaccaacctagcgtgagtgaacaaaacagcgtcaacagaagcgccagccagaacaccgggattgaaaagcccagtaaggcgatggcgttgatcaagttatcctgccacttatggcgcgtaatcccggcaatcatccccacggggatgccaacaatcagcgcaaaaccgaaggcgaggatgcacagttccatcgtcgccgggaagacctcttttaactgttcggcaatcggttgaccgttaatgctggaaacaccaaaatcccaatggatcaggccgttaaaccagaacacccaggcattccacagtgacgcgccttgtaacggcgcatgaggggtgaaatagctcaagctgaagccaacgaaggtcagcaggaacaaggtgacaatcaataacaaaatgcggcgtaaggtgaagataatcatggttttttcacctcatcctgtttctcgcgatacaccccagcaaaggaggcgttaccaaacgggctaagtaccagacctttgatatcgtaccgataggcctgcaaacgcaatgacgacgccagcggcaaaatgggcaattcctgcgccagaatactctgcgcttcgtcataggcttcaatacgcgccgccagctgctgcgaagagagcgccttacgcaatacgctgtcgaatttcggatcgcaccagtgggcgaggttggtctgcgaatgaattgccgcgcagctcagtaacggacggaagaaactgtccgggtcgttactgtccgtcgcccaaccggataacgtcagatcatggctcatatccatcaaccgcgcctcctgaaagcgaccttctaccggcacaatcaccacttttacgccaacctgcgccatatccgcctgaatcagttcggcagttttcagtggactggggttccacgcctgcgaacgtgtgggcacccacagtttcagcgttaaattttccagccccaacgacttcaactgttcgcgcgatttcgccggattgtattcagtaattttagcctcgttgtcataggcccacgaggcgcgcggtaaaatagaggccgccgtttcagccgtaccataatagatggattgcatcaggcgctggttattaatcgccagtgccagcgcatggcggacagcgggattatttagcggcggtttggcggtgttaaatgccagataggcgacgttcatcccaggacgcagcgttaaacgcaagcgcgggtcgtcacgcaaaatggatagctggctggcagcaggccaggccagaacgtcgcattccccggtcaggagtttcgacagacgtccggtgccgccggagcctaaatccaccactacctgcggcattaacggtttaccgcgccagaagtcatcatgacgttgtaggcgaataaattgcccggcgcggtattccgacaactgatacggaccggtgccgaccggttgacggtcgagttgctcctggcgatcttctttctctaacttccgggcatattctgccgacatgaccgaagcataatgggttgcgaggtgccacaaaaaagaagcatccggctgggcgagtcggaactcaacggtatgattatccagtttgcggacgcttttcacgttatcggcaaattgcaggctgtcgaagtaggggaagttgctgccgttgacgttatgccacgggttgttgcggtcaaaaattcgctggaaggtaaacaccacatcgtcggcattcattttacgagtgggagtaaaccagtcggttttttgaaacggaacatcgcgacgcaggtggaagcgataggtcgcgccgttgtcgagtacttcccagctttcggcaagttccggcatcaggcgataggtatagggatcgacatccagcagtcgatcataaaactgggcggcaagggtatcgacaattaacccactgctcgctttggatgggttaaaggtgttgacttgcccgctgacgcaatagacaaaaccgctgtcgcggatatcagcatgcgggggggattcaggcgcggcgattgcctgaccactcacaagtccagcaatcaccaaaagagacgataatacctggcgcataatattaagggattttatgtaaagaggctatcttactaatatttaatgacatttgccattaccgtttgtgttcaggggtcgtaatgagggccgtgtggttggtcgttgaacaggtggcgtcgccatctgttcaacattcgtacccgtgatttctctataactataactcacagaacaacttagcgaggagcagagcggtacgatcgtgagaaacccattaaagcacgctgcagtgcgtgtcattgttagccggatgcggcgtgaacgctttatccggacaacgatactgaccgatcgtctgcaattaaataattactcattaccccattgattcaaaaactctgcgatctcatcaatgcgtacgggattaatccccgcttcagcagccatttcatgttgggcttcttcgctgatctcttcattgttcatcaaacgggtgagcagtaactggaagtagtgggccagcggtgtgcgttcagcctctgcgacaggctctgcgcattcggtcgcgtactcatcggcaatatcaaaatatttaagcgggatatcgtggttcattatttgcccctggggttaatgcgctaagcataagggcggatgatagcactcgtgatccgggtcatacatctttttatagttaatggcgcggcgcgttaccctcaggcaggataatgcgccgcgcatccggctattacgtttcgctcaccggcgttctgtcaccttcgtacagcggcactttgcgatagcggcggatcagataccacaaatatgcgccgcctaacgaagcccataccagaccgagtgtcagtgacgttgactctaggttaacccacagcacacccaccgtcagcgcgccaaccagcggcatcagcaaatagtggaagtgatccttccagcttttattcattcctttacgccgccagaaatgattaaacaccgacagattcacgaaggtaaacgccaccagagcaccgaagttaatcagtgctgtcgcggtgactaaatcaaagaacagcgccgacagcgcgacaatcccgaccataatgacgttgagtgccggagtccgccattttgggtgcacatagccaaacacgcgctccggaaacacattgtcacgccccatcacatacagcagacgcgacacgctggcatgtgaagccaggccagacgctaatgtgttcacaaacgtggtgcagaggaaaatcgactgaaagagcttgccgccgacgtacagcgcaatttcaggcagtgcggcgtccgggtctttaaagcggctgatatcgggaaagaacagctgcataaagaacgacgccgcgataaagataacgccgccgtataccgccgtcaggaagatggctttcgggatcacgcgtgcggcgtccggcgtctcttccgaaagcgtggtcaccgcatcgaaaccgaggaacgagaaacagacaatcgtcgcaccggtaataatcgggatcaggtgcgcgttctcgctgataaacggctgaagtgaccagacggtgccaacgccttctcctttatgcagtccctgaactaccaggaagataaacaccaccatgatggagatttgcaccagtacaaacagggtattgaagttagcgaccaggttgacgctcttcagattcgcggcggttaaaatggcgacgaaggttaccacccacacccacggcggcacttccgggaagagggcggagagatagattttcgccaacaaaacgttgatcattggcaaaaagagataatccagcagtgatgaccagccgaccataaatccgacgtgcggattaatcgacttttgcgcgtaggtataggccgaaccggcctccggaaactggcgaaccagtttgccgtagctgatagcggtaaacagcacgcccgccagcgccagcaaataggacgccggaacgtgaccgtcgctaatgccggagacaataccaaaagtatcaaatacggtcatcggcgtgagataggccagacccatcattaccacctgccacaatttcagtgattttcgcagacgggttttgccgggttgcgcagcaatattcagtggtgaattaatagccataattgctgcctcccctgcgtaataaggtttgcggtcgtgtcaacctgaaatcaaacctgtttagcaagggaagcaaagggggcggagtccagtcagtagcaggaggggcgcatacgcagcctccctcgccatgcggggatttaatcatcggcatcatctcatttcctcgtcacagtcttaatcgttaacggaagcccgttgccgcctgcgctccataacgcgacatccgggaaatgtctggattaccagcaaatgtcaggcctggctccgctcaggccgatgaaacaaccccgcatggggaattacgcgtttttcaacatccactcaatttctgtttctgtgatgaggcgctcaaactgcaacagctcatcatttttacaggcgtgatacacatggcaaaaccgttcgcctaaatagcggcgcaggtgatcattctcgataaactcacccagggcatcgctctggcgaatcgggaagggtaagccttcctgttccagcccgttgccttcgacttcttcctgcaacggcagctcgttatcaaggccatgcaaaataccggcaaaaatcgctgccatcaccagatatgggttggcatcggcacccgccacgcgatattccacgcggtgattatgacggtcgccgcacggaatacgcagggcgacggtgcggttgttatggccccacgacgcctgcgtcggcacatacattcccggctggaagcggcgatacgagttcacgtttggtgccagcaacgccatcgacgacggcatcaggtcaatcatcccggcgagcatctttttcagcagcggcgaatcttcgccttctgtgtcagaaagcacattctcgccacgattattttgcatactgatatggatatgcatcccgctgcctgcgtgctcttcatacggcttcgccataaaagtggcgtgcatcttatgcttttctgccatcagacgcaccaggcgttttagcgccagtgcatcatcgcaggcttccagcacgttatcggtatggtaaaggttgatttcaaactgacccggcgaggcttcggcgaccgcaccgtcggcgggaattaactgtaactgcgccagttcatcaatatcattgagcacgtcggcgaagtggttgaggttatcaacggagtaaacctggctttgtgtattgcggtcatcggtgccgggcgcgcagggcggttgcagatacccttcagcgtcgcgctggcgatccagtaaatagaactccagctctaccgctacgaccgggaacaatccgcgctggcgcagctgctgccacaggcggttaagaacgttccgcggctcaacgtcaaagggagcgccatcttcatcgaccatggtcaggagcatctgaccgataaactctggatcggcggcagaaggggttaaggaaccgagaacaggaacacaagtacgatccggctcgcccatttcctgacccagacccgcttcttctactacgttgcccagaatatccattgcaaacaccgaggccgggaaataacaccctttctccaacttcttcaggcttgaaacagggatacgttttccacggaagcaaccattcaaatcagtaagtaaaacatcaacatattgcgtattcgggtagcgctccaggtagcgtttcacttcctgcgtaaaggcgctaccccgcctctcttctgactgctgaacaaagttctctacttcaacgatattggtttccatgattcttcgcctttggtttgttttccgctcgttatcaaagcgtaaaatataatgaccaccattcgaatctgtatgcaaactaaatgtttgtcaaatgttaaattgagtttgcaaaaatgaaaacccactgctagattgaaaaaatattgaacataaaggtcatttaaagcgcagtaatggcgataatttagtccactttgtgagattgagcatggaaaatataatgaacaatccggttatcggtgtcgtaatgtgcaggaacaggcttaagggtcatgcgacccagactctgcaagaaaagtacctgaatgccatcatccacgcaggcggcttgccaattgcgctaccacatgcgctggcggaaccgtcgttacttgaacaacttttgccgaaactcgatggcatttatcttcctggtagtcccagcaatgtgcagccgcacctatatggtgaaaacggcgatgagcctgacgccgatcccgggcgtgatcttctgagcatggcgttaattaatgccgcactcgaaaggcgcatccccattttcgccatctgccggggtttacaggaactggtggtggcaaccggtggttcgttgcatcgcaagctgtgcgaacagcctgaattgctggaacatcgggaagatcccgaactgccggtggaacagcaatatgcaccgtcgcatgaagttcaggttgaagaggggggattactgtctgcgttgttacctgaatgtagcaacttttgggtaaactctctgcatggacaaggggcgaaggtcgttagcccacggttgcgtgttgaagctcgctcgccggatggcttagttgaggcggttagcgtcatcaatcatccttttgcgctgggcgtacagtggcacccggaatggaacagtagcgagtacgcgctttcgcgtatattgttcgagggctttatcaccgcttgtcagcaccatatcgctgaaaaacagcgactctgactactacagtttaaggaaatgcaaatatgagtgatgagggactggcgccaggaaaacgcttgtcggaaatccgccagcagcaggggctttcacaacgtcgtgccgccgaactctccgggctgactcacagtgctatcagtacgatagaacaagataaagtcagccctgccatcagtacgctgcaaaagctgctgaaggtgtatggtctgtcactctcggaattcttttccgagccggaaaaacctgatgagccgcaggtcgtcattaatcaggacgacttaattgagatgggcagtcagggtgtgtcaatgaagctggttcataacggtaacccgaatcgcacgctggcgatgatctttgaaacttaccagcctggcacaaccactggggaaagaattaagcatcagggtgaggaaataggcactgtactggaaggtgaaattgttctgacgattaatggtcaggattatcatctcgtcgcggggcaaagttatgccattaataccggcatcccgcacagtttcagtaatacgtcggcaggtatttgccgaattatcagcgcccatacgcccaccacgttttaatctttttgttctgtaagccgggtaagcgcaatgcgcccggcaatctatacacaaaatcattcaagttgcatcaaggcggcaagtgagcgaatcccgatgagcttactcaggtaagtgattcgggggagcgaacgcagccaaggcagaggcggcttgaaggatgaagtgtatataaagaatgtcgccagaaataaacgggcatacggcccggggatctctgcgccctgacgttcacaaactgcatatatctgatagacgtgaaacaggagtcataatgaattttcatcatctggcttactggcaggataaagcgttaagtctcgccattgaaaaccgcttatttattaacggtgaatatactgctgcggcggaaaatgaaacctttgaaaccgttgatccggtcacccaggcaccgctggcgaaaattgcccgcggcaagagcgtcgatatcgaccgtgcggtgagcgcagcacgcggcgtatttgaacgcggcgactggtcactctcttctccggctaaacgtaaagcggtactgaataaactcgccgatttaatggaagcccacgccgaagagctggcactgctggaaactctcgacaccggcaaaccgattcgtcacagtctgcgtgatgatattcccggcgcggcgcgcgccattcgctggtacgccgaagcgatcgacaaagtgtatggcgaagtggcgaccaccagtagccatgagctggcgatgatcgtgcgtgaaccggtcggtgtgattgccgccatcgtaccgtggaactttccgctgctgctgacctgctggaagcttggcccggcgctggcagcagggaacagcgttgtcctgaaaccgtctgaaaaatcaccgctcagtgcgattcgtctcgcggggctggcgaaagaagcaggcttgccggatggtgttttgaacgtggtgacaggttttggtcatgaagcggggcaggcgctgtcgcgtcataacgatatcgacgccattgcctttaccggttcgacccgtaccgggaaacagctgctgaaagatgcgggcgagagcaacatgaaacgcgtctggctggaagcgggcggcaaaagcgccaacatcgttttcgccgattgtccggatctgcaaaaagcggcaagcgccaccgccgcaggcatcttctacaaccagggccaggtgtgcatcgccggaacgcgtttgttactggaagagagcatcgccgatgaattcttagccctgttaaaacagcaggcgcaaaactggcagccgggccatccacttgatcccgcaaccaccatgggcaccttaatcgacagcgctcacgctgactcggtccatagctttattcgggaaggcgaaagcaaagggcaactgctgctggatggtcgtaacgctgagctggctgccgccatcggcccgaccatctttgtggatgtagacccgaatgcgtccttaagccgcgaagagattttcggtccggtgctggtggtcacgcgtttcacatcagaagaccaggcgctacagcttgccaacgacagccagtacggccttggcgcggcggtatggacgcgcgacctctcccgcgcgcaccgcatgagccgccgcctgaaggctggttccgtcttcgtcaataactacaacgacggcgatatgaccgtgccgtttggcggctataagcagagcggcaacggtcgcgacaaatccctgcatgcccttgaaaaattcaccgaactgaaaaccatctggataagcctggaggcctgaaatgaccgaacataccagcagttattacgccgccagtgcgaataaatacgcgccattcgacacgctgaatgagtcaatcacctgcgacgtttgcgtggttggcggcggctataccgggctctcctccgcgctgcatctggcggaagcgggctttgacgtagtggttctcgaagcctcacgcatcggctttggcgcaagcgggcgcaatggcgggcagcttgtgaactcctacagccgcgacatcgacgtgatcgaaaaaagctacggcatggacaccgcccgtatgctcggcagcatgatgttcgaaggtggtgagatcatccgcgaacgtatcaaacgttatcagattgactgcgactaccgccccggcggcctgtttgtggcgatgaatgataaacagctcgccacacttgaagagcagaaagagaactgggaacgctacggcaataaacagctggaattgctggacgccaacgccattcgccgtgaagtagccagcgatcgctataccggtgcgctgctggatcacagcggtgggcatattcatccgctaaacctcgccattggcgaagcggacgccatccgcctcaacggcgggcgcgtgtatgaactttctgccgtgacgcagatccagcacaccacgccagccgttgtgcgaactgccaaaggtcaggtgacggcgaagtatgtgattgtcgccgggaatgcgtatctgggcgataaagtagagccggaactggcgaaacgcagcatgccgtgcggcacgcaggtgatcaccaccgaacggctgtcggaagatttagcccgttcgctgatcccgaaaaactactgtgtggaagactgtaactatctgcttgattactaccgtcttaccgccgacaaccgcctgctgtacggcggcggcgtggtctacggcgcgcgcgacccggatgacgttgagcgccttgtggtgccgaaactgctgaaaaccttcccgcagctgaagggcgtgaaaattgattaccgctggacgggcaacttcctgctgaccttgtcgcgcatgccgcagttcggtcgccttgataccaacatctattacatgcagggctacagcggccacggcgtcacctgtacccatcttgccgggcgtctgattgccgaactgctgcgcggcgacgccgaacgtttcgatgccttcgccaatctgccgcattacccgttccccggcgggcgcacgctgcgcgtgccatttaccgcgatgggcgcggcttattacagcctgcgcgatcgtctgggcgtttaatttccgattaacagtgaagagtcaaaaggtgtgaaacatgagcaacaatgaattccatcagcgtcgtctttctgctaccccacgcggggttggcgtgatgtgtaacttcttcgcccagtcggcagaaaacgctacgctgaaggacgtagagggcaacgaatacatcgatttcgccgcaggcattgcggtgctgaataccgggcatcgccaccctgatctggtcgcggcggtggagcagcaattgcaacagtttacccacaccgcgtatcagattgtgccgtacgaaagctacgtcacgctggcggagaaaattaacgcccttgccccagtgagcgggcaggctaaaaccgcattcttcactaccggtgcggaagcggtggaaaacgcggtgaaaattgctcgcgcccataccggacgacctggcgtgattgcgtttagcggtggcttccacggtcgtacatatatgaccatggcgctgaccggaaaagttgcgccgtacaaaatcggcttcggcccgttccctggttcggtgtatcacgtaccttatccgtcagatttacacggcatttcaacacaggactccctcgacgccatcgaacgcttgtttaaatcagacatcgaagcgaagcaggtcgcggccattattttcgaaccggtgcagggcgagggcggtttcaacgttgcgccaaaagagctggttgccgccattcgccgcctgtgcgacgagcacggtattgtgatgattgccgatgaagtgcaaagcggctttgcgcgtaccggtaaactgtttgccatggatcattacgccgataagccggacttaatgacgatggcgaaaagcctcgcgggcgggatgccgctttcgggcgtggtcggtaacgcgaatattatggacgcgcccgcgccgggcgggttgggtggcacctacgccgggaacccgctggcggtggctgccgcgcacgcggtgctcaatattatcgacaaagaatcactctgcgaacgcgcgaatcaactgggccagcgtctcaaaaacacgttgattgatgccaaagaaagcgttccggccattgctgcggtacgcggcctggggtcgatgattgcggcagagtttaacgatccgcaaacgggcgagccgtcagcggcgattgcacagaaaatccagcaacgcgcgctggcgcaggggctgctcctgctgacctgtggcgcatacggcaacgtgattcgcttcctgtatccgctgaccataccggatgcgcaattcgatgcggcaatgaaaattttgcaggatgcgctgagcgattaatagcccaacgcaataatgtctgatgcgctgcgcttatcaggcctgcaaacgacgtattgattatgtatgccgaataaagcattcacgccgcatccggcaagttgtattgctcaacttcgctaaatctggtgctttttcaacaacgcgcggaactgatgataagttaaccccagtaattcagccgcgcgcttctggttatatttcccttgttgcaaactgagttgcagcaactctttttcctgctgcatctgaaactcacgtaaatccagcggcagtgttggaagcgaggtggtttctgaaacggcgatagtgtcttcaggcggacgccgtttaaagggatcaataatgatgtcatcaagcggataatcgctggtgccgtggcgatacactgaacgttccaccacgtttttcaattcacgaatatttcccggccaacgataattcagcaatgtttctctggcgcgctccgtaaaccccgggaacagaggcagcttgatttcccgacacatctggatggcaaagtgttctgccatcaacattatgtcgctttcgcgctcgcgcagtggtggcagttgtacaacatcaaaagccagtcggtcgagcaggtcagcgcgaaaagtgccttcattgaccatcgccgggagatcggcattcgtcgcgcataccaaccgcacattcacctgcaatggctggctgccgccaacgcgctccagttcaccgtactcaatcacgcgcaataatttctcctgcaccatcatcggtgccgtagcgagttcatcaagaaatagcgtaccgccgtcggcacgttcaaatctcccaggatgacgtttttgcgcaccggtaaacgcccccgcttcgtgaccaaacagttcggaatccagcagattttcatttaacgccgcgcagttaagggaaataaacggcccttgccaacgggaggagagataatgcaggcggctggcaatcagctctttaccggtgccgcgttcgccgatgatgagcaccggtttgtccagcggtgcgagatgcgaaacctgttccagcacttcgagaaagctgttcgcctcaccaagtaaattatctttgtattctgccatgatgaaattcgccacttgttagtgtaattcgctaactcatcctggcatgttgctgttgattcttcaatcagatctttataaatcaaaaagataaaaaattggcacgcaaattgtattaacagttcagcaggacaatcctgaacgcagaaatcaagaggacaacattatgggtattttttctcgctttgccgacatcgtgaatgccaacatcaacgctctgttagagaaagcggaagatccacagaaactggttcgtctgatgatccaggagatggaagatacactggttgaagtacgttctacttcggcgcgtgcgttggcagaaaagaaacagctgactcgccgtattgaacaagcgtcggcgcgtgaagttgaatggcaggaaaaagccgaactggcgctgctgaaagagagagaggatttggcacgtgcagcgttaattgaaaaacagaaactgaccgatctgattaagagcctggaacatgaagtgacgctggtggacgacacgctggcacgcatgaagaaagagatcggtgagctggaaaacaaattgagcgaaacacgcgctcgccagcaggcattgatgttacgtcatcaggcggcaaactcgtcgcgcgatgtgcgtcgtcagctggacagtggcaaactggatgaagcaatggctcgtttcgaatctttcgaacgtcgtattgaccagatggaagcggaagcagaaagccacagcttcggtaaacaaaaatcgctggacgatcagtttgccgaactgaaagccgatgatgcaatcagcgaacaactggcacaattaaaagccaaaatgaagcaagacaatcaataataacatccaggcggcgtccgaacgcgccgccgctcatcgtctaaggagtacttatgagcgcgctatttctggctattccgttaaccatttttgtgctgtttgttttaccgatctggttatggctgcattacagcaatcgttctggtcgcagtgaattgtcgcaaagtgagcagcagcgattagcgcaactggctgatgaagcaaaacggatgcgcgaacgtattcaggcgctggaatctattcttgatgcagaacatccgaactggagggatcgctaatggcgggcattaatctcaataaaaaattatggcgtattccacagcagggcatggtccgcggcgtctgcgccgggattgccaactattttgatgtaccggtaaaactggtgcgtatcctggtggtgctgtcgattttcttcggtctggcgctgtttaccctggttgcttacatcattttgtcatttgcgcttgatccaatgccggacaacatggcctttggtgagcagctaccttccagcagcgaattgctggatgaagtcgaccgtgaactggcggcaagtgaaacgcgtttacgcgagatggaacgttatgtcacttccgatactttcacgttacgtagccgtttccgtcaactgtgaggaaagttatgaatactcgctggcaacaggccgggcaaaaggtaaagcctggtttcaaattagcaggcaagctggtacttcttaccgcactgcgctatggcccggcgggtgtggcgggctgggcgataaaatcagttgctcgccgaccgctgaaaatgttgctggctgtggcgctggaaccgctgttaagtcgggctgctaataaactggcacagcgttataaaaggtgaggggagtttcgcaaaaattgttaaatctcaggcgtataatggatggcaattttcatccatagaaggacgcttacatgtttaaaaaaggcttacttgctctggcactggtgttttcactgcccgttttcgccgctgaacactggatcgatgttcgtgttccagagcagtatcagcaagagcacgttcagggggccatcaatattcccctgaaggaagtgaaagagcgcattgccaccgccgttccggataaaaacgacaccgtgaaagtgtattgcaatgccggacgccagtcagggcaagcaaaagagatccttagcgagatgggatatacccacgttgagaacgccggtggcctgaaagacatcgcaatgccgaaggtcaaaggttaaaagaattcaccatgagcggcgcttatgcgccgttttttttctgtcacaccttatttacatccccatagattatttgcgtcagctcacaaatacgctttttccctggtaaaaaatgatttcctgcgtgactaaaacccttgtgctcaattgacagtttattttctgcggagtagtctctcgtttcatgggaccgctaccacggaaaggcaacatgaaacagaaaattacggattacctggacgaaatctacggtggaacatttaccgcaactcatttacagaaacttgtaacgcgtcttgagagtgcgaaacgattaattacacagcgacgtaaaaaacactgggatgaaagtgatgtcgtgttaattacctatgccgatcaatttcacagcaatgatttaaaaccattacccacatttaatcagttttaccatcaatggctgcaaagcattttttcacatgttcatttgttgccgttttatccatggtcatctgatgatggcttttcggtaattgattatcaacaggtcgccagtgaagcgggggagtggcaggatattcagcaactcggtgaatgtagtcatttaatgtttgattttgtctgcaaccatatgtcggcaaaaagtgaatggtttaaaaactatttacaacagcatccaggttttgaagatttttttattgccgttgacccgcaaaccgatctcagcgccgtcactcgcccgcgtgcgttaccgttattaacgccattccagatgcgcgatcattcaacgcgccatttatggaccacctttagtgacgatcaaattgacctgaattaccgtagccctgaagtgttgctggcgatggtggatgttttactctgttaccttgcgaaaggtgctgagtactgagagatcccctcataatttccccaaagcgtaaccatgtgtgaataaattttgagctagtagggttgcagccacgagtaagtcttcccttgttattgtgtagccagaatgccgcaaaacttccatgcctaagcgaactgttgagagtacgtttcgatttctgactgtgttagcctggaagtgcttgtcccaaccttgtttctgagc

SEQ ID NO: 25 - DNA, 118318 bp, Escherichia coli
  source 1..118318: mol_type = genomic DNA
tttacgcacctcttttcctaacaaaacgccagccatctcaaaattagaactagtgttagacatatatccaagcctatctcttattttaagatacatctactgtctggtatttcagggggccagctcaaatgatgttattgggctgagtattttttttgcaacatcaagtgtcaagagaataacatgatgagtgttctgatgccttaactcatcaatgagtgggacgtcgttaagataagggtgctgaggtactagctggtttatcggctgagccccccgaagaatgtcacccacataatcagcccactgtgcattctgtgtgttgttgttattccttaaaccagccattttatctctccgcaatagtaatttattatgttattacagtaagttactgtacacgatcctgccatttactcattgcattcgtaccggctaacgtatgctcccaggaaatatcttcataaataaaggcaattctctcctgtggttccagttctttttccaggacagcatgcggtgtgacaaaatcaatacttgatattcgggcttttgacagatttattttataataaggctggtaaatacccgctttactggttcggtagagtataaattcacatattgccattttttcattgtcactaagtgcttttgccagcaatggtgaggatttatcaaccggtttggtgataattaattcatgatgattgacattttgacttcttgagatggaatgcattaacgcataaaccatgatctgatctttatgttctggctgcgctttgtttccgacagaatcaagcgttgagcaacctgctgaaattagcccttgtgtctctccactcaaagataaataacttatatttgccatgataatctcctttaattaaataattatttttcggccgtggtaccggttgccgcctctggcatgacgttattcttcagcagcagccagcggcttaacacgccttcgagtcgctcattaatttgtttttccagcgcatctgtattctgcttctgcgcacgggcatcatggtactgcgtcaacagagactcaacgggtgtttcctgccccagtccccgctccgcctgccagatgacatttttgatataggaaagggttagtccctctttctcgcgctgcatcactagatctgcaaaagcatgtaagtcctggcgggtctgcaaccagccacgcaactgcgggctactctgtgcgcgggttttgagtgcctcattccattgtgtcgaggcctgttgctgttgcaggctttccggccagcgactgtcggcaacacgcatcatctgcatcccggtttccagcggctgtaccggggaggtatcaagaagttgttgcagcctgcgctcatagttttcgagttcaggtgaggccatccacaccgttgctgcgccctgagcggtgtcgttaacctgtaacagttgctgctgcaccggatagacctgccaccaccacaatgctgaggcgacagccactgaacaggcgatccctgcgataaaccctcttaccgtactgccttgctttatcacactggcctgtgggggattctctgtcagactgcgcacttccactttcatctcaggcaggccgggcaggggaggcactaccgcttctggtgtggaagatgcctgtgtttccggggcataaatcagcgttctgaccgtggtctgtgcggcgttctcagtgttactcttcagctggggttcaagccgtttacgcgtgttctgcataaaatagagcagattctccacgcgcggaacgcgcttcagttccacctgctggagcttatcgcagataagctgcaatgcccgctctgtgcggtagatcagtggtaggtcggattccgcaaaggagatttgctgacgcagaatattgccggttcgggagttaaaccagtccagcatttcagtacgcgccgggccgccctgcggccagaacttatcccagtcgtggcttaccattgccgccagcagttccgcaccttcgcagaatcccgccagtccctgtgtccgtgtccgggcaagcgtatagtaggtggcggtgtgtaaatccacaccgttggctttaaaaatcgccagcgccagcgactccaccagtttccagttcagctcaggctgtgacgggtggctggctttgtttatttcctcgcggatggcgctgaattccggcagcccgcgcgggtcactgccggtaacgatagtttgtgtcagtacgttactattcatccctgcctcctcagtacagtgtgtctgacagaccaaactggctgaacaacccaccgctgaacgggttatcttccgtgtcggtatgcacacggtaggtcatcgcgccaccgtccacgctaaagcgcacggtaaagttgccatcctgtactccggtcagttgtccggccccgaacaggcggaactgcgcccacggcccgctgaagctgatactgcgcggcgcgttgccgctggtgccgatgagcgtcagcttactttcgttgccttcgcgcatgttgttaggccagaccagatgggcggtatagttacggccctggctgtaatcgactaactgaccgtcaaggttcagtacactgcggcgtttattgcctgaaagcgataccgtttccacggcaaaggatgttcccagaccgttctgtttgctgaagaagatgtcacggattttctgcgcagtttccagttgcgcaataatatcttcgcgaataatgacgttgttatcgccatcctccagactcaggtcattatcgataaacagcttcaggttctgctggtagaaggtatccagtatgccatccggtttaaagaagcgttcgaaggcatccagtgaggcatcctgtgcagaacgcggattaaacggatagttatttgccagttgctcgttaaacggtttcaccacgctgtcgcgccagtccacttccatataatgaacagcctccaccatcaccacatgccaggcctggtcagccagcctgccaacccagcggttgagcggagcaggcagcgtttttgccatctggcgggtggcgaatatcggatcgctgctgttctgatcaagccgtaactgcacggctttcagcgccgatttccctggtacaggcgcgttctggattgccagcaggtagcggtgcaactcggtgagttgctgatacacggcctgcatcgtgctttctttgtctttctgtactgccagggtactgttttccggggcgaattcatgcccgaggcgggtgagtaactggtaatccggctctgccagggcttcctcccgttctttggcagagagtttttcagaaaagacgcctggctgtgtgttgtcacgcagcacggtcagcgcccgctgcaaaggctggtcgccgctgataacctgctccagcgccccggtcagttgtccgatggactcaaaattgcggatattcagattgtccatcccggcccgccaggtggcggtgtagtcgctgatatactgctcggtcaactggcgctggatttccgcgcggtcggcgtcactgtatttcacattgcgggtgaggttaagtacccaggaatccatcgccgtcagttcaaccagttcatcgcgctgttttacaaaatagctttgcaggccgtaacgggtaagaaactgtggaacaaccagtttgttgtcatcggcagatgtaaacacctggtcaaaggttggccctacctggtcacgcagattgaggtcggcaggaagaacgcccagcgcccgcgttttcaggctctggtaaacccgctggtagacaggcagtttgctcagttctttctgtgctgataccacgggcttgtcatatggcgtccagcggctgatggcgtcaccgtcgcccgcctgacgctctgcatgccagtcagtatgagccagcgcgtagtcaagatgggacatcagttgtgcctggatatcgcgctggccgtggaatttttcgctccagcgttttgccatatactgcttcaccacctgattgttacgtccgcttttgtcctccagcattcgcatcacgcgcagcaccgcgagtttttcttcactctccggcggcgcggcgttcatcgctttgaccagcccgttaaacagcgagggcaggtaacgttgctccagcagttgcagataggtctgttccacataaggcccgatacgtcgtccctggtacagtcccatatcggccagacggctgcggtcgccccagtcgccataggccagtgtggcatcgcgtaccgggttcaggagcggcagttgcaggttgccaaagtcatcttccccctgcggaggcggcacgtccataaaggctttggcctgcttaagcacggtgatgccggactgatagttaccgttgtaatagtgatgccagccggtgatgagcagcagtgctgccacgccgcctgtggcagagaaaaccgtcaggcggcgacgggaacgtatcagccaggcgcggctctctgttgccagattaggctctgcgagtaatgcctgcgggaacaggctgcgggtgaaataaggcgcggtgtccaccaggggccaggacgccagtgggttattgcccagccggtactggcgggcggcagactgggtgaatatatcatccatctgtccacgctgaagcgaagaggtgagatagacaccacgcagcatcacgttcatattttcgccatcaagcagaccctcaagcagtgacaccagcggttcacggcttccctgcatctggcgggaaaaactgaataaagacgcgcgggtgtgagtctgagcgaccatcagatccggcaacgccagattcattcgatccacccatgtctgccagaaagcattcaactctgttcgccagtcatcattttcatgggcacggcgggtgaacgtgacgcccagaatcgcatcgcgatcctgtctgttgagtgactggaacagggcggcaaaaccctgtaataaatcaagccgggtcagtaccacgtaaaccggtaactggcagtgaagatgctggcgtatatcctgtaagcggctgcgcagcgtctgtaacagatgctcgcggcggcgtttgtctgcggtcagcagatcgggtaaatcgagtgtcagaataatcccgttcagcggctggcgcgcgcgcttttctttcagccagccgagggcatgttcccacagacggcgatgcaggatatccgcatcagcgggagcgcagagtgtgccgtcgatatcaaagatcaccgcctgtttaccgacatggggcgtgaggtacaggcgttgttctgcgccgcgtgcgccctccggggcataaataatgtcggacggaaacccctcgcgcagcagtgtcgttttgccactgcccgccgggccgatgaccatataccacggcaactgccacaggaaacggcggttgtcgagatggcgttgcaggcgcagcagccagcggtcaagataacgctgctgggcgttcagttccacgctgagcggatcaacggcttcctcgcgctgttgcttttgcattttttcaagctgttgcaggcgcttcatcacccggacggtaagccacaccagggcaataatcccccacgccgccgttgccagccagcggttcgccagtggtttgagccactgttcttcatacagcgtccacatcgggcctttccaccagatccacaccagcagaaaaatccacgccagtatcagcagccagaaagcagagactttaaaccggggcatcgccggtcgcagggctgatttgagtccgctgagtagtcggggtgttggtaatctgaacacaaaaactcctgttctcttttattgttctgccgtgaatttttgttctagctgctcaagcagggacggctcccagtctgccaccatcatctgcaatcccatcctgaacaacatccggtactgctgctgcgcaagctgtaccagccccgcctcttccgtcaactgtgcggcaaggtactggcggtgaaactgatcgcggggatcgccttcgggtagcatgtccagatatcgcagcgccgcctccagaccctgctcagcaaaacaggctctggctgccttcgattcctcaccgatttgcgcaaccggtgcaactttggcgtcgggcgaagctgccagccattgtttcgtctgctcactgataaacggtgtgtggtcattaaacagcagcccggtaagctggggcagacgctcaaggaagcggatgacctcatcgcggatggcgtctgccacctgtttgtaacccagacgcagcgccgtctgtgcagaaaggcagtgaccatccagccagtaaggagccagcagtacgcttttctccacctgctgccacagcgccatatcggcactaccgagctgagcatggtaatctgccaccatatcggcggagaccgcagccagtggagtacggccatcgctttccgcctggggcgtactggtgatgttctgccaaagcgcatggcggcgcagacggtagccctgcggtgaatccggctggcgttcacataaaatggccgccacttttaacagcgtgtcgcgccaggctttgtcgtcgtgactgtcgatgacgatttggggagccggagcactgggttgcgtcacgccgctttcagacgtggcggtggtctgtggtgaactaccggaggccgccggagtggggacaggagccggtgccgcacgattaaacgcacgctggtacagggcaaaaagatcatcagtagcctgtgccagttccggggcgttatgtgactgccagcattgcgccagttttgccagttcccctgacagcgcatcgcgctgcgctgtggcggcgttctgtgaaaaaacttcaatacctgtttcaaagcgtttaatgacctggctggcaaagcgttttttatgcgccatattctgcggcgcagccaccgcccagtaatgctccacatacagcgccagcaggcgcaatgcgagatgaggatcaccggcgtgttgcagggttctcagcagatgcgccagcagacgaaaatccttactctccgaagccagaatgaccagcccacggcgctggagttccgggatatccagttgactgtgggccagcgatcccagcttgacgatttcgccgtcgatatactcccagttcgggttgtcatctttcagcgccgatgccagtttctcttccggcaggttttccagcaggtgcgatatccagacattcggatcgcgtaagtccattgccatatttttattctcccgcccagtggcaggcatcgcgcaggggagcaatcgcccttgccagcccgtcaatgttaaaggtcagctttccggcggcattgtctgcgccggtatccaccgtcagcgtttttgcgccgaacagttgcttaatttcatcaatcccggataacccccggctggactccagcagggtgccgttctcgcgcacaaaccagtggctgcgcaatgcccggttgtcggcattcagagtgacggcgatatcatggacatccagagggtgcatcagcgccacctgcatccgggtgatattgtccacgcaactgaacatcagcaccgggcgtggcggaacatgaccgatagccggggtggttatcaccaccgtcgggcgctcccccggcacctgcgtcaccagcagttctgtggtgttgccctcgcggcgtttttcctgctctgtggcgcgggtccaggcctcgcccacaaaaccggctttgaccagcgccccgtcaaaccctgacggggacagcggtgccagcaggcggtcatagcagtcaagccgctccagcgccgcggactcccgccgacaggactgcatggcctgtaacgtggctgtcgcatccggcggggtcgtggtggcgacggcgaccgccacaccggccattgacgatgcttctgcgggcgcggcagtggcgggtaagcccgtcatcaggcccgcgataaaccatcctgtctgccggaaaacgcgcaacctgctcataaaaccgtttcatcctttgtgacggactcgtcgttctgagcatcttccacgtctgccgtaaatgcgccgtccactgccgacaaccgaatccgggcaaccgccgtattcgccgccattttctgcaacagcagcagggagagcggcggcagcatattgccgtcgatgaccgattccagcatcctcgcgccgttttccgcgcgggtgacgcggctcatgatttcgtccgtcacttccggttctataatcacctccgcgccaaagcggctgcgcagcacgttatccaggctggccagtttcccggcaatgatggtggcgagcgtctctttcgacagcggcaggtacggcaccacttccatacgcgccagcagggcaggtttgaagaagtcggccagcaccggatacagtacttcctgcatggtttccgggtcatcggcatgctcgactattacctggtagccgaggttggacgtcaggaagaagacgatatttttgcagtcaatcaggcggccttcaccgtctgccatttcgcccttatcgaacgcctggtagaacaggttgagcacatccgggtgcgctttttccacttcatcgagcagtactaccgagtagggtttctggcgaatcgcttcggtcagtacgccgccttcaccgtagccaacgtagcccggaggcgaaccaatcagtcgcgagacggtatgtttctcctggaactcggacatattgatggtggtcaggtactggcgaccgccgtagagcagctctgccagttgcaggacggtttcagttttacccacgccgctggggccagccagcaggaacgcgcccagcgggcgtcccggacggcgcaggtcggcgcgtgcggtcagcaggtgtttgtgcaggctggcaatcgccaggtcctggcctttgatggtgtcgccgagccattttggcaggtcggtgatgaccgacatttcattctgcgacaggcggttaagcggcacgccggtccattcggcaatcaccgccgcaatctgttttttatcgacgtgcggggaaaccagcaaccggtcgttatgcagggcgtccagttcggcagtgagatgtgccagacgttgtaccggggaaactgtttcagcggtctcttccggctgttctctgtcggcctcatcagccggtacggcaccggtattatcctgttctgactctggctgcgtatcctccacggtatctgcgtccggcaacggcgccgcatcgtcctctgccacgcccagtaactgctggcgcagcgcaataatctcccggaccagtgtctgctgctggtgccaggccgcttccagttcatccagcgccgtcagcgtttcatcatactgcaccagcacctcggtcatccgtgatgtgtcggtacgcagtccgatgcgaagctcgcgctcaagctggcgaatttccgcctcctgctggtggctcagagtggtcagcgccgagatttgcttcggcggcgacgacaggttgatggccacacgggcgcaggcggtatccagcacatcaatcgctttgtccggtaactgacgcccggagagataacgctcgcttaatgtcgcagcggcctgcaaggcgtcatcatcaatcagcacgccgtgagactgttcatagaccgccgacagaccgcgcagaataatggtggcttcggcagcgttgggttcgctgaccttcaccaactggaagcggcgcgacagggcggcatctttttcgaagtattttttgtactcgctccaggtggtggcggcgatggttttcagctcgccgcgcgccagcgccggtttgagcaggttggagatatccagcccgccctgctggttgcccgcgccaatcagggtatgtgcttcgtcgataaacagaatgaccggcaccggggaggaaatgacctccgccatcagccctttgaaacgtttttcgaattcacccttcaccgacgccccggcctgcaatgcgcccaggtcaagggtcatgatatcggtgtttttcagcttgtccggcacctggcctgccacgatgcgcagcgccagcccttcaatcagtgcgcttttgcccacgcccgcttcgcccaccaccaccgggttgtttttacggcggcggcagagaatgtcgatcatcaggtcgatttcgtggtcgcggcacagtaccgggtcaagcctgccgttacgggcgtctgcggtcatgtttttggcatagcgggcaagcagggtgtcagaggcgtccgtcattgtgcctgcgcctttaccgtctgcatccggcacgactgattccgccgactcctgtgtccactgcacaaagtcctgttgcagacggtcacggttaatgccggtcaacagccgggcggcagcaggcggtatataacgcagcggcgaatgcagcagggccagcagcaacacgccgccgcgcagttcgctgtgctgcatctcagccgacgccagcagccagccctctttaagccactcaaccagcatcggggaaaacgccgggtagctgtccgcagaacgggcggttgtgtagttctctaccgtcagcgcctggcgcaactcttccatgccaatatcgccctggcgggtaataacccgcaggtcactgcgtggcatggcgagcatctgaatgagcacatggctgacggtaatttccgctgcctgctgactcatacattcagaggcggccatctccagcgcctggcgggagaacaggttcagccgttttaccagcgtgggaagatcaatctggatcataaacgtccttatcgaagtaatttgtttagctggtgcaggatgtcctgcgtctggctgtccagccgcaacagatagaacaggtaaaacaacgccagcacgacaacgccaccacaaaaaatatgtttaacagtcaggcgactgatgagctgataacgcccgccctgggtttttttgtcctggtgtaacagcgggaaaggggcatcgccgcgcagtttatgcagaacgtggtacagacggcggtagatctgctcaaattccccctgatcctgtgctgccactttgtagcgcccgcgaaatcccagagaaaaacagatccagagaaattccagcagatcctggtaacgtttgggttcacggatcaggcgctccagcaggatgaaaactttctctccaccccaggcttcgttgtggaaatggaccagcaatgactgcttgatccactcgttcttgtttgaccagccgttaccgagcgccgcttcatcaataaacgtgcagaggatgtagcgaaacgagataatcacgcccggttcgtagccctgctcctgaagcagttgctccacggcctgaacatccgtcaccacctgagcaaaaagatgctccggcatcgtctggctgttcatggttgaaaggcgcattaccataccgagtagcggcgtggccgcgtcgatcatcggattcaggctgttgccacgaagcgcgagatggtagttgcgctggcttttttcgtcgtatccggtaaatggtggcagagacagtgacccctcatccatcgtcttaccctcttatcgcccacagttgcatgttcagatccgggaaactgccggatacatgcagtgcaacggccccggcggcagccatttctgtccaggcctgtccgctcttgtcgagttcgaaatagctgaacccggaatggtaaggaagctggcggggagccaccatcagtgcgcgcaatggaatgccggggatctgcacactgaccatattgcggattttttccggcgaggaaattttcgactgctggataaactggcgctggatctgatcgaccggcatgtttgccgccacggccagcacaaaggtggcagattgcagcagttctgtgtcatggatatcggcctgccagataccgtcacgcagatgcagcggcagattgacggctcttggcgacagtacggtatgcagcgcccgtttgacttccggtaacagcgttttaaatgttttggtcaggtcatgatgatcatacacatcaagcgggcagggcaggcgcgacggctcggtaaaggtcatcagttcacccagcaacccggcaagatcaaggtagaaatcttccgggtggagctgggatcgacgggcgtgatgggtaaaccgggtctggttacggttaagtaactgcaacatcataaattccgccacatccgcgatgccgctctgcgccggagagccaatgcggtttgccagatcgcttgcccgtccgccaatggccccctgtacctctttgagataaacacgcagtttcttactgacctgaatattctggcaggaggggataaaatcgtcatccagcgtcagggagccgtcggcatggcgatcgctgatacggcaaagcgggagcgtaatataggcgctcatatcttctgcaccgctcataatgcgcggcgtcagttgtcccagcgtcagtgttcgcgtgtcaccttcttctgaatgcaaatcccggacatcggcataattcagccggtaacgcccgattcgccgcccgtcgctgatttcatttctcacatcactggcgaccggcagagcgaggtagatattgcggcttctctcgtccggaaaatgttgcgggtgcagcggatcgggcagtgcgtcctggtcggggatagaaaagacggtgccgtcgggcagtgtgcctgacgcgctgtcaatcatgatcttaccctgtgccagcagttcattgttgagagtgagttcggtaaatccccaggataaatcattcatggcccggaaacgctggttatccaggtagtcgttgtaacgctgctgctgctggaaatggtgtggacgcatcagcatcccttcctgccacatcaccttgttgcgggtggttgccataattattcatcctcttttttcatttcgatgctgctttgacgtacatgcaccagcaggcggtaatggtggccggttccttccaccgtctcgatttgtttccattcagtggcctggtcatcggagaaataggccacgacaccaataaactgcgttttctcatccagctttaccggcggcagggttttgatggtgtccggcaacaggttgaaatcctggtggtcgatatagtttttacccagcacatccggtagcggcgtactggctatctggtcatagtcggctgccagcaattttgagtcgtcagtcaggtacaccagttgcacatccacggcggctgattcaccttccgcattggtattggtgtccggttcggtcagcagggtgacggttatttccgaagattgctccttcaggctcccgacctggatatccgggtttttgatcacctcactgatttttttcgccgtttcgcagccggttaatatgacgcacatcagcacgcaggccagaaacgccttcctgttcatgcttccggctcccgctgtttttcacgaagcacccggtcatagacctgggcgtagacctcgttaaacagcatctcaaacccctgctggcgatcggaggccagttcttcgtaataatggctgtacatttgccatgctccggcatcatccagcggctggcgcagttcatggctgcggcggtactgcacaaagcggcgcagcagattttgtggtgagaaagcatccagcaggacacgaagcgactccacaatcgctgcccggttagcttcttcgtggtggcggacattgcgcaggctttcactgacggcggcgggagccgccagatgtaccgggcttttaccttcggcaaacattacgtcgagcgcggtggcgtaatccatgttcaggcgcagcgggttatcttccagcgggcgcaaatgtttgtctgagaggctgttacgctgctgctgcaaatcgagcagaccttttattgcggcctgtaacgttcgtccggcctcctccagaaaatcatccgcatcgtcggaattgctcatggtaagcgagccgccaagaccgcgcagtaagggggtgaccgcaaggtggcgttgcgccatttctgccgcagagacgtcgtcattacgatcgccggggctggcataaatgggcggcagatccataaacggagtattgatccccccattacttgccggatcggacagcggtgccgatggccggacagccgcaatgcctgaaagcggatcgcccgtggtaatcaggctttcggactgaagtgcctggagtggatcggcagaaaaaccgtttaccacggtgtctgcaagctggtgccggtgagtcattcccggatagtgtggcgtaccctccgttgatagcagggtatccgtgagcatatcgcgattggtaacgatggtttcgggagtggccatttcctcatcgtaatggggaatatctccccggttcagatgaaccctcaccatcagccgtccgatctggatctcatcgccctggcgcaactgtattaggtctgatgttgctgtgacttttgcctgattcagccacagttgtgccgtctgcgggcgcagacaaaatgtgccatcgtgcaggataatggtaaaagcctgggccggaatgctatgctgacgatcctgtaccgaccagtggcattcgggggcatggccgacatttccctgctgtgtgaacagacagcgcgccgcccgcccgctttccagctcactgccgttaatgacctgcaatgaaagcgtctgtagtttctcttccggcatattctgctccgtgattatcataatttacgaccgtaccctgatggtgactgagggtcgttcttccggtgtgccgaggaagctggtccagcccagcagcgcacttttgttatcgcccaggcgcattgcgcccacctgctccggcgccagccccagatgtaagtcccaggcaagctgatcgcgcaggatgaaggacacaaacatcgtcagtggcaggaagttttcgccggacggcagaaaagagaggaactgttttcgggtcaggctggtaatactgagctggaattttccgctgagatcgggcacccgtgtacccagaacaaagttgcccagtaccgatcttcccgccagtttttcgccatttttaagtgaatagctccccagactattttgctgatccggttcaatatccaccttgcgacgctgccagttttgcagcgtcacttctgacaaatcaaagcagtgggacaccaggccacagataatttccggggatcgccccgggtttgccaggatcccggaatacgccagcattttgctgtgattaatcgccagcttatcgcgaagctggcggtggcccagcccgacaagggagtacatgcgctgcgagaacgcatccacaccgccgttacgaaaactgatgtgatagcggtacttacgccagatatgccagacaaactgggtcaggcggtggctgaacatatccagaaaatcacctaccggactttgttcatgtaccgctttccaggccaggtgatcgaggtaataaccggggagaggcgactggctcccctgtaaccccataaaggtggtggtcatcctgaatgcccctgacgtatcccgtttcagcgcactgatatcactcaggggaaacgcaaggctggcatcggcgctgaaacgcagggtttcctgtgtcggatcgtcgcgcagggataattctggcgtccccttttcaccctgtgccaggcggtgcaacagctccgccatcgcaaaaaaattgtaagagcaggcgttatgaaaaacctgtgccagcggctcattctgctctttatctgccgagggatttcccggactcagataagaggatgctgcccggttctttccgtccatttccatgtctcctggctttctgtgttcacaacggtcagcatgtggaatgagttaacgctggcgtacagcgacagaaaatgcgaaagcaccgtaccgagcagatacatttccccttcacagacaaacggctccgggtgcagatacagcgtggaggccagcccccgaacgggaatacccgtaaacaggcgatcaacgggtcgggtctccagacgctcaatggcatccagcttttgttgtgacagccgcgccgtctgcggatgatggattgcgtggcgatcaaagttggcgatgacctgcttcagcgcgtccgtatccagtaatgacagataattcaggttcatggcggagagcagggaccagtgcaggctgccatcaatgaccggccagagtggttgcgtcgggcgggtaatgttgcgaaatgaagcaacagccgcatttttaccggttgtgccggtgatatcaccggaacgaatttgtgacggaagctcacggttggtacaggtcagcgataccgaaaccacttcattactgagcagagattcgtctgacggataactgccatcagcatgtataaaggcaagggtatgatcaaagccgcgatggaacagggatgttttggtccggtgatgccagtacaccacttcccgcttccggctgtattccatctgatggctgaaactttcaaaggctggccactggcgcgcggcctgcgtcgaaacaggacgccccagatcttttttcctgaacatatcctggacctggctcaccacactgttaacggaaaatacatcgtaatgttgtgggtaatggcggctgggaaccagcggatagtctgcccgccggttgtccagcgtgatcgcttctgcatggtggataaataaattaatggcaggtgcgcaatacaggcgcagggaatcgcggcgcagccggatgtccacgggcaaagggcgcgaaaaacgcagttgcagggtaaagaattccgcctgcaatccgtcaggcaaagccggacaaccacaaagatcaaaaaagagaaacgcatcggggtaacagaaatactcctgaaggatccggtagccgctgtggacgtttttcggccagggcagcatggcatcctgcggctcaaaaccgacagcttttagcataaactcaggcaggcgaatatgctgttcacccacagtcaggtcggcaccctgcaagtattcgcagaaccataaataaagctggtcacgggtatagttgtcgtcattgccgagccagaagcgaagtttgttcagatccagcgtgcggaagtccgttcccggtgcgaccgaaaaggtgatgttgataacaccattacgggtcgtactgcggttttcaatctgctccaggcgaacgggcagcagccagatatcccggcagagagtgaaggtacagggaggcggctcctcctttttagcatcagagggcagcacttcatcaactctgatttccccggcgttggttgtaaactgctcattacgggggattaacaccggtacagaagacttatccatatccggcgtatattcaataagggtcattgccggaaccggacgcaggtaattaggccatagcatcttaataagcccgtgcgtcagttctgggaattcatcctcaattttctggcggagattgccggtaagaaaagccaccccttccagcaggcgttcaatatccggatccgcatctttttcggccaggaagcgggccagatggggtttttccgttgccagcagcttgctaagctggcgcaggtaatcgagttcttcccggaaatagcgttcttcaaattccatttgtcagtccacccggtaatgctggctgccattcggtgccatatcaaattcaagcacctcatgcgtttcgttaaatgtcacccaggctgtaatatgaaacgtcatatccagcgggctggaggcggatgaaaccactgcctgcacttcagcgtgtgagatccggggttcatagcgttctatacattgctcgatggcccgactcatggattcgcggaagttttcagccccttccggttcatcaatgcccagctcaggcgcaccccggcaactaccggaccgggtattaagaatgtttcgtaggttctggcgaatggattgcctgagcgaatgaatactgcctccctgccggtttctggccgaagaggcttccatacgctcaaaaagagaacctgtggttctttcccgatccggtatcatggtgtgttactccctgtctaaccggccaaccagggaaagctcaaaatttgcccccataaatttaaaatgaggcctcacgcttagcgcaacctggtaccagccgggttcgccttctacatccataacctcaactttggcagcgcgcagaggtttgcggctgcgcacgtctgcaggcgggttttcctggtcggcaacatactgacggatccaggtattaagctctctttctaagtcgctcctttctttccatgaccccagttgttcacgctgcaacaccttgatgtagtgcgctaaccgattgatgatgaagagataaggaagctgcgtacccagcttatagttggtttctgcatcttttcccggaaagtgcttcggtttttgtaccgagtttgcagagaaaaaggctgcattatcagagtctttacgcatggtaagggtgataaaaccctcttcagccagttcaaattcgcggcgatcggtgaccagcacctcggttgggattttggcctgaatctgccccatcgtttcgaacagatgcaccggcagatctttcactgcgccgccgctttgcggaccgataatgtttggacaccagcggtatttggcaaaactgtctgcgatattgcatgccagcatccaggccgtattaccccacagataatcttcgtggttctggctgacatcttcgtaatagttaaagttcttaacagggttatctgttggtgaatagggctggcgaagcaggaagcggggtgccgtaagccctaaatagcgcgaatcttccgagtcacgcagggcgcgccatttggtgtaggccggaccttcaaagatggcataaagatctttgatattaggcagttcggtccacgagttcagccccataaactccggggaaacggaggacaggaacggtgcgtgcgccattgcgcccacggcactgacgtattgcagcagtttcatgtcaggcgcggtatttttgaactcataagcgcccagcacggcagcgatgggttcaccgccaaactgtccgaaaccggacgaataaacgtgcttataaaatccggactgaataatttctggcgcaaactcaaagtcttccagaagttcctgcttggtgacatgaagcacgttgaccttgatgttttcacggaaatcaacgcgatccaccatggttttcagtgagcgccagaacgactcgacctgctgaaaggcaggcgcatggatgatgacatccatctggcggctgatgcgttcatcaatatctgcaatcatgctgtccacggccagtttattgaccggttcggcagatgcagtggattgcaggatgctggcaataaaggctgtcacaccctggcgggcaacgtcataaccttccgaaccgggctgaatacgggtctgtgccatgatttgatcaagcagcgacgatgcctgctcaggctgcccggcatgactggatacgagttcctcttcctgtaaagacatactgaaaatccttctgttttagctgtgtttctgaaaccggcttttcgccgtcagtgaagtacgcgctgccagtgcgacgcgctctgctgaaactcacaaaaatggataatctcatccaatagatcactgatacggcgatccagtgttgtaatcagcgcagccacaccatcctggttgatttcaacggacgggctgaaacatacctggtaaaccacctgcagaatgtctgcaacagagaggtggtatgtcccggagatatttttgtgtgccgtcatgcctggataaccctgtttaatgaaatagtggtggttatttattgctcaccagaccgatttctttgagcaactgctcgcgggactcttcattttccagcaatgcctggagctgggtacggaatgccggaaggttacccatcggccccttcagtgcagtcagtgcttcacgcagttccagcaatttattcacttccggaacctgccgggccacgctatctggtgaaaaatcatccagtgatttgatattcagcgccacattcagttcatcgtctgttgtgcttcccttcagggtggcggggacagtaaaattgaggccaatggctgcttcagccatcactgcaccgaaattgtgcttgttaacggaaactgcctgacgttcatccagtggggatgtttcctgcgtatttccggtatcgccgacaacgagcatgttaagcggaagttccacttcagccgtctggccatctgtttttgggacatacgatatattaatacgctcgcgaggcgcgacgctgccttcaaattttttgctcataaaagtgatccgtcatgttatctcgtacaggccatgaacacggcatattcgtaccgcaaaaaatatcggaaatgccgccttgatggcggtgaaaataaaatcaccactccttcatcaccccgcattttacgcttcaaaataaataagaaaaggactttttatcgatcgtaaagaggggtattctgcaagcgttaaatagattgtatgaacctgtgcaattcgcgtcaggtgtattatggcaataatttaaatatagagtttttttatgcatcttattgaattatataataattttattaaacataagctaatctaatgattgcttgtttatatatttgttttgtgattgattaagtgggtatttttaaggaatatctcaaaaattatcaaaatgataattcagaaaggataaatacaatatttattcatgattcagctttggccattttatggaggcaatacggactttgaacagttgggtatggttatccagatatatattattaagttattgctgaataagagatttaatgattttaaaaatagtttttacgacaaccgtaaattctagctcggtttgtatgtaaaaaatactgaaaaatgatgcggttccgtgaagtgagctgcatctgcctgtctgggattaacggcaggtcattgtaagtagtaattaaccacgttaacaaggagtttacaaatgccaacaccgtgttatatctccatcactggtcagacccagggaaatattactgcaggtgcatttaccgctgattctgtcggcaacatctatgtgcaggggcacgaagacgagatgctggtgcaggaattcctgcataacgttactgtcccgaccgatcctcagtccggtcagcctgcgggtcagcgtgctcacaagcctttcatttttaccgtggcgctgaacaaagcggttccgctgatgtacaacgcactggcctccggcgaaatgctgccaaccactgaacttcactggtggcgtacctctgtggagggcaaacaggagcattatttcactacccgcctgactgattcgacgattgtcgatatgaaactgcatatgccgcattgccaggacccggcgaaacgcgagttcacccagttgctcgaagtttcactggcctaccgcaaaattgaatgggaacacgtcaaatctggcacctccggtgccgacgactggcgcgcaccgctggaagcataagttaagccaacagcatccggctatcaggccggatgctgtttttgtattacgccgtagaaagaaaggttgtcagtaaggggttacgttcacgggagatggcggctgccggaaacttcggcggtagcgtgcctgaacgcaagcgtaacactgtactgtcacagccgctttaacagcgaactgtctgtttttccttaaccccggaggttgctatgtcaaccggattacgtttcacgctggaagtggacggcctgccaccggatgcttttgcggtggtctcctttcatctgaaccagtcactctcttcgcttttttccctcgatctctctctggtcagccagcagtttctctcccttgaattccagcagatcctcgacaaaatggcctacctgacgatatggcagggcgatgacgtacagcgccgggtgaaaggtatggtgacctggtttgaactgggggagaacgacaaaaaccagatgctgtacagcatgaaggtgtgcccaccgctgtggcgcacagggctgcgccagaacttccgtatcttccagaatgaggacatcgaaagcatcctcggcacgatattgcaggaaaacggggtgaccgagtggagcccgctgttcagcgagccacatccttcccgtgagttttgtgtccagtacggtgagactgattacgatttcctgtgccggatggcggcggaggaaggcatcttcttttatgaggagcacgcgcaaaaaagtaccgaccagagcctggtcctgtgcgataccgtgcgttatctgccggagtcctttgagatcccctggaatccgaacacccgtaccgaggtgagcaccctctgcatcagccagtttcgctacagcgcacaaatccgcccttcttccgtggtgaccaaagactacacctttaaacgacccggctgggcagggcgttttgatcaggaaggccagtaccaggattaccagcgcacacagtatgaagtgtatgactaccccggacgtttcaagggtgcccacgggcagaactttgcccgctggcagatggatggctggcgcaacaacgcagaagtggcgcgcggaacaagccgttcgccggagatatggccgggacggcgaattgtgctgacggggcatccgcaggcgaacctgaaccgggaatggcaggtggtggcgagcgatcttcacggcgaacagccgcaggcggtaccgggacgcaggggttcaggcaccacgctggataaccactttgcggtaatcccggcagaccggacatggcggccacagccgttgctgaaaccgctggtggacggcccgcagagcgccgtcgtgacgggaccggcaggcgaggaaatcttctgtgatgaacatggccgcgtgcgggtgaaatttaactgggaccgctataacccgtcaaaccaggaaagttcatgctggatccgtgtggcacaggcgtgggcaggcaccggctttggtaacctggcgataccgcgtgtgggtcaggaggtcattgtggacttcctcaacggcgatccggaccagccgatcattatggggcgtacctaccaccaggaaaaccgcacccccggcagcctgccggggacgaagacgcagatgacgatccgctcgaaaacctataagggcagcgggtttaatgaactgaagtttgacgatgcgacagggaaagaacaggtctacatccacgcgcagaagaacatgaacaccgaggtgctgaataaccgcaccactgatgtgataaacaaccatgccgaaaaaataggtaacaaccaggcgatcaccgttaccaataaccagatccagaacattggcgttaatcagatacagacggttggtgtcaaccaggtggaaacggtgggcagtaaccagattatcaaagtgggatcaaaccaggttgaaaaggtggggatcattcgtgcgctgacggtgggtgtggcttaccagacgacggtaggcggcattatgaatacctcggtggcgttgttgcagtcctcacaggtagggctgcataaatcactgatggtgggaatgggctacagcgtcaatgtggggaataacgtcaccttctcggtgggcaagacaatgaaggaaaacaccggacaaacagcagtttattctgccggtgagcatcttgaactctgctgtggtaaggcaaggctggtgctgacgaaggacggaagcatatttctcaatggtacgcacattcatctggaaggggagtcggatgtgaacggtgatgcgccagtgattaactggaactgtggtgccacacaacctgtaccggatgcgcctgtgccgaaagatttaccccccggaatgccggatatgcggcaattttgagtcaggtgcaaaaaattaaaacggaactggtgcagtgaccagataaaccatattaaaagcagaaggaattgattcatgggcggaaaaccggcggcgcggcagggtgatatgacccgcaagggactggatattgtgcagggttcagcgggggtgctgataggtgcgccgacgggagtggcctgttcggtatgtccgggagggattacctatgctaacccggtgaacccgctgctgggtgcgaaggtgctgccgggcgagacggaccttgcgctgcccggcccgctgccgtttattctttcccgcgcctacagcagctaccggaccagaacacccgcgccggtgggggtgtttggtcccggctggaaagcgcccttcgatatccgcttacagatacgcgatgaaggcctgatactcaacgacagcggcggcaggagcattcactttgagccgctgtttcccggcgagataagctacagccgcagcgagtcactctggctggcgcggggcggagtagcggcgcagcacagttcgcagccgctaagcgcgctctggcaggtgctgccggaagatgttcgcctgagtccgcatgtgtacctggcgacaaacagccttcaggggccgtggtggatactcagctggccggagcgggtgccgggggcggacgaggtgctgccgccggagccgcccgcataccgggtgctgacgggcgtggtggacggcttcgggcggacgctggcctttcaccgggcggcggagggtgatgtggcgggcgcggtgacgggggtgacggacggcgcgggccgccgttttcacctggtgctgaccacacaggcacagcgggcggaagtattccgtaaacagcgcgccacgtctttatcttcccctgccggtccccgttctgcttcctcttctctggttttccccgacacgctgcccgccggtacaggatacggcacggataacggtatccggctggaggcggtatggctgacacacgacccggcatacccggatgaacagccgactgcgccgctggcgcgctacacgtacacggccggtggtgaactgcgggcggtgtatgaccgcagcggaacgcaggtgcgcgggtttacttatgatgcggagcacgccgggcggatggtggcgcaccattatgcggggaggccggagagctgctaccggtatgatgataccggtcgggtgacggagcaggtcaacccggaggggctggactaccgctttgagtacggagagagccgggtaatcatcacggacagcctgaaccggcgggaggtgctgtacacggaaggcgagggtggcctgaagcgggtggtgaagaaggaacatgcggacgggagcattacccgcagcgagtatgatgaggcggggaggctgaaggcacagacggatgcggcggggcggcggacggagtacagcctgcatatggcgtcgggtgcggtgacggcggtgacggggccggacggcaggacggtacggtatggctataacagccagcggcaggtgacgtcggtgacgtacccggacgggcttcgcagcagccgggagtatgatgagaagggaaggctgacggcggagacctcgcgcagcggtgagacaacgcggtacagctatgatgacccggcgagtgagctgccgacagggatacaggacgcgacgggcagtacaaaacagatggcatggagccgttacggtcaactgctggccttcacggactgctcggggtacacgacgcggtatgagtacgaccggtacggtcaacaaatcgccgttcaccgggaggaaggcatcagcacttacagcagttataacccgcgtgggcaactggtcagtcagaaggatgcgcaggggcgtgaaatccgttatgagtacagcgccgcaggcgacctgacagcaacgatatcaccggacggtaaacgcagcaccatcgaatatgataaacgcgggcgtgcggtgagtgtgacggaaggcggtcttacgcgcagcatggggtatgacgctgccgggcgcatcaccgtgctgaccaacgagaacggcagccagtccacgttccggtatgacccggtggacaggctgactgaacagcgcggttttgacggccggacgcaacgttaccactatgacctgaccggaaaactcacgcagagtgaagacgaggggcttatcaccctctggcactacgatgcgtcggaccgcatcacgcaccggacggtgaacggcgacccggcagagcagtggcagtatgatgagcacgggtggttaaccaccctcagccatacctgtgaaggccaccgcgtgtcggtccactacggctatgacgataaaggccgcctgacgggtgaacggcagacggtggagaacccggagacaggggagatgctgtgggagcatgagacggggcatgcgtacagcgaacaggggctggcgacccgtcaggagccggacggtctgccgccggtggagtggctgacgtatggcagcggttatcttgcggggatgaagctgggcggaacgccgctggtcgagtacacgcgggaccggctgcaccgcgagacggcccgtagcttcggcggggcgggcagtacagcggggtacgaacaggccacggcgtacaccctcacagggcagctacagagcaggcacctgaaccttccgcagcttgactgtgactatacgtggaacgataacggacaactggtgcgcatcagcggcccgcaggagtgccgggagtaccgttacagcggcacgggaaggctgacgggcgtccacactacggcagcgaacctggatatcgatatcccgtatgcgacgaacccggcaggaaaccggctgccggacccggaactgcacccggacagcaccctcacggcgtggccggataaccgcatcgcggaagatgcgcactatgtctaccgctacgatgaatacggcaggctggaggagaagacggaccgcatcccggaaggggtgatacggatgcacgacgagcggacccaccactaccactacgacagccagcaccgtctggtgttctacacgcggatacagcacggtgagccgcaggtggagagccgctacctctatgacccgctgggccgccggacgggaaaacgggtgtggcggcgggagcgtgacctgacggggtggatgtcgctgtcgcgtaaaccggaggagacctggtacgggtgggacggtgacaggctgaccactgtacagacccaacagacaagaatccagacggtataccagccgggaagcttcacgccgctcctgagaatcgaaacagagaatggtgaacaggcgaaggcgcggcaccgtagcctggcggaggtgttgcaggaggacacgggtgtgacgctaccggcggagctggcggtgatgctggggaggctggagcgggaactgcggcagggcagcgtgagtgaagaaagccagcagtggcttgcgcagtgcgggctgacggcggaacagatggccgcgcaactggaggcggaatacatcccggagaggaaacttcatctttaccactgtgaccaccgtgggctgccgctggcgcttatcagcccggaaggggaaacggcgtggcagggggagtatgacgagtggggaaacctgctgggcgaggaaagcgcgcagcaccttcagcagtcactccgtctgccgggacagcagtatgatgaggagtcggggctgtactacaaccgcaaccggtactatgatccgttgcaggggagatatatcacccaggacccgatagggctgagaggtgaatggaatctgtataaatatccattaaaccctgttcggtttatagattctttgggtttaaaattccatgttaacggtgatccaagtgattttaatcaggctgttgagtatttaaaacaagattcacaaatgaaagaaactatagattttttatcaagctctgaagaaactataaatatagagtatattgaaggaaccaatgttagatttaattcgaataatatggcgatatattggaatagtagagcatctttattttgttcaactgaattaaactcgaaatcacaatcgcctgcattaggtttgggacatgagtttgctcatgcgcagtattaccttcttgataaggaaaatttcatggctcttttaagccgaacagataagaaatatgagaataaagaagaggcaagggttattacaataattgaatcgcgtgcggcgaaaactttaggtgagtgtaccagaggagctcatagtggactgcctttttatcgggtggatggaccgttgcagacgatgaaaataacgggtacgccagaatagtgaggttttttatgatgaaatatttgatggttttattgtctctattttctggttcggtactggggatggggcgagtgaatgaattgtgtggaatagatagcgtgaaaacgatagagataattaatcttccatcgtatgttaccacgttagttccgcttagcaaggaaggtcttaatgaaatatacagatataaagtggtggtgaatgaaattagcgatctttatgctggtaagataattgatttattgcaaatgaagtatttcagaaaagaaaaatataacaatataagatggggggttagtatcatttcgaaaggtaataataaatgtgaaatttattttgatgcttttggtgaatgtggaagtgtgaatggcattaacgtgtgttttgaaaaaaatgaaatgataggttggattaaaaaagaaatccctttgctgtcgcaaaaaataggtgggctttaaatggtagggcaatattcaaagacagtataggtaactatttgtatggccatgtaaggtaaaagaaaaggaataaaccatgagcggaaaaccggcggcgcggcagggcgacatgacccgcagggaaagatcatcagaagttcactttttgtactaaataattcgcattttatgtttaaaaattgagatattcctcattacctgaagctgttttttattgcttatacatgatcaaatactccttacataaataaggtgaacaaatggaacttaaaaaattgatggaacatatttctattattcccgattacagataagcctggaaagtagagcataaattgtcaggcatcctactattgactatttttgccgttatttctggtgcagaaagttgggaagatatagaggatttcggggaaacacatctcgatttcttgaagcaatatggtgattttgaaaatggtattcctgttcacgatactattgccagagttgtatcctgtatcagtcctgcaaaatttcatgagtgctttattaactggatgcgtgactgccattcttcagatgataaagacgtcatcgcaattgatggaaaaacgctccggcactcttatgacaagagtcgccgcaggggagcgattcatgtcattagtgcgttctcaacaatgcacagtctggtcatcggacagatcaggacggatgagaaatctaatgagattacagctatcccagaacttcttaacatgctggatattaaaggaaaaatcatcacaactgatgcgatgggatgccagaaagatattgcagagaagatacaaaaacagggcggtgattatttattcgcggtaaaaggaaaccaggggcggcttaataaagcctttgaggaaaaatttccgctgaaagaattaaataatccagagcatgacagttacgcaatcagtgaaaagagtcacggcagagaagaaatccgtcttcatattgtttgcgatgtccctgatgaacttattgatttcacgtttgaatggaaagggctgaagaaattatgcgtggcagtctcctttcggtccataatagcagaacaaaagaaagagccagaaatgacggtcagatattatatcagttctgctgatttaaccgcagagaagttcgccacagcaatccgaaaccactggcacgtggagaataagctgcactggcgtctggacgtggtaatgaatgaagacgactgcaaaataagaagaggaaatgcagcagaattattttcagggatacggcacatcgctattaatattttgacgaatgataaggtattcaaggcagggttaagacgtaagatgcgaaatgcagctatggacagaaactatctggcgtcagtccttgcggagagcgggctttcgtagtcttaccccgactctcccccagccttaaacacaacccccactcaccgcaacctaaactcatccgcatcccgccatgccggaaacttatcgcgatattcccttaacaccgccatcgacagctcggcatcaatgcgcgttgcctgatgcgcgtcggcagtagcgataatctcgccttgtggattaatcacccggctgtcaccgcgataatggcagccgttgccatcgctgccgacgcgattgcatcccgccacatacgcctgattctcaatcgcgcgggccgtcagcaatgcctgccagtgcagagagcgcggagcaggccagttggcgacgtacagggcgaggtcataatcgttgagattgcgcgaccacacaggaaaacgtaagtcgtagcacaccagcggcaaaatacgccagccgcgccattccacaatcactcgcgcattgcccgctttataatgtagatgctcatctgccatgcggaacagatgacgcttatcataaaaatgtaccgtgccgcccggctcaaccagcaaaaagcggttaaccgaaccagactccgtttgtaatgcaacactgcctgcaatcagcgcattgcactgctgcgccttagctgtcatccagttcactacgtcatcttgtgctagcgacgaagctgccgcttccatggcaaagccgctggtaaacatctccggtagaacgatcacatcgcgcccggtaataccttccagttgacgatcaaaatgacgcaggttggcagggccatccatccacaccagtggttgctgcaaaagcgtaatcttcaaaccaggcacggtgtacaactcctttatgcgaagggttttataactttaacaccttatcaggcagttgccttagcgcagaataaattgataacaaatgctgatattggaaatatctgatttgcaaattatcgtgttatcgccaggctttagaaggttaataacatgggcaggataagctcgggaggaatgatgtttaaggcaataacgacagtcgccgctctggtcatcgccaccagtgcaatggcgcaggatgatttaaccattagcagccttgcaaagggcgaaaccaccaaagctgcatttaatcagatggtacaagggcataagctgcctgcctgggtgatgaaaggcggtacttatactcccgcacaaaccgtaacgttgggagatgagacgtatcaggtgatgagcgcgtgcaaaccgcatgactgtggctcgcaacgtatcgctgtgatgtggtccgagaaatctaatcagatgacggggctgttctcgactattgatgagaaaacgtcgcaagagaaactcacctggctgaatgtgaacgatgcgctttcgattgatggtaaaacggtgctgttcgcggcgttgaccggcagcctggaaaaccatccggatggctttaattttaaataattagcggataaagaaacggagcctttcggctccgttattcaattacgcggcttcaactttccgcactttctccggcaactttaccggcttcgtcgccagctcttccggatcaaagtcatcaacgttaatactgcgcagacggctttcttcagctttcaccagaatagcggcttcatctttatcaatcagccccttcgccagcgcgttgtgcgccagttcatccagacgggtaaacggcaggtttttacccagctctttacagatccgctgatgaattgggtcggcggcaatcacatccaccagcgcctcttccagcaagccaaccggattatgctcgctcggcgtcaggtactgaccgcgaccaatgcgggaacgggtggcgttcggcacttgtaaaatcttcgccactttatgatccagcttgtcagaaggtgccagataatgacgtccggtcgggaagatcaccacattcagcagcccggcaaccacgcggttcgggaagttttgcagtaaatcatccatcgcctgttcagcctgatacagcgcatcttgtacgccccagtgcaccagcggcaggtcggcttcattacggccttcgtcgtcataacgcttcagaacggcagaggcgaggtaaagctggcttaaaatatcccccagacgtgccgagatgcgctcacgacgtttcaggctgccgcccagcacagccatcgagacatcagaaagcagggcgaggttggcgctcaggcggttcaggtgctgatagtagcgtttagtggcatcgccggttggcgtgctgctggttaaaccgcgcgtcaggcccagccagaagctgcgaactttgttgctaccgacgtgaccgatatgtttgaacaacagtttatcgaacgcgttgacgtcattgttcttcgctgcttccatctcttccagcacgtacggatggcaacgaatcgctccttgtccgaagatcatcatgctgcgggtcagaatgttggccccttcaacggtgatggcaatcggtgcgccctggtaagcacgcgccaggaagttgctctgcccgagcataatgcctttgccaccagtgatatccatcgcatcaataatcgactgctgcccgcggtgggtacagtgatacttaacgatagccgacagcacggcaggtttttcgccgagcataatgccgtaggtaatcagcgatgccgcagcatccatcacgtaggcattaccggcaatacgcgccagcggctcttcaatcccttccatcttaccgatagagattttgaactgacggcgaatgtgagcatacgcgcccgttgccagcgctactgatttcacgccgccggttgagttggaaggcagggtgatgccgcggcctaccgagaggcactccaccagcatccgccagccttgcccggccattttcggcccgccgataatgtaatcgatcggtacgaagacatctttaccgcgcgtcggtccattctggaacggcacgttcagcgggaagtggcgacgaccaatttccacgcccggcgtggtggttgggatcagcgcacaggtaatacctaaatcttctgcgccacccagcaatttctccgggtcggagagtttaaacgccagcccaagcacggtcgcaatcggtgccagcgtaatgtagcgtttgttccaggtcagacgcatccccagcacctgctggccctgccattcgcccatgcagacaatcccggtatccgggatagcgcctgcatcggaacccgcttccgggctggtcagtgcaaagcaagggatctcctgaccacgcgccagacgcggcagatagtgatttttctgctcgtcagtgccgtaatgttgcagcagctcgcccgggcctaatgagttcggcacgccgacggtaatcgccaggatcccgctcacgccggagagtttttgcagcacgcgagactgggcataagccgagaactccagcccgccgtactcttttttgatgatcatcgcgaagaaacgatgctctttaaggtacgcccacaactccggcggcaaatcagccagctcatgggtgatctggaaatcattcgccatccggcaggcttcttctaccggaccgtcgagaaacgcttgctcttctgcggtcaggcgcggctgcggatagttatgcagctttttccagtccggcttgccctggaacaagtcgccctcccaccaggtggtgcccgcatcaatcgcttctttctcagtgcgcgacatcggcggcatcaccttacggaaaccgcgaaataccggcgcggaaatcatcgacttacgcataggcgcaaagttaaatggcacgaggataatggccagaggcaccagtacccacgccgaccacagaccagcaacgccgagggcggctgtccaggcgagcaaaatcagactgctgataaataagctcacgcggtgatagaacaacgcgccgagcaggacaaccgtagcgagaatactcaaaatcatcataacgaaaagccccttacttgtaggaggtctgaccacttgtgatgatatggttgtagtggatgtaaaaacatttagcaatgtgtttacaatataattacaacaaagctcacattgttgctgtttttatccgcacttcaggtcaaaaagtcctggtcatagcacctgcccgtacttctcgcttttggcggtatccggtacactgcattttgtctattacatttatgctgaaggatatcctcatgtaccaggatcttattcgtaacgaactgaacgaagcggcggaaacgctggctaactttttaaaagatgacgccaatattcacgccattcagcgcgcggcggtcctgttagcagacagctttaaagccggtggcaaagtgctttcctgcggcaacggcggttcccattgcgacgctatgcactttgccgaagagttgaccggtcgctaccgtgaaaaccgtccgggctacccggcgattgctatttctgacgttagtcatatttcatgcgtcggtaacgatttcggtttcaatgatattttctcccgttacgttgaagcggtaggtcgcgaaggcgatgtactgctggggatctccacctccggtaactctgcaaacgtgatcaaagcgatcgcagcggcgcgtgagaagggaatgaaagtgatcaccctgaccggtaaagacggcggcaaaatggctggcacggcggatatcgaaattcgcgtaccgcactttggttatgccgaccgcattcaggagattcacattaaagtgatccatatcctgatccagttgattgaaaaagagatggttaagtaagtctggcgtaggccggataagacgtttacgccgcatccggcaattgtgcaccgatgcctgatgcgacgctgacgcgtcttatcatgcctacaaatctgtacgcgaaccgtaggccgaataatgcgttcacgccgcatccgacctgaaaattcttaaatcaatcttcgccgggggccatgcgctcccgctgttgtggaggttacccatgtgcgaattgctcgggatgagcgccaacgtccctaccgatatctgctttagtttcaccgggcttgtacagcgtggtggtggaaccgggccacataaagatggctggggcattaccttttacgaaggtaaaggctgtcgcacatttaaagatccacaacccagctttaattcccccatcgccaaacttgtccaggactacccgataaaatcctgttcggtggtggctcatattcgccaggctaatcggggcgaggtggcgctggaaaatactcacccatttacccgcgagttatgggggcgtaactggacttatgcccataacggacaactgacgggctacaaatcactggaaaccggcaacttccgcccggtcggtgaaaccgatagcgaaaaagccttctgctggctcctgcataaattaacgcagcgttacccgcgcacaccgggcaacatggcggcagtgtttaaatatatcgcctcactggcggatgaactgcggcagaagggcgttttcaacatgctgctttctgacgggcgctatgtgatggcgtattgctcgactaatttacactggatcacccgccgcgcgccgtttggcgtggcaacgctgctggatcaggatgtggaaatcgacttcagctcgcagaccacaccgaatgatgtggtcacggtgattgcaacacagccgctgacgggcaatgaaacctggcaaaagattatgccaggcgaatggcgcttattttgcctcggggagcgtgtagtttgatgccagttgtggctgcacaacttcgtggcttaacggcttgctgaccacgtaacgaccattgaccacagaaacggtcggtggcttacgggtttgctcaaagtagtcgtaacccggcttcagttgctcccagaagtccttaaagttggaatatttatggcgcttcatattggcgtcggtcatgcggaacgggtaaatactcacctgcacgctcggctgaccaaacaccagcgcaccagtaacgaactggaagatctcatcaataccctgattggtcattgcgtagcagccgatggaaacacaatcgccgtggatcatcaggtatttcccttcataaccatgcgcacggtcataggcattggggaaaccaatattaatcgctttgtagtaacggctgtctggttttaactgattacgctggacgctataaaacccttccgggcttttgaaatcgccctgacgctgttttggccctaagccgccggaatatttacagattttataactgtcgagcagctgatattgctcgcccattttgacgtagagatcgagcgtacgttcttccttgaagatctggatgtagacaggggatcccatcaactgctgcttatactctttgctcactggcgtggtcgagctactgctgcccagcaaaccggcaaacgaaacgcacgggatcaacaacatcgcaagaattaatgcgattttacgcatactgcttattccttgataaaacggttacacacgccaggacggcaaaatagatcccaaatcggaatagtctggatttggaaggctcacattatcaccaaaagagttttacgcaagcctgtcggcgcagggtttacaaatttcatcggcagcgtgctttacccaaagagcgccgcgtgagttccagttctctcaaatcgtaaaagtttatcggtaagtttgtaaatcaggatccagtccggttcgacatgagcatcgcgataacctttccatgaaccttgcagcgggtggtctttataaacagctggaagcggtaaagcattattgataagaagcgtcataagatatttcaatttattcatatccttatgacgcttttgtgcaagttttacatcctttgaaaattgtcccgagtattcaatatccctttgaatcatatttaaattcctaatttatcaaataaatcatcggcgtctttggccttatgaacatcaacgccagcttcgctgtttttgattgattgaatggttaattgattaggctcgcgtaaatcaaacggcaatgccttttcacgcgcgacctttgtgagggttatgcgaaccaggtcagagatggtcagccccatcccggccagtacgtccgccgcctgattcttcagatcttcatcgattcgggcgcgaacaaatgcgttagcagccattggggtatctcctgtgctgtatatttattcagcttgaattgtagctcaaatgagcaacagcgacaatccatgagtaatttaataaacggatgtttttacataattaactgaaatatatttattaattttataataatggtttattaagtttgttcaggtacgggccgggatacactgcaacatcaatgcatgatcagccattattgagtatgtccttgccgtcgattccctcttttgtgttgtcgggattactgttgctttgcttgccgttttcttcatttgccagcgccaccacatcacatatcactttcagctacgccgcccgccagcggatgcaaaatcgtgcgcgtttattaaaacagtaccaaacccatctgaaaaaacaggccagctatattgtggaaggcaatgccgaaagcagaagggcgctacgccagcacaaccgcgaacagataaaacagcatccagaatggtttcctgcgccgctcaaggcgagtgacagacgctggcaggcgctggcggaaaacaaccatttcttaagcagcgaccatctgcataacatcaccgaagtagcgattcaccgtctggagcaacagcttggcaagccttacgtatggggcggcacgcggcccgatcaaggcttcgactgtagcgggttggttttctatgcctacaacaagatccttgaggcgaagctcccacgcacggccaacgagatgtatcactaccatcgggcaacgattgtggcgaataacgacctgcgccggggagatttgctgtttttccatatccacagccgcgagattgccgatcatatgggggtgtatctgggcgatggccagtttatcgagtcgccgcgcaccggggaaaccattcgggtaagccggttagccgaacctttctggcaggaccattttttgggcgcgcgcaggattttgacggaagagacgattttgtaaatgggtaatattgacgaactggcaaaaggccggatgccacgcggcatccgacttgtttacatatgggctgaaaactcacgttctaagacatcaacaatgagctggttttttgaaatggaatgttgtctggcgacgatggtcagccgcgaatcaatgtgatgaggaacacgaagcgtcaggcgtttttgctcttcttcttcacgaaaaggggcaataccgtcctcttcacaatccgccatccactcatccagcgcgctttcgccctcacgatataatgcctcaatgcttgtggctacaaagtcacaataaccgtttacattgaggaacttgccgcgaaatgcgttgatatcggcttcaaatgtcactgcggctggttgacctttaattgtgataatgttcgatgctttattcataatctacccctacacagttaacaaaccactccttaagacctgctactgcacctttatccatcacattctttggatgtggctcatgtgtactgaatttggtcgttccaatctgaaatttccttctggacccattgttattttttattgttccacccaccgctttaatgagcgcaacaacatcatcccatttaattccagattttggcggctccgtcattacatcgtcgaatgtttttctatggcgggagcctagcgcgctgaccttaatcatactatcaatccatgacgtcattgtatggtgtcatcgtagtatgtttgcaatgtgacgtcaatcaatggtgtcagatgcatgcaaagcatggaaaagaatcctcatcaactcaacgctcccataatcttcaactccagctcatccggcacttcattatacgacagcacatgcagccccggcgcaaacaacctcgcatagcgtgccagcaaagggtgcaactgcggcggcaccagcagcaccgggtctttccccgccgctttcatctgctccttcacctgcggcatcgtactctggaactggttgagcatattcggatcgaccggcacgctgtcgagcatcactttcccgccctgttgcgcctgattcaccacgttggtcagcagattttccagctcattattcagcgtatacaccgtcagctcctgcttgcgaacgaacggatgggtaatgcttcgccgcagcgccaggcgcacatcagctgccagcagaatatgatctttggtcaccgcgctactggcgaccagcacggtggcaatggtgacgatatcgcgcagggaaacgccttcggtcagcagcgcgcggtacactttcagcaactggctgtaattcagcgccgcgcttaaatcttccgccaggcgcggtgccatcgacgacaaacggttatgcaactgcgtaatatcgtcatagttaaataaatcaggaatatagctacgcacaatcttattcacatgcgtggcaatcacgctggcgctgtcgatcacctgataccccatattcagcgccttcgctttctgcgcgggctggatccaggtcaccggcatcccgtacgccgggtcgttccccagcacgccgtcaatttcgccgtaggtttcgctggagggtagggccatcagtttatccgccggaatatccgcttcatcagccttaatgccgttgatgaaaatagcgtactggctgggcttgaggcggaagttttcccgaatacggatctccggcagcagcacgccgttaccgtcggatatcacctgccgcacgccgcgaatccgctgggtgagcgggttgccctgcgctttatccaccagcgccaccagcttgtagccgaggcttaagctgatgggctcgatcagcggaatggtttcccaactgacctgttgctcgctggtttcggtgatggtgcgggtcagcgtttcgagacttttctcttccgcttccgccgcctgcgggcgtttgctcatccgccagccggtaaagccaagcagggcgctgaacagcaaaaacggcagatgtggcattcccggcactaccgccagtacgaacataattccggtagcggtgtagagcaccgacgggcttgccagcaactggttacgcacgtcatgggcgatatcgccgttgtcgctgacgcgggtgacgataatcgccgccgcggtggagagtagcagggaagggatttgcgccaccagcccgtcgccgatggtcatcagcacatactgctggaaggcggcgtcggcgctcaggttgtatttgaagatcccgatacagacgccgccgatcaggttgatcgccagaatcatcatcccggcgatagcatccccgcgcacaaatttcgatgccccgtccatcgcgccgtagaaatcggcctcgctggcaacatctttacgtcgggtttgtgcctgcgcctgattgatcaacccggcattaagatcggcgtcaatcgccatctgcttaccgggcatcgcatccagggtaaagcgggctgaaacctcggaaatacgctcggcccctttggtgacgacaataaagttgatgatcatcaggatgataaacaccacaaagccgacaacaaagttgccgccgatcaccacctgaccaaacgactcaatcaccttacccgccgcgtccgcgccgagatgcccgtgcagcagcaccacgcgcgtagaggcgacgttgagcgtcaggcgcattaaggtggtgatcagcaaaatggtcgggaacaggctgaattccagcggtcgtttcgccgacaccgccaccagcagcaccatcaccgccagcacaatgttgaaggtgaacagaatatccagcagcgcaggcggcagcggcaaaataaccatcgccagaatacacaggatcaccagcggcacgccaagattgccgccgcgcagcagcgcgaggaacgatttagttgttttcgccatccagtttaagcacctctttgggaatggaaatatgtctgttcagggccgggcgcggctgtgcaccctcgcgccagtgtttcatttgcaggacgtaggtcagaacgtgggcgatggcccggtaaagctgaaacggaatttgctggttcacctgggtggtgtagtaaaccgagcgcgccagtcgcgggaactcgaccacttccacctgattctcagcggcgacctggcgaatatagagggcgatttcatcggtgccttttgccaccacaaacggcgcggcggcgcgcgacgagtcatactgcaacgccacggcgtagtgggtcgggttggtgatcaccacgttggctttcggcaccactttgcgaatttgccccatcgccaactgccgttgcagacgccgcacgcgcgccttcacttccggcttgccttcctggtttttatactcttctttcagctcctgtttggtcatcttcagccctttggtaaacagggctttcgccagcggcacgtcgattaacgcaaagaagataaacaggatgacaaagttgcgcatcacgcaggcgtagagcgataaaccctcattcatcgccagtttgaacggtagcgcctgcaggccgagaaaggaggcaaagttattgcgcaggcttacccacagcatcaccagcaccaccaccgacttcaccgtcatctttcccgtttccgccagatgttcactggaaaacagccgcccaatgccttttaacgggctgattttgctgaaatccgggaggatttttttaggcagaaacagccagccgccgggcactagtgaggagagtagcgcggcggcgggcatcggcagcaaggtgagaataaacttgccgagaattaacaggtgatggcgcagaaactggccgatcacctctgggttattaatctcctgtgcatactggtgcacgctgataaaactctcgcgcacaaaatcggcataccacgggaagctgctggagatcaccacaaatgccgcaaacaggctcgccgccagccccatatccttcgagcgcggcagttgcccctcttcgcgcgctttacgcagcttttacgccgagggtttctctgttttttcttcgctgctgctatccgccatagtgacctttcagcgcgtcgagttgctgcaacacaaaattcgccagatgcagatagtgatccggcaggttgtagagcagggtggcaaagcagaccagccccgccagcatgttgatgggaaaaccgagtgaaaaaaggttcagcggcggcgcaatgcggttgagcaggccaaagcagccctgcacaatcagcatgataaaagtggttggcagcgccagcagcgatgcggacgccagcacccagctaaaggccagcgcgatggtgcgcagggtttgcggatgcagcgcgttgccaatcggccagtaggtaaagcccttatacagcacactcaccagcagcagatgcccgtccatggcaaaaaacagcaggatcacgtagacgttgatgagctccgccagcacggtggtcgatgcgccactgctcgggtcgttcatcaccgccatgctcatccccatattgaacgagagaatttgcccggccagctgtagcgccagaaacaaaaactgaaacatcagcccgaataacatgccccataaaatttgctccaccgtcaggatcaggctgttgagcgatatcaggtcgtggggaacaggatgggggatcaacggcgtgatgatgattgccagcgccagcgacaaaataatccgcacgcgcacggtcagggcgctgttatccagcacaggcacatagcgcagaaacgccataatgcgcacaaagggaaaccacagccccagcgccagatccatcagttgcgtaacgtcgcttgtgcgcatctcaatgaaccagcaacgcggcctgggtaaacaggtgaatgcagagatcatgcaactggataatcatccatttaccgcacacacccagcaccaccagcgtgacaatcagcctcggcaaaaagcttagggtctgttcgttaatctgcgttaccgcctggaacacgctcaccagcaggccgaccagcaggctcggcactaccagcaccgaaaccagcaaaatcaccacttttatgccgctggcgacaatgtcggcggctacgtctatggtcagcatcatcagcccagccccagcccgcgaatgctggtggtgagtgtaccgatggtcagcgaccagccgtcgatcagcacaaacagcatcagcttaaagggtagcgaaacgatcagcggcgacagcatcatcatccccatcgccatcagtacgctggcgacaatcaggtcgataaccagaaacgggatgtaaatcataaagccaatctggaaggcggttttcagctcgctcaacacataggcgggcaccacaatcgagagatcctggtcggcggcatggcccttcgcgccgccgatagtcatgatttgcgccatcgcttttttgtcagtctgcgccagcataaagcgtttgagtggcgtcgcggcggtgcttaacgcatcggtcagggtaatctgatcattttcaaacggcactactgcgtggtcgtaaatattgagccagatggggcgcatcaccagcatggtgagggagagcgcaatgccaatcagaatgcggtttggcggcgtttgttgtagccctagcgcctggcgcagcagcgacagcacgataataaagcgcgtaaagcaggtcatcatcagcaccatcgtaggcagcaaaccgacgagggtcatcagaatcagcacctggattttgacgctgtactcctgagtgttgccgtgggtgaccacgttaagcagcgcaatatcgccgccctgggccaacgccaccggcgcaagcgccagcagcccaaggcccagcgtcagttgagtgcggcgtttcatggtgccaggtcgttgatatcgcgggtgttaaattccagcacgcgcaggccgtacttctcgttgaccaccaccacttccgctttgcccagcaggatattgttcactttgatatccagcggctccccggcgagtttatccagctcaatcaccgtgtcgtcgtcgatgttaaggaggtcggctaacattatttctactgatgacacttccagcgttaaggtcaccggaatgcgttttagcagcgtcatcgagtcggaaaaacggtcttccaggcgggtgaccagcgtttcagcgtcggcggattttgcgacaggcgcaacttcatcggtgaggccaaaatccccggctaaaatatcttcttgcttactcatggctattctcatttttgcccgccagctccgacaaaaacagtttgtctttgtcttccacaatcagggcgctaaataattcagattgcccaatcgccaccgggaacgtttctcccagcgagatgggtaaaatgtccccggcttttatctgcgtgagatccgcgacattcatcgatagctcggcgattttgacgttcagggtcagcggcagggagcggatgatttctttaatcagggccggtttattaacggatttcgccacctgctgcggtttactgtgctcgctgtggcggatcagattcaaaataaaatcggtgtgggcgtcgtcgagcaaaatacgaaaacggctctcttcatcgcccgcaagggtaaaggttaattgatacgcccagtgggtaatcaccgtgctgctgtccagttttaatttcagcgcaataccggaggtttgcagattaaatatcagcgtgcagatatccagcgccagacggttttttaaccgcgtttcggttttggtcggcagcccgttatgggctttcgcctcttcaagagaggactccagaccataaaaattgcccagcagcattaacaataaggagcgatcgatatcaaacgccagatgcccgacctgggaaaccatcagttcggcgtttttattaataatatccatttcgcagccaatcttttttaaggtgatattgctgcgatgctttttgagaaagtagctgccaagatgcgaatcaatcacgtcaaaattccccgtaaacagggtcggcaggcgatggtaggggcgtccgagccgattaccttctaatttaaagatgcctggcgttttactgtacttcagcatggcttactttctctgctgtaatggtatgggcgtttttgtgcacgcaaatccggcagtgacacaaggtgaggtattaaatagagagggcgtgaaaggggcaaattattaatagagtgaaaaaataattaaattattaaagggtgagatgtcgggcatcgtcataaaacattgcacgaaccgtaggcctgataagacgcgccagcgtcgcatcaggcatcggcgcacaattgccggatgcggcgtaaacgccttatccggcctacggctataactcattgttattcaacaaataatatttttattatcgtttaattcgaacttgttaatcccgccgatgatacgcttcagaacatcctgttttctgtcgctacttatatcgttcaccctatgtctgaacttattgcaactgccgcttccagcattaacgcttttactctggcaaagcgtgtcgccgcatttaacgtgccggtgctcattcagggcgaaaccggcgcgggcaaagagtgcgtggcgaaatatattcacacagtcgcctttggtgaaaatgaaaacgcgccctatatcggcgtgaactgcgctgcgatcccggaaaacatgctggaagcaaccttatttggctacgacaaaggcgcatttaccggcgcaattgccagtgtgccaggaaaaatggaactggcgaataacggcaccttattactcgatgaaattggcgatatgccgctggcgttacaggccaaaatattacgcgtattgcaggaacaacaggttgagcgattaggcagcaaccgacaaattaaactcaattttcgcctgattgcctgcaccaataaaaaccttgagcaggaagtcgccgccgggcgttttcgtgaagatctctattatcgtctggcggttattcctattaccatgccgccgctgcgtgaacgtctgaacgatattattccgctggcagagtcatttataaaaaaatactccacggtgctggtgaaaaatatcaccctttcagaatctacccgccgtgcgatgctgaattaccgctggcccggcaatgtgcgccagctggagaacgccattcagcggggaatgattttaaatcgcgacggcgtgatttacccggacgccttaggcctgccggaaaatgacattgccgaccacagcgaactgcaatggcctgctcagcccgccgtacacattgccgaaaccagcgatttaggccagcacggacgaagcgcccagtatcaatatatcgctgacctgatgcgtaaatatcagggtaaccgcagcaaaatcgccgacctgttaggcattaccccgcgcgcactgcgctatcgactggcctccatgcgtaagcaaggtatcgaagttttctcctgacccggaagttaaaaatgagcattaccacaatcaacagcaccatgcaggcgcaaatcatgcaggacgtgcagcggatgcaggccaacgcccaggcaccagtgctgcccgccatgaccttcagttccaccaatcctgacgtttcgtttaaccgcattatgagtggcgcgctaggtcacgttgaccagttccagcaggtggcggaacagcagcaaacggctatcgacacgggcaaaagcgatgacctcgccggtgcgatgatcgccagccagcaggcgtcgctctctttctccgcgctggtgcaggtgcgcaacaaaatcgccaccgggtttaatgacctgatgagtatgtcgatctaaccctatgaatgcacaaataaagaagttaacccaggcgtttccggcgtttcgactgcgtcttgcagataacaaacgctgggcattgatgtcgggagtggggcttgccgttgcggcgacggcgattatcgtcagcgtgctgtggaccggtaattgcggctacgtctcgctctacggacgccaggaaaatctgcccgtgtcgcagattgtcaccgtgctggacggcgaaaagctcacctaccgcattgacccgcaaagcgggcagatactggtgccggaagaggcgctgtcgaaaacgcgcatgacccttgccgccaaaggcgtgcaggcgattttgcccagcggctacgagctgatggacaaagacgaagtgcttggcagcagccagttcgtgcagaacgtgcgctataaacgcagcctcgaaggggagctggcgcagagcattatgtcgctggacgcggtggagagcgcgcgggtgcatctggcgctcaacgaagaaagctcgtttgtggtcagcgatgagccgcaaaacagcgcctcggtggtggtgcgtctgcactacggcgcgaagctgaatatggaccaggtgaacgccattgtgcatctggtttccggcagcattccggggctgcacgccagcaaagttagcgtggttgatcaggcgggaaatctgctgaccgacggcatcggcgcgggcgaggcggtctctgccgctacccgtaaacgcgatcagatcctcaaagacattcaggacaaaacccacgccagcgtggcgaacgtgctggattcgctggtcggcagcgggaattaccgtgtcagcgtgatgccggatctcgacctcagcaccatcgacgaaactcaggaacactacggcgacgcgccgaaaataaaccgcgaagagagcgtgctggacagcgacaccaatcaggtggcgatgggtgtgcccggctctctcagcaaccgtccgccggttgcggcgaatcaaatgactaacggtacggaagaaaatcgctcgccggaagcgttatccaaacacagcgaaagcaagcgcgattactcttacgaccgtagcgtccagcatattcagcatcccggctttgcggtgaaacgcctcaatgtggcggtggtgctcaatcaaaacgctccggcgctgaaaaactggaagccggagcagaccgcgcagcttaccgcgttgctgaacaatgccgccggtattgacgcgcaacgtggggataacctgacgctttcactgcttaactttgtgccgcaggcggtgccggtcgaaccaattattccgctgtggaaagatgacagcgtgctggcctgggtgcgcctgattggctgcggcctgctggcgctgttgttgctgttcttcgtggtgcgcccggtaatgaaacggctgacggcggtacgtgcaccgattatcacaccagaatcggaagccgtcagcgaaccgtggattgccatgccggaagaggagcgcaaaaacgtcgatctgccgtcgctgcccggcgatgacagcctgccgtctcagagttccggcctggaagtaaaactcgagttcctgcaaaaactggccatgagcgacaccgatcgcgtagccgaagttctcagacaatggatcaccagcaatgagcgaattgacaacaaataagagcaacagctacctggaacaggcggcgatcctgctgctgtgtctgggcgaagaggcggcggcgacggtgatgcaaaaactcagccgcgaagaagtggtgcgcctgagcgaaaacatggcacggctttccggcgtgaaaaccagcatggcgcgcaaagtgatcaataacttctttgatgagttccgcgaacagagcgggatcaacggcgcatcgcgatccatgttgcagggtattctcaacaaagcgctaggcaccgagatcgccagcagcgtgatcaacggcatctacggcgatgagatccgctcgcggatggcgcgcctgcaatgggtggaaccacgccagctggcgatgctgatctccgaagagcatttgcaattacaggcggtgttcctcgcgtttctgacgccggaaatctcggcggcggtgctctcgtatctcaatgaatcggtgcaaaacgaaattctctaccgggtggcgaaacttaacgacgttaaccgcgacgtggtggatgaactggacaggctgatcgaacgtggcctgtcggtactttcggaacatggctcgaaggtgaaaggcattaaacaggcggcggatatcgtcaaccgcttccagggcaaccagcaggtgatcctcgaccagatgcgcgagcgcgacgaagaggtgctggagcagctccaggatgagatgtacgacttctttatcctcagccgccagaacgaagaggtgcgtcgacgtctgcttgacgaagtgccgatggaagactgggcggtggcgctgaaaggcaccgaagccctgctgcgccgttcgatttacgcggtaatgccaaaacggcaggcgcagcaactggaagccatcaccgcgcgtctggggccggtgccggtcagccgtatcgaacagatccgccgcgaaatcatgggcatcgcccgtgaactggaagaggcgggcgaaattcagctacagctctttgcggaacagacggcggagtaaccatgaccattgaaacactgcgcgggcgctatcgcctgcaccgtttcccgccgcgccagcgtgcggtgaccggagaaccgctcactaccagtattagcgccgccgattaccagcgccagttgatggacggatttcaggaagggctgcaaaaagggtttgctcagggaatgaccgaaggccaggagcagggctttagcgaaggtcatcagcaaggttttgccgaggggcgacgccagggttacaccgaaggcagcctcgccgggcagcaggaagggcgcaaacagtttgttgaggcggcgcagccgctggaagccatcaccggtaaagtgaacgacttcctcgctcatatcgaacgtaaacagcgggaagatttgctgcaactggtggaaaaagtcacccgccaggtgatccgttgtgaactggcgctgcaacccacgcagttgctggcgctggtggaagaggcgctggcggccttcccggcgatgccggaaaccctgcaagtaatgctgagcacggaagagtttaaccgcctgcgcgacgcggtgccggaaaaggtcagcgaatgggggctgacgccttcgccggatttgccaccgggcgaatgccgggtgatcaccgacaaatccgaactggatatcggctgcgagcatcgccttgaacaatgcatgaccgcgctgaaagaaacactcacgccggagtcgcagggtgagtgatttttctgcgttcgataacgccctgcgctcgctggagtcgatcccgctggcccgcgtcgccgggcggctggtgcgccttaacggcatcctgctggagagtgtcggctgcccgctaatgaccgggcagctgtgccgcatcgaaagtgccaatcacacgctgatcgacgcgcaggccgtgggctttaatcgcgacatcacctatttaatgccgtttaaacagccggtcggcctgatggcaggcgcacgcgtcttcccggaagaaaaagcccacgacatcctgataggcgaaagctggttaggccgcgtggtgaatggcctcggcgaaccgctggatggcaaaggccgcctgaacggcaacgaccttctgccgccgttgccgccctcggttaatcccttaactcgtcgttcggtagacgaaccgctggacgtgggcgtgaaagcgatcaacggcctgctgaccatcggcaaaggccagcgcgtcggactaatggcgggcagcggcgtcgggaaaagcgtgctgctggggatgatcacccgccagaccaaagccgatatcgtggtggttgggctgattggggaacgcgggcgcgaagtgaaagagtttatcgaccactcgctgggcgcggacgggctggcaaagtctatcgtcgtcgtcgcgcctgccgatgaatcgccgctgatgcgtctgaaagccaccgaactgtgccactccatcgccgcctggtttcgcgaccgcgggcatcacgttttactgctggtggattccctgacccgctacgcgatggcgcagcgggaaatcgccctctcacttggcgaaccacctgcaaccaaaggctatccgccatcggcattcggcatgatcccaaaactggtcgaaagcgcaggcaacagcgaaagcgcgggatcgatgaccgccatctacaccgtgctggcggaaggtgacgaccagcaagatccgattgtcgactgcgcgcgcgcggtgctggacgggcatatcgtattaacccgcaaactggcggaagcggggcactatccggccattgatatcggccagtcgatcagccgctgcatgaaccaggtcaccagcctggaacatcagcaatccgcccgcgcgttaaagcaaaactatgccgcctatatggagatcaaacctctgatcccgctcggcggctatgtggcaggtgccgacgccagcgtcgacaaagcggtgaaaatgtttccggccattgagcgatttttgcgccaggagatgcgcgaacccgcctccctcgaactggtgcaaagccgcctgcaaattctctttcctggtgtcaaaaaggcagaacagtaactatgcgacaaatcatcgacaccctggcgcagttgcagcgcctgcgggataaatcggtcaaagacaaaaccatcgagctggcaaagcaaaaacagatttgcgcgggctatgacaacaatatcaaggcgttaggctacctggtggagaaaacgtctgcgggcgcggcggcatcggtggagtcgctgaaaaacgtcagcggctacaaaggcaccctgcgcaaggtaatcgcctggcaggagcaggaaaaaacgctggccaatatcaaagccacgcgaatgcagaaaaacctcacggcggcggcgtgcgaagagaaagtagtcgccctgacgctggacgacaaacgccgcgagcaacaagaaagcgccacggcgaaagcgcaaaaagcggtggacgacatcgccgtgcagtgctggctgcggcacaaattagcggagtagccatgaaaacggtcatcaccttcggcaccttcgatgtgtttcatgtcggtcatctgcgccttttacaacgcgcccgcgcattgggcgagcggctgctggtcggcgtatcgtccgacgccctgaacatcgccaaaaagggcagggcaccggtttaccatcaggatgaccgcatggcgatcatcgccgggctggcgtgcgtggatggcgtatttctggaagaatcgctagagcagaaagcggagtatttgcgcgggtacagtgcggatattttagtgatgggggatgactgggcagggaagtttgacagctttgcgtatatttgtgaggtggtctatttcccccgcacgccgtcggtgtcgacgacggggattattgaggtgattagagggcttttataaagtactaaaacagagatgtattttcttgccggatgcggcgtaaacgccttatccggcctacaggacgtgatcgatccgtaggcctgataagcgaagcgcatcaggcagttgcgcggtttaccccagcgcctccacaatcacaatcgccgcccgttctcccgccttgccatccataaacgcatcgcaatagtgatggcgaatctccgtaagccgcgcctgcaccgacccccagtcaaacgcctctgacaataagtaacgcagttccgcaacctcatgagccaccggcaatatttcgcgaatccgctggtcggcgctctccggcgtggaataacttttctcaccgtcgagcaaatcattcatgcccggaaagtcgagcaggatcacccgcttatcaacgtggatagcatcgaaaataaacccgctgttatcggtcagcacgtaatcggcttttgccagcagcgccagcgtgtggcgggcggagtcggtgcgctgttttaaatgcctgcgcaccagggccagcgatgctgcttcttccgggcgtgagcaggtgccatggtgcagtttgcaaatcaggttcacatcaccgctcaagcggcccaatttttcagcccagtggggcagggagcttaatgcgccaaacgttggggcatagagcaccgtaggtttacggtaatctgattggatgttttccggcaacgcgcgatcgaacgtgccgttatgccaggcgtcgaagcgcgggttgccgaccacttttgcgctgccgaaatgcgcaagcgcctgctgactgtagtggctataacacaaaatgctttggtaaaaacgattccagtcggcgtggttccacgtctctttggctaagccgtacatagcgcggatgttcaccgccgccaggccattgagcgcaggcgtgtggtaggggctgaccaggcatttcacccgctgaccatgtgtctgcatttctgacagacgcatacctttaagctgcggatcgtcgatgtttttcagtgtttccagcatctcatccagaaacggtttaaacacgcggtcgttgatcaccagcgtgcagctcagcccttgcgcctgtagggcggtgatgattgggcggtacagcgcgtagtggaatgaggtttccataaaaaagccgatggtgtcggcgatgggtaacgcggatggcttggtggctacgcgtaacttattgaaatagctagcaatattatcagtcgtttttttctggatatcgctaaagcccggtcgctgataacaaaggctcgggtaacaggccagccatttgtcggcgcgtagcagcggttgccagcagtcttccagcgagtgctcatcgttgctcatctgctgcgccagttgcgggtagtagcggctgttcaccagataagcgcacactttgcggcagtcccgcgcgtgcaccagcccaggcaaactttttagcatcgttccttgcgaaatttcgccgccgaggatcatcacctgccagggaattttcgccaggctcgccagcagcgtgttcagtacctgaatatgtttctcctgcttgagaataaccgcgtcatcttccagtaacagatagttttgccagccgtgctgttgcgccagacgcagcgcctgcaagtgcgactgacggcggccccgttgaccgttttcatcttcactggcggcaaggcgggtgatcttctcgggtggaatatgcagcaatgccagttcttcacggatctgttgtaagcgatccgggcgtttatccagattcacgacgaccacctgatcgatcgcctgatggttgatcgcctggtgatgagtggcgttatgcagactcagataagcattgcgcagcagcggatcgcggacgatatccgtaagcgccgtgtttaccggcgtgctggccccgataataaagtctttatcaaaggtgttgtggctatgcgagatacacaaaatcgtgcgctcgccgggcagttgcagcgggttaacgctgaaattgtcggtgaaacttttctcttcgcctaaattgcaatcatcgtcgtaacggtgctttttcaggtagttacggtgatagcaaaaggtgccgttgaggatattatgtgggccaaagctgcggctttgaaagatacggttgatatggctgtaccagatggggatctggtcggaaccggagatgagcgcccggtgtttttgcatcatagcgatggtgtaagagattttatctgccggatagtagtcgtcatcatccatgcagaggatgtattcgccgcgcgccagttcgttgagcatgttgcgttttttgcccagcggcagtttttccgggtgatggatgtagcggatgttaaaggcttccggcgtgccattggtcaggcggtcgatgatgtgttgatggctttgtggggaatcgtcgaggatgatgagttcgcggcggtctgccgggtaatcctgatagcggtacatatagagcaggtacggcaggaatgcgccgcggttccaggttggcgtgacgacgctgacaaacggtttttcgcggtgggtggcgagtgttttgatgatggttggtgttggcatggtgtttgggtgagttaatgtgtgaatgtgatgaacgtgcgcgctgatgccctcaccccgaccctctcccacagggagagggagaaaatcagcgccgattttaacaccgtgctcgatcggtcccctcgcccctttggggagagggttagggtgaggggcaaagcgcgcgcagagcgactcacgttagcagcgaaaacgctgaaagcagcgggtcggcggcacataacgactgaatttgctggcgaaccaacagcgcattttcactggctcgccagcgttcaaacatggcaaagagggcgaaaatatcctcctgccgcagcggagaaccatccagcgtccataaactgattaacgtgcggaggagataaaaatcgcacaccagcgggaaataatccgccccgtcagtctgcccaatcatatcgtggtaaacgcggtaaatcagccagttacgcatcatccagggcgcggtggcaaaatgctgttgccaggtggtttgccactgcgtctgaagctgctgttgtaacagggcttcgctgttggcgtcatgcagcgtcagtaaagtaacctgcaacggcagcgaggctttgcgcgggctttccggcaaaatcgaccagtcaaacgcacaaccgccgagcagcgtcatcaactggcgcgccagctgtggcacgggcgggagctgggcgtactgtgcctgtagcgtaccttttttcgcatgatcggccagcgcctgtggcagcgtcgtcaaacgggccaggatgtctccgtctctgcccggcattttgctggcgcaggagagcaaaatcccgacagcatacagggaaagctccggggttaaatcacggagcgtgagggtactcaaaatcacctggtttactatcgcatcgcgcgcggaaagctctgcggaattatcttccacagggcggtaggtgagctgtaaatcaaaggccctgacatcgttgagcaccgcttcgcagctggcaatatcggtcaatgacaggctcaggcgaatctcgtttttccacaccttgcggacgtataaaggcgaaccggggtgacgcgctaaaaatttgcgcacgtattccggttcgtaacattcaataaaactcataggtggcttccagtctttaatgctgtgcaggatatgcaataagcgtgccggggatttttgtaattaaaaacaagggattggaaatcaggcggaaaatccatttccgctatggggaaggtattcgcgttattcctgatagagaaaatctgcttcgctgcctaaaaacgactgaataaattcatactggcgaatcaacagctcgccgtttttatcgttgtaggctttgcagcgttccgctttttgctcaaggcgttgccacaactgttgtgcagccgctttttgaacagccggaagccaggtgaaaacctgcgccagaccgtcacgatttacgctaacaccgagcattttcagcaggctatgccgctgatggctatgtccatgcaactgctcatagtgatgggttatctcatcgtttaccgccagcagctcctcgctggcgcggcgaatcatgcagatccgctggcgctggagacgttcgcgcagggaatcatacagcgcgtcgtcgtcacgaatgccctgcagcaacgccttcacctgttgtaaccggatactcacttcatcggcctcttagttctggaaaaaactcagcatgtcgctggctaactgttcggtgtccacttgcaggctgccggaggccagcatcgcctgcatttgcgccactttgtcgctgtcgatatcgctctcttgctggtcgttcagcgtttgctgggcggactgcaatcccgcctgagtaatgtcgtcggcgctcagcgtcgtggtggtggtcgccgtggttttgcgcggctggttggagcctgccgtcgtggctgtcgggcgattgcctggcatagtcggggtgattttcatcgcaacctcgtctcggtaattgggtgggttactccggtaaagcggttaacaggcggcaaaactttaatcgcctgcgcaaattactccgcgcttaccgtcgtcaccacgccgctttcggccaccattgcgctgatgacccgctggctgctggcgttacgcactttcaccatctcgcctttgcggccatttttcagcgccacgccgggcatcgaggcggtgatccccgcgctctggtaaacaatcatcaccggttgatcgcgcccgaccagcaccagagacacgagttcttccttggtgattggcctgccgggttgcagggcgtgtttactgctgaaaccaatcgcgtcatcgagaaccatcaacacatcgcggcgctgggcgctgacgttgtagggcttaagctccacatcattcgcggtgagcggcatatcgcgggcaaccagtgacttcgtcattaccaccggcaccagtacatccgggcgcaccgccacgttcatctgccagctttgcgggcaactaacggtgaagttcatccggttgagggcgatttccgcaggcgaagtcagcgtgacgccgggtgttttagtacagggcgcggcggtcgcaatctgcgagggaatgtagatcttaaaggtgtagcgatagtcatgccactgccgctgctgcgccagcgattcaattttttggctcgcggcattcagcacctgggcgttgacttgttcccgcgcgctgtgttgcacgggatggacggcggcgtagcccggtaaggccagcgccaggaggaagtaaaacttccgcctgcaaaattgaaaactcataaaccctttctcatcagtgacttaaaaaatggcatggcgattgcttagcgtatgcggattgaagcaggagtgatgcaggaaatggggatcagttttcagcaggcattgggagtacatccgcaggcagtgaagttacgtcttgagaggaccgagctactgactgcgaatctggcgaacgtcgatacgccaaatttcaaggctaaagatattgattttgccagggagatgcaacgggcaaataacgcggcggtggatgtccagtaccgcgtgccgatgcagccgtcggaagatggcaacaccgtggaactgaacagcgaacaggcgcggttttcacaaaatagtatggattatcaaagcagtttgacctttctgaatctgcaaatcagcggcatcagagaggccattgaagggaaataagcatgtcatttactgatatctatcagatttccggctcggcgatgacggcgcaaacgctacgtctgaataccgttgccagtaacctggcgaatgccaatgcgcccgccagcagcgaggcgcaggcgtataaagcgcgcagcccggtgtttgccgcggtgtatcaccacagcctgctggcgggtacacatcgtcatgccattgacagtgccagcgtgcaggtacaggacgtgctgcaaaccggcggggcggtgaaacgctatgaaccgcattctccgctcgccgacgccaacggtgacgtctggtatcccgacgtcaacgtggtggagcagatggcggacatgatgtcggcctcgcgcgatttcgaaaccaatgtcgatgtgctcaacaacgtgaaaagtatgcagcaaagtttgctgaaactgggagaagcctgatgaataccctggcgctgaatgcgcaatcgccgcagccgaccgccacggcggaaagcaataatgtggcggccagcgacacgcaaagcagcagcgatagctcgcctgtcgataccttcctgacgctgtttgtcgccgagatccaaaaccaggacccgaccgacccgaccgacgctaccgaatacatcgaccagctgtcgtcgatggcgcaggtggcgatgatggaagagatgggcgtgcaggccaacaccaacgcggtgctgatgagcaacattcaggtgatggcgctcggcaacctggtgggcgacgacattatggtgcagaccaccgccttgcaggtgagcgaccagaccattaatggtcgcgctacgctggacgacgcctgtaccaccgccgatctccactttaccgatgccgcaggcgatgactacaccgtctcgctgatcccgcaagggagttcgtccgtcgggccaggccaggtggatttctcggtgaatcccgcggattacggtatcccgccgggcgattacgacgtctcggtggtcaccaacaccggggaagaagaggtgccgattgaagtctccggcgaagtggaagatgtgcgcatcccgctcgacggcagctctccggtgctcaacgttgcaggcgtcggcgaagtgccgttcaccatgattagccagtttggcgtacccgatgccgacagtgatgtggcgtaagaatcaattaacaggaagacacaatgagttatgaaattgccgcgacggggctgaatgccgttaacgaacagctcgacgggatcagtaacaacatcgccaacgccggaacggtgggctataagtcgatgactacccagttttcagctatgtatgccggaagccaggcgatgggtgtcagcgtggcgggcacggcgcaaagtatttcgcgcggcggttcgctggtctccaccggcaacgcgctggatctggcgattaacgacgacggcttttttgttacctgcgacagcgcgggcaacatttcctacacccgcgccggatcgtttgaaaccgacaaaaacggctatattgtcaacgcctcgggcgcttatttgcagggctatccggtcgatgacactggcactctgcaaaccggtacggtcaccgatatccagatcaaaaccggcaatatcccggcgcaggccagcagcagcctgacctttaccgctaacttcaacgccagcgatgaagctatcgatcgcaccaccgttccgttcgacgcgactaacagcagttcgtacaccgacagctacaccaccacggtgtacgactcattaggcaacgaacattcggtatgccagtacttcaccaaaaccagcgataacacctgggaagtgcagtacaccttcgacggtcagcagcagaccggcgttccggcgacgacgttaaccttcgacccgaacaccgggaagctgacctctccaaccacgccgcagaccattgaatttcaaaccgacgctgccgcacccatcgacttaaccgttgattactccacctgtacgcaatacggctctgaattttcggtcaccaccaacgccgccaacggctacgcctccgcaacgcaaaacggtgtacaggttgatgacgatggcaaagtttacgccacctacagcaacggcgagcgtatgttgcagggccaggtggtgctggcgaccttcccgaatgaaaactgcctggaggcggtgagcggcactgcgtgggtacaaaccggcgaatccggcaccccgctgattggcgttcccggctccggcgcctgcggcacgctcacgtccggcgtgctcgaaagctctaacgtcgatatcaccagcgaactggttaacctgatgaccgcccagcgtaactatcaggccaacaccaaagttatctccaccagcacgcagctcgatgacgcgctgttccaggcaatgtaatggatcgcttaatttataccgccctgagcggggcttctcagaccctgtacgagcagcaaattagcgccaacaacctggcgaacgtcaacaccaacggttttcgcgccgatatggcgatggcgaccaacgacaaggtgaaaggcggtggcttcgacacgcgctatatggcgcaggaaggggccagcggcgtgaacgacagcacgggcgtggcggagaaaaccgaacgcccgctggatgtggcgattcagggggcaggttacattgcggtacaggataaaaacggcaacgaagtttatacccgcaacggcaacattcagcaggacgaccaggggcaactgaccatcgacggcaatctggtgctgggagataacgggccgatcattctgccgccgaatgccattgcttcgtttggcagcgacggcacgctgtcagtgacgcccgatgacggcgacgtgaccgcgacgatggatatcgatcgcctgaagctggtggatatcccggtcgctaacctggagaaaaatgctgaagggatgctggtgactgccgacggcgttccggcccagcgcgatgaaaacatcaaagtcagcggcggttttctcgagggcagcaacgtctcggcggtaagcgaaatgatgtcgtccatcgccatgaaccgccagttcgaagcgcagataaaaatgatgaaaaccgccgaagatatcagcgacgcgggcaaccgcttattgcgcggctcgtaaccgcacatcgtaggccggataaggcgtttacgccgcatccggcaactatgcggcggtgcctgatgcgacgctttgcgtcttatcaggcctacaagcctgtgcccaaaccgtaggccggataaggcgttcacgccgcatccggcaaccgcagcccaaaaataatacggaatttaccaccatgaacgcagcattatggatcagcaaaaccggcctctcggcgcaggatgctgaaatgagcgcgattgccaacaacatcgccaacgttaacaccactggcttcaagcgcgaccgggtgatgtttcaggatctgttttaccagacccaggaagcgccgggagcgatgctcgaccagaacaacatcatgccgaccgggctgcaattcgggagcggcgtgcgcattgtcggcacccagaaaacctttaccgaaggcaacgttgaaaccaccgacaacgcgatgaatgtcgccattatggggcaggggtttttacaggtgcaaaaggctaatggcgatattgcctatacccgcgacggcaatttgcaggtgaacgccgatggcgtactgaccaactcacagggcttgccattgcagccggaaatcgacgttccggcgggggcgacgaatgttgcgtttggtgaggacggcacggtgacggcgattcttcctggcgacagcgacgtgactgagttagggcaactgacactggttaacttcgccaacccggcggggctttccgctgagggtgacaacctctatctggaaaccgccgccagcggtcagccgaccgaaggcgtaccgggtgaagatgggcttggcactttgcaggacaacgcgctggaaggctcgaatgtggatatcgtcaacgaaatggtggcgatgattacggtgcaacgtgcgtacgagatgaacgccaaaatggtgtcggcggcggacgatatgttgcagtacatcagccagacgctgtaagggcgtgggggcaacgtgcggtctgatgccctcaccccggccctctcccacagggagagggagaaaggcggtgcacgatgtaacaacgcgcacagatcagtccccaggctcctttggggagagggagaaaagcggtgcgcgatgtaacaacgcgcacaaatcagtcccctctcccttgagggagagggttagggtgaggcgggaaacaaacagctccgcccccaccaaacaaccggccaccccgtggcctgcaacactaaacaggcagaacgtgaaaaattatctctggctggtggcgctgcttcccctgcttagcgggtgtgaatcgcaggccattctggtcaaaaaagacgacgcatactttgcgccaccgaaaaccgaagcgccgcctccggcagacgggcgtgccgggggggtatttgaaaccggctacaattggtcgctgaccgccgaccggcgggcttaccgcgtgggcgatatcctgacggtgatcctcgaagaatcgacccagtcgagcaaacaggcgaaaaccaacttcggcaaaagcaacaccgtcgatattggcgcaccgacgatttttggtcacaccaaagataagctttccggctctatcgacgccaaccgcgactttgatggcagcgccacttcccagcagcagaacagcctgcgtggggagatcactgtttccgtccatgcggtgcagcctaacggcatcctggaaattcgcggcgaaaaatggctgaccctcaaccagggcgatgagtacatccgcttaagcggcctggtacgcgccgacgacatccagaacgacaactcggtttcctctcagcggatcgccgatgcccgcatctcctatgccggacgcggcgcgttaagcgacgccaatgccgcaggctggctgacgcggctgtttaaccatcctctgttcccgatctaatgccggagagtgcaatgcaaaactggataaaaacagtggtcgtagccgtaagcctggcgctacccggcgtggcgctggcgcaatcgctggagtcgctggtcaacgtacagggcgtgcgcgaaaaccaactggtgggctacagcctggtggtcggcctcgacggcaccggtgataaaaaccaggtcaaattcaccaaccagaccatcaccaatatgctgcgccagtttggcgtgcaactgccgaataaaatcgacccgaaggtgaaaaacgtcgccgcggtggcggtgagcgccacgctgccgccgatgtactcgcgcgggcagaccattgatgtcaccgtttcgtcgattggcgatgccaaaagtattcgcggcggcactttgctgctgacccaactgcacggcgctgatggggaagtttacgccctggcacagggcagcgtggtggtgggcgggatgaacgccaccggggccagcggttccagcgtaacggttaatacgccaaccgccgggttaattcctaacggcgcaacggtggagcgcgagatccccagcgattttcagatgggcgataccatcaccctcaacctgaaacgcccgtcgtttaaagacgccaacaacattgcggcggcgatcaacgcctcgtttggcggtattgccaccgcgcagagttccaccaacgttaccgtgcgcgcgcccaccagccccggcgcgcgggtggcatttatgtcgcaactggacgatgtgcaggtgcaggcggagaaaatccgcgctcgcgtggtgtttaactcgcgtaccggcacggtggtaatgggcgatggcgttgcgctacacgcggcggcggtgtcgcacggcagcctgaccgtttcgattaacgaaaccagcaacgtcagccagccgaatgcctttgcgggtgggcgcacggcggttacgccgcagagcaatatcgcggtgaatcatgcccgtccgggcgtggtgagtttgccggagtcgagcagcctgaaaacgctcgtcaatgcgctgaacagtttaggcgcgacgccggacgacattatgtcgattttgcaggcgctgcatgaggcgggcgcgctggatgccgacctggaggtgatctgatgaaagtgaacgccagcggcgggattgacggcagcgacgcgttaatggggccgaaggttcaggccaatgatattaagcaggccgcggaacagtttgaggcgatttttttacgcaacatgctgaaagagatgcgtaaaaccaacgagttgtttgattcgaaagataacccatttaacagcgattcggtgcgcatgatgcaggggttttatgacgatgagttgtgtaacaccctggcgcagcagcacgggattgggatcgcggcgatgattgtgaagcagttgtcgccaaagcataaatgaggctccgacgttcggtgcctgatgcgacgctggcgcgtcttatcaggcctacgagtcgcccgtatgtaggccggataaggcgtccacgccgcatccggcgttcggcacccggtttacggaacttaagaatccccaactttacgccgcttttaaccggcacgatttaccggtaaggatccaacatggacatgattaacatcggctacagcggtgcatcaaccgcgcaggtggagcttaacgtcacggcgcaaaacaccgccaacgccatgaccacgggctacacccgtcaggtggcggagatcagcaccatcggtgccagcggcggttcgccgaacagcgccggtaacggcgtacaggtcgacagcattcgccgcgtctccaaccagtatcaggtgaatcaggtgtggtatgccgccagcgattacggctattacagcacccagcaggggtatctcagccaactggaagcggtactgagcgacgataacagcagcctgagcggcggcttcgataacttcttcgccgcccttaacgaagcaaccaccagccccgatgattccgccctgcgcgagcaggtgatcagtgaagccggggcgctgtcgttgcgtattgataacacgctggattacatcgactcgcaaagcacggaaatcatcagccagcagcaggcgatggtgtcgcaaatcaatacgctcaccagcggcatcgccagctataaccagcaaatcgctcaggctgaagccaatggcgataatgcctccgcgctgtacgatgcccgtgaccagatggtggaagaactcagcgggatgatggatgtgcaggtcaatatcgacgaccagggcaactacaatgtcaccctgaaaaacggtcagccgctggtgagcgggcagcaaagttcgaccatcgcgctggaaaccaacgccgatggcacgtcgaccatgtcgctgaccttcgctggcaccacctcgacgatgaccaccgacaccggcggttcattaggcgcactgtttgattatcaaaacgatgtgctgacgccgctgaccgacaccatcaacagcatggcgtcgcagttcgccgatgcggtcaacaaccagctggcgcagggctacgatctcaacggtaaccccggcgagccgctgtttatttatgacgccagcaatgccgatggcccgctgaccgttaacccgaatatcaccgccgatgagctggcgttttccagttcaccggacgaaagcggcaacagcgacaacctgcaggcgctgatcaatatctccaccgaaccgctggaaatagccaacctcggcagcgtgacggtcgggcaggcgtgctcgtcaatcatcagcaatatcggcatttacagtcagcaaaaccagacggaagtcgatgccgcgtccaatgtctattccgcagcgcaaaatcagcagagcagcgtcagcggcgtcagcatggacgaagaggcggttaacctgatcacctatcaacaaatttatgaagccaatctgaaagtcatttccgccggggccgagattttcgattcggtgctggaaatgtgcagctaagcgggagcgcgaaaatgcgagtaactacccaacaaacctacgtctcgatgacgcaaagttttaataatctctctggcgatctggcgcatgttgtcgagcagatggcaaccggcaagcagattttgcagccgtcggatgacccgatcgccgccacgcgaatcacccagttaaaccgccagcagtcggcgattgaacagtatcagagcaatatcgactccgcgtcggcgggcttaagccagcaggagtcgattcttgatggcgtcaacaacagcctgctggcggtgcgcgacgacctgctggaagcggcgaatggcaccaataccgccgattcgctcgcaagcctcggccaggatattgagtcgctcaccgaatcaatggtggcggcgctgaactatcaggacgaagacgggcactacgtatttggcggtaccatcaacgatcagccgccgattgtggcggtggacaatgacggcgatggcgtcaccgacagctacagctaccagggcaacagcgaccaccgccagaccacggtgtcgaacggcgtagaagtggataccaacgtggcggcgagcgatttcttcggtagcaatttagacgtgctcaacacgctgaattcgctctctcaggagttgcaagaccccaacgctgaccccgccgatccgcaggtgcagagcgatattcagaacgccgttgatgtggtggataccgcctcggacgacctcaacgcctcgatcgcgtcgctcggcgagacgcagaacaccatgtcgatgttgagcgatgcgcagaccgatatctctacttctaatgatgagttgattggttcattacaggatctcgattacggcccggcgtcgatcacctttaccggactggaagtggcaatggaagctaccctcaagacttactcgaaagtgagtgagttgaatttgttcagcgttctctaactctttcaggaaccgtatgcaggtcggacttacatcttcatcactcgccaccggcggcgcgcatagcgctgcggtatcgtcgtcaaccgttgcgcccactcaggcggtgcggcaaaaactcccggcgacggcgagtgaatatccggcctcgccgctgattaccactcgcccgcagcgttacagcgtgcagcttaacgaccagctcaccacgttgcagcaggcggatcactacctcgggcaactggagcagcagttactcgattatcgtcatagccagcgtaagggtgggcaggcgcagagtacggcgctgatgcagatgctggacaaacgcaccgcgctttccggcggtgcggtagaccgccagttgcagccagtgttgcaaggggaagcgcgagtgagctttcactcgccggagctggcgaatctggtacacaatcccacgccgggaacgtgcatgttcagcgtctctgacgggcggcagactcagctttcggcggtgatgctgtctgaggatgacagcgccgggcagtatcagacgcggctgaccaacgccctgcgccgcgtgggcgtgcagctacatcagcaagcggatggcatcagcttctccaccaccgaaaaacagtggccccatatcgaacgtaccttaagcgtgcgcaccgatggcgataagtcggcgtttatgccgctgaaaacttttgccgagccgtctgaggcagaccgtttagctcaaagcctgcaacagggcggtgcgggaatttctcagacgttagaaagcattaatcagcagcgtgcgcagatggcggtacagcaggaaaaggcgcggcagttgatcgacggcatgtcgcgcttcccgcaaacggaaaacgcggtgcaggcgtcggaaaacctcggcggcgtgctggatagcgcgaatcataactatcaggtgttattgcaggcggtgaacggtcaggcgcgaatttccagccagacggtgaggaatttattggggtaattatcggcaggccggataagacgcgtttagcgtcgcatccggcatatattggtactcatcagcatttctgcacagtatttaacaacttctctaaattctgatacatcgcgctattaatatcgctgttctgccagccttccacattaaaagttaattgccagctaccattgcactggttgcgtagaacaatatcactttccagtcggttacgaacatatttataataggttgtcattgtcatattatgcgctgacaataaattatcaagtttgtctttccctggtgcgagggtttgtgacagtaacggtacggaattattttcttttccagaaataaggtgaaatatttttattcttggactgttaattgactcttttaccagttgcggggcatcaggtgtacttttcaagtgtgaataccccacggtcgagccaataaatataacagccgcggctaacgctaaccccattattactttatgtttttttctaacaggcacaggcggtgttgtagaagatatctcttctggtactgtttcctgtatctggtcggtaataatcagttttttcgcaggcgatgagtccggcaaagacacatactctttattgcataagtaacctttcttcggaattgttttaataatgttctgttgtttgccatcatcatcgatagcaacgcgcaacgcatggatcgccgtcggcaggctgtttccgccgacaatgcggttcttccatacttcggcacataaataagatcgcgataaaaccacatcggcattttttgctaatgtttccagcaaaataaaatggtattcgccgagacgacgtgtttcacccgtttcgcaatgtattaaggcattaagcgacgggtccatccgccagttgttgataataatactcatagttgagtttaccttagcaagggataaatgtttcctgatagtgctttgcataaagcacagtcttatacgtccctgagaagatgatttttctgcgtgataactaatattttatggtaataggattattcttaatcactatatggcgtggaaatgtaacgaaatgacaggacaggtacaatagccaaatgtgtactatttgcaacgcaatgtaaattttggcatcagtacattgagaagaaaacgcgttaattgatggtaatcttaactatatcaagcgtttgataaagacatattttgatacctggccatgtggcagatattgctaataatctttttatctgaatttaaactctgctttttttagctaaaagtggcatcagataaatcacagtgaaatttttttaacggcggttttaagtttgctccttaggtgtcgtttttacagggtatcgaaacgaaaacgattaatcccaaggagcagtatcatgttatctattaacaccaataacgcctcaatggccgccgttaatgcaatcagcaaaagcagctcttctttgtctacatctatggaacgcctggcgacaggtaaccggattaactcttctgccgatgacgccgcaggcaaacaaattgctaaccgtctgacagcacagtccagcggtatgggcgtggcgctgagcaacatcaatgacgcaaccgcgatgctgcaaaccgccgatagtatgttcgatgaaatgtctgatgtgctgggtcgtatgaaagacctgtcaactcaggcagcgaacggcacctacagcgacgacgatctgcaggcgatgcaggacgaatacgacgaactgggtcagcagatgtctgacatgctgcaaaacaccacctacggcggcaccaacctgttcggtgtttccggcaccagcaacaccggtactgacggtctgttccagagcgcggtgactttccaggtgggcgcggaatcttccgacaccatgaccgtgaacatctccagccaactgaacacgctggtgaccgatctttctgctatcagcaactcctttagcgcggatcaggcagacaccacgggtactgcaggtgtttctggcggtactgagctgaccgcgtctggctcggctaaccagatgatcaccagcatctctaccgcgatggatgacgtttcgcagatccagtccaagctgggtgcgtctatcaaccgtctgaacgacaccgccaacaacctgaccagtatgcaggacaacaccgaagtcgctatcggtaacattatggataccgactacgcgacggaagcgtccaatatgaccaaacagcaggtgctgatgcagactggcatcaccatgctgaaacagtccaacagcatgtccagcatggtttccagcctgctgcagtaatggcggacttgcctgatgcggcgtaaacgccttatccggccacgaacaacaccgcctgcgggcggtgttgtgctttctgcggcaggcttttttccgccagaccggaaacgccatttccgcctgttttttaatctattgattattcacataaaaaatattggcacgccttttgccaataacctgacatcgttatccggagtcatcaatgatcaacccaagaaccattgcgcaagaaatcgcgtatgcggatgtcgccactcaggcggcaaacttgcaggagaagcaaacagagctggatgctgaaagcagcggcctggactcgctcagctcagcgttgagcgatttccagagcgccgtcgatgcgctgaacagcgataccgacggcccggtgacgtttgccgccaccagcaataatgactcggcgaccgtttccgccaattcccaggcgcaggcgggaagctactcatttttcgttgagcaactggcacaggggcagcaaaccacgttcagtatgggcgacgacgccttttccgccaccggcacttttgaactgacgatgggcgacagcaccatggatatcgatctgtcggcggcagatcagaatggtgacggcgacggttttatcgacgccagtgaactggtgaatgcgattaacgactccgatgataatccgggcgtgtcggcggcgctggtaaaaaccgacggcaccacaacgattatgctcacctcggatagcaccggggcgcagagcgcgttttcggtgagcgtaacggggcatgatgccagcaacgatagcaccagcgcgcccgttgccacggatgtttcctccgctcaggacgcgattattcatcttggcagcgccacggggcctgagatcaccaacagcagcaatacgtttgatgatgtgatccccggtgtcaccatgactttcaccgaagtcagcgattctgacagcgatctcactacctttaacatcagcgaagattccagcgccagccaggagaaagtacagacctttgtcgatgcctataacaccttgattgatacggttgattcgctaaccacccacggtgatgacagtaccagcgccggggtatttgcaggcgacgccggactcagttcactggcgaaccagctcgatgacatcgcccatgccagctacaacggcgtgtcgattgttgactatggcatcaccctcgattctcacggccacttacagattgactccgaccagttcaacgacgaaatggcgaaaaatcctgacggtctgacctctattttcgttggcgacaacagcatggtggcgcagatggacgaccttattaacacctacacggactccagcaacggcatcatcaccctgcgccagcagaacattgacgatcagatgagcaaaattcaggacgaaggcgatcagcttactgatacctataacgccaactacgaccgttatctcgaggagtacaccaacacgctggtcgaggtgtacaccatgaaagccagcatggcggcattcgcgtaactcagaaggaatatccctaaagatgtaccaagtacaggacggctattcgcaatataaagagatcgatctcgcggcgcgtactgcggcggcatcgcctctggaactggtgctggtgctgttttctggcctgatggacgaactggaacgcgccaaaagccatattgaagggcggcgtttcgagaagaaagcccagagcatcaataaatgcatcgacattctcaatgcgctcaccagttcgctggagtttgaaactggcggcgagctggtggtcaacctttcgcgactctatgaccactgcgtttaccgattgtatgaggccagcggcgaactgtcggcagagaaaatcgatgaagtgatgctgatcttaagcaacctgcgcgaaggctgggaagggctttcgggcaagctgggttaagacgatggaaaaacaacgcaggaaacttttcgcactggtcgaggcgatgaatgaagccctcgacaagcaacgctggcgacgccttccggcactgcatcagcagttgatacgccagtttcacgattacgcggcggcggaaaccgatgcggcgcagttggatgcagtgaaagcgcgactgtatgacgcgtttaacgccctgattaaacggcgcgagcagcgcgcagaagtgttgaaagcgcgtatggaacagcatcagcggcatcaggaaggcgtactggcctactcaattgttaatttactttcggagaagtcatgaatccgacattgcttgccacgctcggaacgcttgcggaaaccgcttcgttgaaggcggatattttaccgccggtgagcggtgaaaacgcgcccgcatttaccctgccgaaaatggcggtcgcggcggtggcggagcgcgttcatagcgcaaaaaccagtcagcaacaggcgacgcgcccgcaggagaacgatccggtggcgatgcaggcgctaatggcgctgttacttccgcaacctgccgcgccgcatcaggacacgccgcagccgcgaaacgtcgcaacatcgccggttatccagcaattgacgaaagcggtggtgcaaaacgcgccgcaacgccagacgcaacagcaggaactcacgccgttgccgccgcagttgcaggaactgatcagtcagttgccgcaggcgaagcccgaacagcaggccagactggcgacttacgctagtgaagatttacatgccattacgccgacgcagccgcgcgtctcaacacagccagctcgcccgaaatctgaactaacccgtgtgaccgcgcgcccgcaggtcgagcgtaaaacggaaaaagtgccggacagtgaaccggttattgcgcgtgcggtgttgcaggttaagacgccggagctgctcagcgatcatcaggagattgtcgccaaaccagccacgctttcgatggacgaactgggcgaaaaactgacgacgcttttgaaagatcagatccactttcagctcaacaaacaacagcagatctccaccatccgtctcgatccaccgtcgcttggcaagctcgagatcgccgtacaactcgacaacggcaaactgatggtgcacatcggcgcgaaccaaagtgaagtttgccgcgcgttacagcagtttagcgacgatctccgccagcatctgacggcgcaaaattttatggaggtgaacgtacaggtttcctccgaagggcagtcgcagcaacaacaacagtcgggccatcagcaggaagaggtgagtgctgccttacagcttgatgatgcgcctcaatttcaacagaacgaatccgttttgatcaaagtgtaaaggcaatatgaagaaaatcgtggtggcgggcgtggtcagcgccgttctggcgttggtggtgggggccggagctggatggggtgtctggcatcattatgccggaaaaggaaaaccgactgccgccgcgcagacggaaacggtggaaaccctggatgagagcaaaagcgtgtttgtgacgttgccggaaaccattgtcacgctgcatgacaataacggcgcggaccattatttgtcggcggaattagtgatggtggtcgccagtgacaaagaagcggaaaaaataaaacatcaggagccgctgtatcaaagtattgcggttgaatgcctgacggaaatgaaatttgaagatttgcgtggcatgaaaatatccgccatccgcaaactcatttctgacgcgttaaagaaagatcttcagcgtcgcaaaatgagcgcaccgtataaggatttgctggtgaaaaaagtggtcttccagtaatcaccaggcggatataaatatgctacaggatgtattcgagtcggaagaatttgctgccgcgccggtattaaccccgcagcaggagagccactacttgcaggcctatttaccgttggtgcgtaaagtggtgcggcaacttgccccgcagtgtaattgcattattgatcgtcaggatatggaacaaacggcgttaatggggctgcttaatgccatccgccgctacgggctgccggacgaaggttttgcgggctatgccgtgcatcgtattcgcggcgcgatcctggatgagctgcgcgctctcgactggcgaccgcgccagctgcgacagaaatatcatcagatgaaagatctgattcgcgaaacgcgcaaaaaactggggcacgaaccggagtggtcagaactggccgtggaagggatctcacatgaagattatctcgaatatcagcaactggaaggggcggaaacgctcgccagcctggacgaactgctgaacggcgaagggcctggtattccgcttgcaggccgggaactggaagatcagtttgtcacccagcaaatgttgcaacacgcgctttcacaattaagcgaaaaagagcaactgatcctctccatgtattaccagcatgagatgaatctcaaagagattgcgctggtattagggctaaccgaggcccgaatttgtcaactgaataaacagatcgcgcagaaaattcgtgattttgtctatccgaattaaagtgaagaaatcatgcaaaaaatattaggtttactggtggtgctcggctgcgtatttggcggttattttgaagcgggtgggcaattagtggctatctggcaaccggcggagatgatcattattttgggtgccggtttcggggcgatgattattggtaacccgaaacatgtactgaaagagattgcccatcaaattaaaggcgtgatcagtaaaaaacagctcgggccggagtttcagcgtcagctattaatgtgcctgtatgagttgctcgaaatggtgcaaaacggtggcctgcgcatgctggatcaacatattgagcaaccggaagagagcaccattttccagaaatacccgctggtgttaacccagaagcggctggtgacctttattgccgataactttcgcctgatggcgatgggcaagattgacgctcatgaactggaaggcattctcgatcaggaactggacactgcggaagagtcgctgctcacgccgtcgcgctcgctgcaacgtaccgccgaagcgatgccggggtttggcatttgtgcggcggtgttgggcatcatcatcaccatgcagtcgattgacggctctatcgccctgattggcctgaaagtggcggcagcgctggtggggacgtttttaggcgtctttatctgctactgcctgatggacccgctcgctaacgccatggaacaacaggcgcgggcagaacattctttgctggaatgcgtgcgtaccgtgctggtggcgcaggcaggcggcaaaccgacgctgctggcggtggacgccgggcgtaagctgctgcatctggcatctaaaccgaccttcgccaacctcgacgcgtgggtgaatgcgatgctggagcaagaataagcatgagaaagacgggcaaccgccgcgagcgtggggcaaaaaccaccatcgtccggcggcagatcaaaaagaatcatgccgggcatcatggcggggcgtggaaggtggcgttcgccgactttactttggcaatgatggcgctgtttatgacgctgtggattgtcaacagcgtcagtaaatccgagcgtgaaagcattatcgccgcgctgcacgggcagtcgattttcagtggcggcggattgtcgccgttaaataaaatcagcccgtctcatccgccaaaacctgccaccgtggcggtgccggaagagacggagaaaaaagcgcgtgacgtcaatgagaaaacggcgctgctgaagaagaaatcagccaccgagcttggtgagctggcaaccagtatcaacaccattgcccgtgatgcgcatatggaagcgaatctggagatggagattgttccccagggattacgcgtgctgattaaagacgaccagaaccgcaatatgtttgaacgcggcagcgcgcagattatgccgttctttaaaactttgctggtggagctcgcgccagtgttcgactcgctcgataacaaaattattattaccggacataccgatgcgatggcctacaaaaacaatatctacaacaactggaacctttcgggtgaccgcgcgctttcggctcgtcgggtgctggaagaggccggaatgccggaagataaagtgatgcaggtaagcgcaatggcggaccagatgctgctggattccaaaaatccgcaaagcgcgggtaaccggcgcattgagattatggtgctgaccaaaagtgcgtccgatacgctgtatcaatactttggtcagcatggggataaagtggtgcagccgctggtgcaaaagctggataagcagcatgtgctttcacagcgaacgcgctaaatgctgaatctttacgcatttctcaaaccctgaaatcactgtatactttaccagtgttgagaggtgagcaatgcgtaaaatcattcatgtggatatggactgctttttcgcagcggtggagatgcgcgacaatcccgccctgcgcgatatccctattgctattggcggcagccgcgaacgtcggggggtgatcagcaccgccaattatcccgcgcgtaaatttggcgtacgtagcgctatgcctactgggatggcgctcaaattatgcccacatctcaccttgcttccggggcgctttgacgcctacaaagaagcctcaaatcatatccgtgaaatcttctcgcgctacacctcgcgtattgaaccgttgtcactggatgaggcttatctcgacgtcaccgatagcgtccattgccacggttctgcgaccctcatcgcccaggaaatccgccagacgattttcagcgagctgcaactgacagcgtctgcgggcgtggcaccagtaaagtttctcgccaaaatcgcctccgacatgaataaacccaacggtcagtttgtgattacgccggcagaagttccggcatttttacaaaccttaccgctggcaaaaatccccggcgtcggcaaagtctcggcggcaaaactggaagcgatggggctgcggacctgcggtgatgtacaaaagtgtgatctggtgatgctgcttaaacgctttggcaaatttggccgcattttgtgggagcgtagtcaggggattgacgagcgcgacgttaacagcgaacggttgcgaaaatccgtcggcgtggaacgcacgatggcggaagatatccaccactggtctgaatgtgaagcgattatcgagcggctgtatccggaacttgaacgccgtctggcaaaggtaaaacctgatttactgattgcccgccagggggtgaaattaaagttcgacgattttcagcaaaccactcaggagcacgtctggccgcggctgaataaagctgacttaatcgccaccgcgcgtaaaacctgggatgaacgccgcggcgggcgcggtgtgcgactggtggggctgcatgtgacgttgcttgacccgcaaatggaaagacaactggtgctgggattatgaataacatacaaataagagactatcagcctggcgattttcagcaactatgcgctattttcattagagcggttacgatgactgccagtcagcattattcaccacaacaaattgccgcctgggcgcagattgacgaatctcgctggaaggagaaactcgcgaaatcacaagtgcgggttgcagtcattaatgcaaaactggtcggctttattacctgcgttgaacactatatcgatatgttatttgttgaccctgaatacacccgccgtggggttgccagcgctttgttaaaacctttgattaagtctgaatccgaacttacggtggacgcaagcataaccgcaaaacccttttttgaacgttatggttttcagacagttaagcagcaacgcgttgaatgtcggggagagtggtttattaatttttatatgcgttataaacagcaacattaaatccagcttgcaatgaaaataacgcaagcctagtatgtgcgcgttttcttattccacaaactgcaaggaggtaaatcatgacaaatcctttatcaatgactctttgcagacctttccaggattaattctttttttcttgccctggattcgtctgccatttcctgattttttaattgttactctcaataattcaagtcgcaacacatgcaacttgaagtatgacgagtctatttacggaatggtatatgggcaattatattcgtcccttatccgatgcggtatttaccatcgcatctgatgacctgtggatcgagagtttagcgatccaacaattacacaccacggcaaatttacccaacatgcagcgcgtagtggggatgccagatttacatcccggacgcggctatccgattggcgcagcgttcttctctgttggtcgtttttatccggcactggtcggcaatgatatcggctgcggtatggcgctatggcaaacagatattctcactcgcaaatacaacgccgataagtttgaaaagcgattatcagatctggatgacgttgctgaagaaagctggctggaggaaaacctgccgtcagcatttgcacagcatccgtggcgcagctcgcttggctctatcggtggcggcaatcatttcgctgaactgcaacaagttgatcaaatcatcaacgctgaactgtttgcactggcaggtctggatgcacaacatctgcaactgttggttcatagcggctcgcggggggtggggcagtctattttacagcggcatattgcctcgttctcgcatcatggtttgcctcaaggcagtgacgacgcgctacggtatattgcggaacatgacgatgcgctggcgtttgcgtgtattaatcgccagatgatcgctttgcgcataatgcaacaagttaaggccacgggaagtccggttctggatgtggcgcataactttgttagcgcgtgtcaaatcggcgatcaacagggctggttgcatcgtaaaggtgccacgccggatgacaacggtctggtgattattcccggttcacgtggtgattactcctggattgtacagcctgttgcgaacgaaaaaacgctccactcgctggcgcatggggcagggcgtaaatgggggcgcaccgagtgtaaagggcgtctggcagcgaaatacacggtgacgcaactctcgcggactgaacttggcagtcgggtaatttgtcgcgataaacaactcatctttgaagaagcgccacaagcctataaatcggctgaaagcgtggtgcaatgtctggtgcaggccggtttaattattcctgtcgcgcggctgcgtccggtgctaacgctcaaaaacagtggagggaaaaaaggatgatcttgctacaactctcctcagcgcaggggccggaagaatgttgtctcgcagtgaaaaaggcgctggagcgattaattaaagaagctgcccgacaagacgtcgcggtaacggtgttggaaacagaaacgggccgctactctgacacgctgcgttcagctctggtttctctggatggcgataacgcatgggcattaagcgaaagctggtgcggcactattcagtggatttgtccgagtccgtatcggcctcatcatgggcgcaaaaactggtttctgggcattgggcgttttaccgctgatgagcaggaacaatcggatgcaatccgttatgagacgttgcgttcgtcggggccgggcggtcaacatgtcaataaaaccgactcggcggtacgcgccacgcatttggcatccggtattagcgtgaaggttcagtcagagcgtagtcagcatgctaacaagcggctggcacgattgctgattgcctggaagctggagcagcagcaacaggaaaatagcgcggtgctgaaatcgcagcggcgaatgttccatcaccagattgaacgtggcaacccgagacggacatttacagggatggcttttatcgaaggataatgaaggatgaaactgccggaaggcgattaaacgccatccggcagcaaatcaaataattacttcgccggaatttctttcagcagttcagtcagcagcgtccagtaatgacctacgctttcgatgtgaacttgctcatccggagagtgtggaccggtgatagttggcccgatagaaaccatgtccatttccggatacggttttttgaacagaccacattccaggcccgcgtggataatctggatgttcggtgttttgttgaacagacgctgataggtttcacgtaccagatgcatcaccggagaattagcgtccggctgccagccaggatatgcgcctttcgcttcggttttcgcgccagctagtttacccagcgaatccagcatgctcaccacgtagtctttaccgctgtcgatcagtgaacggatcaggcagtgaatttctacgttattgtcagtcatggtcaccacaccgacgttcagggaggtttcgaccacaccttttgccacgtcggaattgcggatcacaccgttcggggtggcgttcagcagacgaataaaggtatcgcgagatttcgcaatcagggcagctttatcgttcgctacagagtccagcaacaaggccagatttttctctttctctgccagctcgtttttcaggatctcctgataggtattcaccagagatttcaggacgtcgactttatcagctgcgacagcaatggtcgcaaaggcttcacgcgggatggcgttacgcagtgtgccgccgttgaaatcgataaggcgcagatccagttcttccgcatgacccgccaggaagcgcaccagtagtttgttggcattacccaggccaacgtggatttcaccgccggagtgaccgcctttcagaccttttaaggttaacttgaaggtttcaaaaccagctggaaccgcttcacgatctaaatgcaggttggaggtgaagtcgataccccccgcacaacccatgtagatttcaccttcttcttcggagtcggtgttaatcagaatatcagcctgcaaccagttgctctgtaagccgaacgcaccgtccataccggcttcttcggtcatggtcagcagcacttccagcgggccgtgaaccacgttttcgtcagccagaaccgccagcgcagacgccataccaatgccgttatctgcacccagcgtggtgccgcgcgctttaacccattcgccatcaatataaggctggataggatctttcgtgaagtcatgcacggtgtcgttatttttctgcggcaccatatcgaggtgggcctgtaagacgaccggtttacgattttccatacctgcggtagcaggtttacgaatcaggatattacctacctgatcgcgttcgacatggaaacctttctcttttgcccaaccaacaatgtattcagcgagttgctcttcatgataggacgggtgaggaatagaacagattttggcaaaaatatcccacagcggctgtggagataattgagacagttcagacacgttaagtctccttgtcgatcacccgcaaaacagtattgcaggtcacagggttagcagaaaatgttgtcaacacaagacaggcttgcgagatatgtttgagaataccactttatcccgcgtcagggagaggcagtgcgtaaaaagacgcggactcatgtgaaatactggtttttagtgcgccagatctctataatctcgcgcaacctattttcccctcgaacactttttaagccgtagataaacaggctgggacacttcacatgagcgaaaaatacatcgtcacctgggacatgttgcagatccatgcacgtaaactcgcaagccgactgatgccttctgaacaatggaaaggcattattgccgtaagccgtggcggtctggtaccgggtgcgttactggcgcgtgaactgggtattcgtcatgtcgataccgtttgtatttccagctacgatcacgacaaccagcgcgagcttaaagtgctaaaacgcgcagaaggcgatggcgaaggcttcatcgttattgatgacctggtggataccggtggtactgcggttgcgattcgtgaaatgtatccaaaagcacattttgtgactatcttcgcaaaaccggctggtcgtccgctggttgatgactatgttgttgatatcccgcaagatacctggatcgaacagccgtgggatatgggcgtcgtattcgtcccgccaatctccggtcgctaatcttttcaacgcctggcactgccgggcgttgttctttttaacttcaggcgggttacaatagtttccagtaagtattctggaggctgcatccatgacacaggcaaacctgagcgaaaccctgttcaaaccccgctttaaacatcctgaaacctcgacgctagtccgccgctttaatcacggcgcacaaccgcctgtgcagtcggctcttgatggtaaaaccatccctcactggtatcgcatgattaaccgtctgatgtggatctggcgcggtattgacccacgtgaaatcctcgacgtccaggcacgtattgtgatgagcgatgctgaacgtaccgacgatgatttatacgatactgtgattggctaccgtggtggcaactggatttatgagtgggccacccaggcgatggtgtggcaacaaaaagcctgtgcggaagaagatccgcaactcagtggtcgacactggctgcatgcggctacgttgtacaacattgccgcctatcctcatctgaaaggagatgacctggccgagcaagcgcaggctttatcaaaccgcgcctatgaagaggccgcccagcgtctgccgggcacgatgcggcagatggagtttaccgtacccggcggtgcgcccatcaccggctttttgcatatgccgaaaggcgatggcccgttcccgacagtattaatgtgtggtggtctggatgcgatgcagacggactattacagcctgtatgaacgttattttgcgccgcgcggcattgcgatgctgactattgatatgccgtcggtgggcttttcttcaaaatggaagctcacccaggactccagcctgttgcatcagcacgtcttaaaggcgctgcctaacgtaccgtgggtggatcacactcgcgtcgcggcctttggtttccgtttcggcgctaacgttgccgtgcgtctggcatatcttgaatcgccgcgtctgaaagcggttgcctgtcttggtccggtagttcataccctgttgagtgattttaagtgccagcaacaggtgccggaaatgtatcttgacgttctggcgagtcgtttggggatgcatgatgcttccgatgacgcgttacgcgtggagctgaatcgctattcattaaaagtgcaaggattgctggggcgtcgctgcccaacgccaatgttatcaggctactggaagaacgatccgttcagcccggaagaggactcacgcttaatcacctcatcatctgctgacggtaaattattagagatcccatttaacccggtgtatcggaattttgacaaaggtcttcaggaaatcaccggctggatcgaaaaacgcttgtgttaaaaatttgctaaattttgccaatttggtaaaacagttgcatcacaacaggagatagcaatgacgttaccgagtggacacccgaagagcagattgatcaaaaaatttaccgcactaggcccgtatattcgtgaaggtaagtgcgaagataatcgattctttttcgattgtctggctgtatgcgtcaacctgaaaccggcaccggaagtgcgtgagttctggggctggtggatggagcttgaagcgcaggaatcccgttttacctacagttaccagtttggtctgttcgataaagcaggcgactggaagagtgttccggtaaaagacactgaagtggttgaacgactggagcacaccctgcgtgagtttcacgagaagctgcgtgaactgctgacgacgctgaatctgaagctggaaccggcggatgattttcgtgacgagccggtgaagttaacggcgtgagtgaaatgtgccggatgcatcacatccggcaataatcattaaaactgataggtcatgccaaccgcgacaatatcatcattattaatattcaatttgttatcgctatccagttggttgattttataatcaacaaacgctgacatatttttgttgaaataatatgtagccccgacatcgatataattgaccagatcttcatcaccgataccttcaatatctttccctttcgataagacataacccagcgatggacgcagaccaaagtcaaactggtattgagcgaccgcttcaaagttctgtgtcttattggcaaagccgccagttattggcgtcattttgcgtgtttcagaataaaaagttgccagataaatattattggcatcgtatttcagacctgtagcccatgcttctgcacgcttgcctgtgccacggctttgcaggttctgctcgttggtgcgatctgagttggtataggccccactaatggcgaaatcgctgccgccaaagtcatatgtcaatgacgtgccgaagccatcgccgttttgctttttaacgtcgcggttttcgtttttcccttgatattgcagggttaagttcaggccatcgataacgccgaagaagtcggtgttccgatacgtcgccagaccgctggcgcgtttggtcataaagttgtcggtctgcgccgaggaatcgccaccaaattccgggaacatatcggtccaggcttccacgtcatacaacgcgcccaggttacgaccataatcgaaagaacccaaatctttatatttcaacccggcaaaagcgagacgcgttttttgctgtgcggtatcactctccgctttatttccggcaaactccgcttcccaccgaccataaccagtcagttgatcgttaatttgtgtttcacctttaaaaccaaaacggatataactctggtcgccatctttactggcgttatcactcatataatgcatggctttaactttgccatagacatccagtttattaccgtctttattatatatttctgcagcctgtacagatgcagatgccacaatgcccatcaccactaatgccagagtgctctttttcattttcattcctgattttaattaacgcgcgaatattcagcgggagagccccgttgaaaacaggaaagtttttaacctgagattgttaaagatatattacagattaataatattcttaaaatgtggtaatttattaaatctgtaataaaagcgtaaacaactgccgctaggcttgctgatcccgcgcaacaaaacgccatgctttgctcgcagatggttggcaaccgacgacagtcctgctaaaacgttcgtttgatatcatttttcctaaaattgaatggcagagaatcatgagtgacagccagacgctggtggtaaaactcggcaccagtgtgctaacaggcggatcgcgccgtctgaaccgtgcccatatcgttgaacttgttcgccagtgcgcgcagttacatgccgccgggcatcggattgttattgtgacgtcgggcgcgatcgccgccggacgtgagcacctgggttacccggaactgccagcgactatcgcctcgaaacaactgctggcagcggtagggcagagtcgactgattcaactgtgggaacagctgttttcgatttatggcattcacgtcgggcaaatgctgctgacccgtgctgatatggaagaccgtgaacgcttcctgaacgcccgcgacaccctgcgtgcgttgctcgataacaatatcgttccggtaatcaatgagaacgatgctgtcgctacggcagagattaaagtcggcgataacgataacctttctgcgctggcggcgattctggcgggtgccgataaactgttgctgctgaccgatcaaaaaggtttgtataccgctgacccgcgcagcaatccgcaggcagaactgattaaagatgtttacggcattgatgacgcactgcgcgcgattgccggtgacagcgtttcaggcctcggaactggcggcatgagtaccaaattgcaggccgctgacgtggcttgccgtgcgggtatcgacaccattattgccgcgggcagcaagccgggcgttattggtgatgtgatggaaggcatttccgtcggtacgctgttccatgcccaggcgactccgcttgaaaaccgtaaacgctggattttcggtgcgccgccggcgggtgaaatcacggtagatgaaggggcaactgccgccattcttgaacgcggcagctccctgttgccgaaaggcattaaaagcgtgactggcaatttctcgcgtggtgaagtcatccgcatttgcaacctcgaaggtcgcgatatcgcccacggcgtcagtcgttacaacagcgatgcattacgccgtattgccgggcaccactcgcaagaaattgatgcaatactgggatatgaatacggcccggttgccgttcaccgtgatgacatgattacccgttaaggagcaggctgatgctggaacaaatgggcattgccgcgaagcaagcctcgtataaattagcgcaactctccagccgcgaaaaaaatcgcgtgctggaaaaaatcgccgatgaactggaagcacaaagcgaaatcatcctcaacgctaacgcccaggatgttgctgacgcgcgtgccaatggccttggcgaagcgatgcttgaccgtctggcactgacgcccgcacggctgaaaggcattgccgatgatgtgcgccaggtgtgtaacctcgccgatccggtggggcaggtaatcgatggcagcgtactggacagcggcctgcgtcttgagcgtcgtcgcgtaccgctgggggttattggcgtgatttatgaagcgcgcccgaacgtgacggttgatgtcgcttcgctgtgcctgaaaaccggtaatgcggtgatcctgcgcggtggcaaagaaacgtgtcgcactaacgctgcaacggtggcggtgattcaggacgccctgaaatcctgcggcttaccggcgggtgccgtgcaggcgattgataatcctgaccgtgcgctggtcagtgaaatgctgcgtatggataaatacatcgacatgctgatcccgcgtggtggcgctggtttgcataaactgtgccgtgaacagtcgacaatcccggtgatcacaggtggtataggcgtatgccatatttacgttgatgaaagtgtagagatcgctgaagcattaaaagtgatcgtcaacgcgaaaactcagcgtccgagcacatgtaatacggttgaaacgttgctggtgaataaaaacatcgccgatagcttcctgcccgcattaagcaaacaaatggcggaaagcggcgtgacattacacgcagatgcagctgcactggcgcagttgcaggcaggccctgcgaaggtggttgctgttaaagccgaagagtatgacgatgagtttctgtcattagatttgaacgtcaaaatcgtcagcgatcttgacgatgccatcgcccatattcgtgaacacggcacacaacactccgatgcgatcctgacccgcgatatgcgcaacgcccagcgttttgttaacgaagtggattcgtccgctgtttacgttaacgcctctacgcgttttaccgacggcggccagtttggtctgggtgcggaagtggcggtaagcacacaaaaactccacgcgcgtggcccaatggggctggaagcactgaccacttacaagtggatcggcattggtgattacaccattcgtgcgtaaataaaaccgggtgatgcaaaagtagccatttgattcacaaggccattgacgcatcgcccggttagttttaaccttgtccaccgtgattcacgttcgtgaacatgtcctttcagggccgatatagctcagttggtagagcagcgcattcgtaatgcgaaggtcgtaggttcgactcctattatcggcaccatttaaatcaataagttacacatcattagtaccttccttattttttgactgggacaaatttgggaccgatgggtttaggatcgagtctatttgccgtgcgtgttcggtaaggtgattaggtgcaaggtgagcatatcgacgaaccatttcgatagactcccagcctcccatttcctgtaacactgacaacgggactccggcttgaaccagccaacttgcccaggtgtgtctcaagtcgtgaaatctgaaatcatcaataccagcccgtctcagcgccgctttccaggctgtgtttgcgtcataccgcatcttcctgactgttggcgctttcgttccgtctggtttggtacagctttccttgtacacaaatacccaacggtgatgattcccgatttgttttttcaatacgcgacatgcagtatcattcagcgcaacgccaattgcgcggtttgatttactctcttccgggtttatccatgccacccggcgctgcatatctatttgttgccattcaaggttgatgatgttcgagcgtcttaggcctgttgccagtgcaaattcaacaacagactttaatggctccggacattcatcaatcagcctttgtgcttcatggggctccagccagcggatccgtttattctttggttggggcactttaataattggtgccttatccagcattttccattcacgctctgcggctcttagtagggcctttataaatgaaagatgcgtagccttcgttgcaacggacgctggttttggcgtgtattctggaacaggtttccctttttttctgcatgcttctgccctgagtttccagttttcctcatgacgccggttcgtcattttctgcattgctgaataaatttttgattcagtaatgtctcttagttgcattcctgcgaaatgttgaagccagaatccgatccggcttttgtcatcgtccagtgattttttatgtgctttctcttcaagccacctgacacacgcttcctcgaacgttatatcaggtatttcaccaagtttgctgacccgccatgcttcagcctttagcttgtcatggagttctgtcgcctgccttttgtcctttgttccaagagactgtttaaatcttttaccgttcggcaatgtgaaactggcgtaccatatttcacctctgcggaagagtgacattttctttcctctgttatgccatcacccgcgctcacctggacagtatgcagcggagactgaagagccgcaatgcaggcttgtcgtgttgtgaggtaaggagatttattcttagtgggatctttgcgtgttgcctgaagacgccctgtgcgtatccagttaatggcagtcggtctggatatcttgagaaaatgacaggcctcatcgagtgtgaggctgtatggctccattatttcacctcttgttgtgacattgttgaaaaatggataccagctcgttgctgccagacgatccaaccgagagtcatatcccatgccatgtattcgttatcgccgttttttgctctccgacgatctactaagtcaccgaaacgcttttccatgaataattcataagcttcgcgttcatctggttctacttccagagataggagtgcgatttcataagcacggcgctcaatatcgtctcgcacgtcaaggctgctgatacgctctttaatttctttaatcagttctttgtcggtaaaagtggtcattatgctccagcctccggtgcttttggcattactgcccagtgagtgatattgacgttttcaaggtccccgacctgaaatgtccactgccattctccggtttctttttgtccccaggtgtaccagagagaacgccagccaattagccagccttctccgttagcatcgaataacaaaacactttcatttgctggtggcagttcagttgacactggtattactttgttttcctgtgctgcacatttagcttcaagcgcatcgaatttacgcaccaggtattcagcatctgtttcattcactttcagatctcgcggtacacatctcccacgaagaaacccttccatttcgaaaacattcatgcgcatttgcgtaactccgataactcgttaaaacgttccataaacatcccgtaggcatggcccggtgccagtggaatcacgttgaacatctctgttgccgggatgccttccagtacaggccagaaagagccatcatcaagcccgagatcgcggcgttcggttgccagcatgatgagatcggcatatttcacgggcgtactcataaccgggggtaacccgtatttctcacggattacggcgtctattttttcttccatctgtttatagtcaggaagaaggcgtttcagtggagcggggatgtcctggcaatacgcttctgttgcatcatgcattaacgcttcaaaagcaaattcctgcggtaccagctggctgcaaagaaccgcatgttgggcgacgctgtagaagtgcgaaagatgaccggcaaagcgacagatatttgaaagggaaaccgcgatatcgttaatatcgatgtcgtctttatttatcctgtcataataaaaatgcttaccggaaaaagttttaataaatgacattttgttctccacgtatatgcgctgcaccgcgctgaattctggtaaaaggaagccctcaccatccggcgattattgagttaattacgtttccataaatgcccccgcaggggcatttgcagtaataaaatcaggcggtgaaagtaccaataaaggtttctactttgctgtctttgaatttctcaacaagcagatcacgaaattcgttagccatttcttcctgcactgcttccagctgaataatgcgcagaaccagtacaggacgatcgccagtgataatgctgaggcgtaatttaaatggacgttctttcagaccttcaaacggaacgcatttaaattcaaatgccactggcataatatctttggtcttcgcttcgacagactccatcagggagcgtttgccgctgaagtcattatcttcaaaatcagcggtctggtttgcttcaatcgtgattttacggacagccgcagccgcttttgttgcctgaatggcgtcaccattagcatcaaagcccactaggtagtcggcccagtcttcaatccattctgccagtgacttctgggagttacgctcgccattaacagacaacagagcagaaaacggtgctgtctttttcagtttgagagtggcggtgttatctgcgtgacctggttcatcaatagtacccaggttaagcacactgacggcacgcatattatcggcatcgataaagcagcgggtgccttcatctgcaagatctttagaataacgggtaaagtcatcgatgctggcagtggaaagcgcaccacggaaacggaagcgatttaaattaaatttttccagatcatgaatgcggaaattctcaggcaatgccaccgcatcggcaccaatcttactgataatttcattaacaccctgagcagaaataagggcatggatttgattaattgcggttgcgtctaagttctgagacataataagtcctcactatataaagatattcagtgatgagataaataatcggttaattaagaacgatattaatgacctgctgcgcggagttttccgtcaggttcaccggcaagagtcagtaattgtccctggtcttcctgcagaatagtcaggcgaccaccgcgattgacatacatcggcgtttcggtggtgtcttcttcggaaattttcccgcggttagtcgggcgaacatatgagagtttgtgtttgattttcacacggttctcatcaaatggttcgatttccaagttgagtgagaccttacctttggttttcgtgttcatcacacctgaagcgacttcactgagaactgcgccgattttggtttcaaatacgcgccgtccagctccccgataaatgcctgcacatcagtactgcgttcgctagccattttgctgctcctcatcatatcgaccctgcaaggtcggttggtttctccacaaaacagagaagaacacctgcggtggcagccgcccgggtggattgggttatgagcccgtcgtccggtgatgctcttctctgttttgtaaaaagagcggtaccagccggaagaaagtgtacaaactggtaccgccaaagcagtggctgttgtggtggggttgtcactcaggcgtatggtcaacctgacaatccggtgtcctcaacggggaaagagtaaccccgccatacttaccgccgcgccatttcgcggattaccacaacgctgagagcacttagccagttacggcaccacactttgtcgcggctccataaatgccctcatcgttgcaccctggtctcttcccaggcgtcaaaccggatcgccacgctggttaggcgtcttatcagcatcatcattgacttgcacattccggctacctggtttgtttgcccgagcaaggagtggattgtcccctttaacgtccccagaccgctaacgacgcatgtgccatacgccgtgttacaaccaaattttgtttaatcttgcctgtgacatgtttcttttagatacattatgtatctcatgggtacattgtcaagtataaaaaaacctgccgaagcaggttataaatattgattaggcctttattttgtatcttcttggttttcctgagaaaattactgtaccaattatagagcaattaccgttgatcttaatgtaaggttcaggccagtttgggtttaatgctttgaggtaacgctgtgttccatcttctatcaaccgcttaaaggtggtttcgcctgtatcgtgcatcaatgcaataacgtcgtcaccgtggcaggcagggacttcaggatctacaaaaatcatgtctcccgggcggtactcatcaatcattgaatcaccaatcacccgcaagatataagtcatttcgccacagggtacagggcagggataagtttctgctgtgctcaaatcaacctcagaatagccaacttctttccatgctccggcctgtacccatgatatgacagggactaacgttatttgtttgttagtaattgaaacatcaggtttttttgtgatgtttgttgtctggtgttcttgatcaagccatccgacaggaaggtcgaaacatttttcgatgtgccgtgccatgctgtcaccgatatttttagtagcaccatctcccataaacctgctggtctgggttggctcgcgatcaatcatggtggcaaaggaagaattcccgccaacaccatctctcagttttctggcgttagaccgccggatgtcatggactgttttcataacgaaattaaaacctttgtaccgatagggtacaagtatcttgaaggttcatctcaatcatgtaatatgtatatcggaggtacatattgtatgaaagcgtattgggactctttaaccaaagaacagcagggcgagttggccggaaaagttggctcaacaccaggctacttacggctggttttcaatggttataaaaaagccagttttgtgctggctaaaaaacttgagcaatgcacgtcaggtgcaattacgaaatctgacttaagaccggatatctatccgaaagattaacagaacaccttcaatttttaaccacagaacgatgaggctaaccgtgggtaagcatcactggaaagtagaaaaacagcctgagtggtacgtgaaagctgtcagaaaaactatcgcggcgttgccggggggttacgctgaagctgctgagtggctggatgtaacagagaacgctttattcaaccgccttcgtgcagatggcgatcagattttcccgctgggatgggcaatgattttacagcgcgcggctggcactcactacattgcggatgctgtcgcacagtctgctggtggggtgtttgtatcgcttcctgaaattgaggaagtagagaacgccgatataaaccagcgcctgctggaagtcatcgaacagatcgggagttactcaaagcagattcgttcggcaatcgaagatggggtagtggagccacacgagcagacagcaattaatgatgagttgtatctgtcaatttcgaagctccaggagcatgcagcactggtctacaaaatcttttgcgctccagaaaagagtgacgcccgcgagtgtgcagctccgggcgtcgtggcgttttgtgtctgtggagaaactaacgcatgaacagtttaacggcaaataaccgtttgtcgcaacagctggtggtcagcgtcgctgaacacctgttgttacggcatgaatgcagattaccaaatcacctggctgtaagtaaccacagagaactttacctgactgtggggggcgagttgtgcaggaacttaaccgctggtttcgtgatggaagagggctttatgtccatgttattcgttgggagccagaaacacagcgcgttatctatcttcgcaaagactacccgcatgagtgctttagtcctttgtggaaattcaggcgtgattttgttgagtgtgaaggaccaccagcacattgattctgccattccgggacgttacactgttcaggcaccttataaagcgggtgccgggattggcgtcctggaattgatcaaggcgatatatgacgcgccagcgtcttttttatcgtccgcatttgctcacatcaaagttatggtgggctgggcgggggcatcgaaagatgcgccggtttccttgatcaccggttacgccaaccccgttcagttcaccaccagcgaaattggcgtttccggtggtggaagtatttcaccgatcaaggaggctgccatcatggctactgtcccagccctcactcgtctgaatgatgaagacttacataaactcagttatgtaacaactgcactacgtgctctgcgcaaggtaactctttcggatccgcaggcgcatcaggttttggtagaaacccttcttaacttgcaggctgaacgtattcgtctggcggataaggctaattttcatattcaccgtctcctgaatatcagcggagggcatcgtcatgcttaatccgttgatcctcaatatttgccgtttgcttcagcgtaaaaaaacatcaattcctacagttgggcagtggtacaccacgcctgcagggcatgttctacgtgttagcctggttgaccgtgaatgccagaaggtgatttgtgaaccgctgggccgtaattaccgcgtcagtatgccgcttatagcctttcgctccggaaaaaacatgaagcatctcggaggtgcagcatgagtatggagctgatggttaaagcgatgaaaattcgagtgggtaatccattgcgaaaactggttctgatcaagctggctgataatgccagcgatcagggtgagtgctggcccagctaccagcatattgctgaccagtgcgaaattagcaaacgttctgtgatgaatcatattgcggccctttgtgagtccgggctggtaaaaaaagtcacccggaaaggtgaaaaaggtaactcaagtaatatctatctccttcatcttgatggtgcaggagattcactatggggtagtgcaaataattcactatctggtgcagcaaattcaccaggtagtgcaggagttgcaccagggggtggtgcaggagattcacccagaaccagtcactcttttgaaccagtcaaagaaccagtcaatgaaccaatagctgttggtgcatctgctgatgagtccgtgcgagttcgttcaaaccgaccggaatactctccggagtttgagcaggcatggctggcataccccaaacgtgctggtggcaattcaaaatctgcagccttcaaagcctggaaagctcgtttgaatgagggggtaaaacccgaaaccatgctggaaggtgtgaaacgctacgcgggctgggtatctgcgatgggtaacagcggcacacaatttgtgaaacaggctgtcacgttctttggtccggatcgtcatttcgaagaatcctgggaagttcctgcagtatctgcagccagacgcgaggacccgtacttcaaagccagttacgacaacgtggactacagccagatcccggcaggattcagggggtgatcatgagtcttttgaatgaagttcagaaattcattgaagcccatccggggtgtacttccggagacattgcggatgcttttgcaggttactcacggcagcacgttctgcagtcagcaagcaagttacgtcagagtgggcgtgtggctcaccgttgtgaaggagatacacgcagacatttcccacgcctggctgagagagcgcaggagccggaaccacaaccagttcgtgaaaccagacctgtgcgcaatttctatgtcggcactaacgattcccgggtgattttgtgcctgactcgccaggcggaaaaactggtcagggagatggcggcatgacgacgttaactcaatgccagcagcaggtgctggatatgctgatttcttaccagaaagaacgtggcttcccgccaaccaatcaggaggtggcaaccatgctgggataccgttcagtgaatgcagcggtagagcatcttcgcgcactggagaaaaaaggcgtcatcacgataaagcgtggcgtggcccgggggatcacgcttcataccgcggtgaaggacgacgacagcgaggcggtcggtatcatccgcgcactgcttgccggtgaggagaacgccaggttgcgtgcagcccactggttacatgagagaggcctgaaagtatgaagctgatcctgccttttccgccctgcgtgaacacgtactggcgacaccccaacaaaggggcgtttgcaggtaagagcctgataagcgcggcggggcgcaaattccagagcgcggcgtgtgcagcaatagttgagcagttacgtcgtctgccgaaaccaacgtcggcacctgcttcagtggagatcgtgttgtttccgccggataaccggatccgcgatctggacaactataacaaggcgctgtttgacgccctgacccacgcgggtgtgtgggaagacgacagtcaggtgaaaagaatgctggtggagtggggaccggttatcccggaagggaaggtcgagatcactatcagtaagtacgagaaaacggcgggtgcagctgcctgataaagaggagaaacgaagtatgaataatctgatggtcattgatggtattgaagttcgtcgtgatgcttatgggcgttacagcctgaacgatctgcatcgcgcagcagtagcatctggtgcaaatgccagaaccaaggagccaggaaagtttctttccagccaacagactgttgagcttgttcatgaattgaccaacacccagaatttgggtgttgacccggtgagtgtgattcatgggggaaatgaacggggaacgtatgtctgcaaggaactggtgtatgcctatgcaatgtggatcagcccgtcattccatctgaaggtgatccgtactttcgatatggtaaccagcgcaccggaaaaattatccggacaggctgctgacaagatgcaggctggtgtgattctgctggactttatgcgtcgggagttaaacctgtctaactcttcagtgcttggtgcctgtcagaaactccaggaggctgttggcttaccgaatctggcaccgcgctatgccattgatgctcctgctgatgcacacgatggctcaagtcgcccgacactgtcactgagtgcactgctgaaacagtatggtatacgcctgacggctaatcaggcatatcatcagatggtgaaactggggatcgtcgagcagcgcgaacgatacagccgtaccgcgattaacaacatcaaaaaattctggtcgctgacagcgaaaggttgcatgttcggcaagaacatcaccagtcccgcaaatccgcgcgagacgcagccgcatttcttcgaatcccgattccctgagctgttaaagctgctcgataccgttcattgaggtgaccgtgagagcactactgacccctgaaattgccccgcgtatggggatcgtattgttcaggccaggttcagagctgatgcccctgtttatgcaggggcgtgtcctgctggagcctgagccggagcgttattcatctttcgccagtggtgccgttcccgcggcatcacaaccgctggcggatgatcctgccgttcgggccgtgttccgcaatgaggcagtgatccgtcgtgctggtggcgtggaatgtcttgaaagctggttacttcgtgaaaaaggctgccagtggcctcattccgactggcacagcgagaacatgaccacaatgcgacacgctccgggtgcaatccgtctatgctggcactgcgataaccagctgcgcgatcagttcacggaacggctggaatcaatggcaacggataactgtgcccgctgggtgttgtctgttgtgcgtcgggatctcggttttgatgacagtcacgttgtgacaatgccggaactgtgctggtggctggttcgtaatgatctggcggatgccttaccggaaagcgcagcccgtaaggcactgagattaccgaagcctgttgtgccgtctgtcacccgggaaagtgaccttgtgccttcggttcctgccaccagcatcatccaggataaggcgaaaaaggtgctggcgctgaaagtggatccggagtcgccggagtcttttatgttacgcccaaaacgtcgccgctgggttaatgaaaagtacacgcgctgggttaagacacagccgtgtgcatgttgtggaaagcccgctgatgatccccaccacctgataggttacggtcagggtggaatgggaacaaaagcgcatgacctctttgtgttgcctttgtgcagaaagcatcacgacgagctgcatgcggataccgtggcatttgaagagaagtatggctcccagctggagctgatatttcgttttatcgatcgtgcgctggcaataggcgtgctggcctgattttgtggaggaagttgatgcgtgatattcaaatggttcttgaacgttggggggcatgggcggctaataatcatgaggatgtgacctggtcgtccattgctgccggttttaagggattacttccttcaaaagtaaaaccccgtccgcaatgttgtgacgatgacgcgatgatcatttgcgggtgcatggcccgtctgaaaaagaacaacagcgatttgcacgatttattagtggattattatgtaggtggtatgacattcatgtcactggcaagtaagcatcgttgctctgatggttatatcgggaaaaagttacagaaggctgagggaataattgaagggatgttaatggcattagatatccggttagagatggatgtcgttgttacgaagtctaattgatacgctaattgttcacttaattttattaaaaatagggcgtataaacgcccccaaaataaagggtaatatataacagaaggtttatatagtcagaagcaaggtagtgcttctaaaggaagtggcttgagggagccacttatatgttggggaggcaacgcctcccgcaacatatcttttagtaaccaaattagaactggtaaaccaatcctgcagcaacgatgttgtcagtgcttacaccgagtgttttagtgaagtcatttttgtcaagcaggttgattttgtaatcaacgaaagtagacatatttttgttgaagtaataggttgcacctacatcaacatatttgactaagtcctgatcgccccatactccaagatccttacctttagattgcaggtaagcaacggacggacgcagaccgaaatcgaactgatattgtgcaacagcttcgaagttttgagctttattagcaacgaagtaatcagcaaatacagtcatattctgggtttcagaataggtagtggctaggtaaatgttgttagcgtcatattttagacctgcggcccaaacttctgcatttttaccggaagcaaatacttcaggaagaactttccctgcataaacttgagtgtcggtacgatcagatttcgcataagttgcaccgataccgaatccttcgtattcataggtagcagagaaaccgaagccatcaccgttaccttcggtgtagttctcgaaatcgctacgatcgtttttgccctggtactgagctgcaaagttcaggccatcaaccagaccgaagaagtcgttattacggtaagttgcaacaccagttgcacgctgagtcatgaatacgtcggtttgagtccaggtatcaccaccgaattctggcagaacgtcagtccacgcaccgatatcgtatgctacaccgtagttacgaccataatcgatggagccgtagtcaccgaatttcaggccagcgaacgcaagacgggttttatctttggaagaaccctgagattcagcacggttgcctttgaattcgtattcccactgaccgaaaccagtcagctgatcgttgatttgggtttcgcctttgaagcccagacgaacataagtagtgtcaccatcatctgcctcgttagaggagaagtagtgcttagcattaacttttccgtacagatcgagtttgttactgtctttattataaatctctgctgcctgagcagacatcgccaacagtactgatgcagctacagcagaaattgccactgttaattttttcatcgtgagacctttttttgaaatttattaaaaaatgatgccctgcgcgacaaatattcatctaatcaatgtgattaattcaagatgtaagttttagattcttatttaaattgtgagctagatctctattttcatctgaactttttctattgcatgctgtacatgactattacctgaaagaaaataaatttggtagcaaaatcatattaaaggttgttatttataagcgttttataattcatctatttaatttaaatgcactaaaaataacgccagaaattatttaatgattatttgtttatttttccttatgtgattgtggtggtgttttgaacactcgatatcattctcacaaatattgtttagaggtttacgtacgtaaaaaattggttatgctgttaagggtggttacttcgccacacagcttaaacccgccgtcgagcgggtttttttgtacctgtaaacctggtgcagtacagtaaacacgctggtggtcgtgaattcggggctcacggcttgcatttttgtaaagtgatatatacttatcttgcgaccagtaatgtcagggatattgatatgaatgaggcctgttctgttatttttgttcattccccgtttgttgtgctcttcgaaggaaaagtactctctctggaaagtggtagtgcacttcttgtcaggggaggggctggaccgttattgcccttttctgaatgttttcggcgtataagtctcagtgaatcgacaattagccgttacctgttgcgtagtggggtaaaacaggatgttgttttagtccggaaaatgccacgatatctttgcatgagttttcccaggccagaattgatgggcatcctgattgattatctttatgaggaaaagattcatacggacaatttagcggaaatgctttccttttcgtgtctggcgtttttttcatcagataaaatgttttcgtcgtttatgaccgcgtgtatcagtactatcagcggcaggcttggtgcgttgtttcatacagacattgcagcaaactggactctgcgagatgtgtcatcacggttatgtatgagtgaaagtttgttaaaaaaaagactgaaagaagaaggcacatgtttcagtgagttgttgcttacggagagaatgagaatggcagcaatgctgttgcatcaatatagctgtgccatcaacagaatcgctgtgcagtgtggctataataatacatcttattttatcagtgtattcaggcgttattttggggtcaccccggaaggttacaggatggctgcattcagtgagatgagttctggctccgctcaagaataactgaattttgcagtcattgtatgcaggaacgctttggcgggcattattctttgtgtgcctggcattctcagcagttcgggtggggcgtcccctggtcagcctgatagtggcgatggactggtaaaacgcaatgaccatgtgtgattggcgcggaactggaacaggaacattttaatcagacgtcagagaaatgtttttaatttagtaatgatataaattgtatatttctgatacagatgcatacatatattaaaaactaaaaacaaaatatatttttgatatctgaaaaaatgtcgttagtattctcgtcggtctggaagacggttattttggtgttcacaggggtgttactaccgtcggaaagaccagtgctggctttcacggtaattcgtgtgattactgaagaccgcatagtatgcgggtatcgtataatggctattacctcagccttccaagctgatgatgcgggttcgattcccgctacccgctccagcagtagacgataccaagttgttttgggcactgacatattatatgtgggatgttttcctgaatctttatccacatcctgttctgtaatacgtgatatcggttacagtccagtgctgtttttttacaacagcgtaatggtgcattatcggtggagattttgtatttcctgacagggccggtgatgcatcattccgatgttgttaacatctataaaaaacgttgagattaatcacgtattaagcaaaacctggaaattcatcttaaccgccgtaccaggcggtttttttttattcagtttcttcatggctcgctactgcgggcctttttcatttcttcgccctgctcagcgtatgtcaaatctgaatacaccacacaaaaggtatctgtgggtgcctttgacggggtgttgttttttacgggccgctggtggcccttttttatttacaggagaaaaaagtatgtctgaacccttatccggttccggcacggcggctgcgctcggaggggcgacggtattcgggctgttcaccggaacggatttcgggattgtgtttggtgcgttcgcgggggcgttgtttgtggcaacgatgccgcaggcgctttctgtctggcgggtggcggcgcattttctggtgtcgtttattatcggcgtactgggggcggatgtgatggcgtcttatctggtcgaaaaactggggcttcacagtaaatctgtcgacgcgctgtgtgcagtgctggtgtctgtggtgtcggtgaagattctgtcgttcatccaccagcaggatattgcatcgctggtgtcaggactgttctcccgcttgcgaggcggaggaggcggtaatgttaagtaaccttcccggattgctgaatgtggcgttatgcacggttatcgtgctgacgctctttttttatcgtcgtcgtgattccaggcataaaccgctgatgtcatggctggcctggctgctgatgctgctgtatgcctttgcgcctctcagctatctgtgtggtcgcccgttagcaacgggctggctggatgtgttttttaatctgctgttctgcgtgctggtgatacgcgcacgcgggaacgtcacaagaatctttccattgttgaggtgaatatgtcgggtaaattcagattcagccgccggagcgagaaaaatctggaaggcgtcaaaccacagctggttgctgtagttcgccgcgcccttgaactgtcggaggttgatttcggtattacggaaggcctgcgcacgaaagaacgccagaaacagctggttgcagaaggcaagagccagaccatgaacagccgccacctgaccggtgatgcggtggatgttgtggcctgggttggcagccaggtgtcatgggactggcctctgtacgagaaaatcgcgcaggcatttaagcaggctgccgcagagctgggaactgccatcgaatggggcggggactggactagcctgaaagacggaccgcattttcagttgaggcgataactaatacaaaaccccggcagaggaactgttcggggttaatgcagaaaatatgttgactctttgaatgattgttacgctttatcgtgagtcagttttccgtcaagaatgagacgattgttttcgatatgaagaaccagtgtttcaagatattctggctttaacttccaccatttcattttttttgctatttgtgtcaggcaatgattatgggtgaatataacggtagttttattatcggatgacaatttgagtatgttctttgcagcatcaagtccgcatgttgcagccaacggtatccgggaggctgcttttcctccagagaaaaaacaggctgtctgcattgtccgtatggtatccgtggagtaaaggctgaatgacgggaaagtattgctaaatatttttccataatcacgagctttaatggcaccattgacggtaattcctttattgcttgagagacatgcatttttgcttctgtcacatcgttcaccgtgacggataaggaaaattgtctggtgttgttgatttattttatgcgcctgtttcatattgattgtggtgggtgttcttaaaaaataaacaaacaaaagagtagttaaaatcaaagtgattaaataagtaattttctttatttctcgacgctgcatatgaaaagtcttttgcaaaaataaatgagattaaaaaatatatttcttaaatattaagaaaatcttaacgcgcaatgtcgtttgttgcttttataacttgcaacagattgggttttttgatgttgaacaatcagcattacagcagtccttcagtgaggggctgcgataatgctgatgtttaattgagcataaatgataattgctctcatttttcatgggtcctcccggtggggtggccttgccacggggcgggagcgtcgcggaaaaaggctagtttttgcatttccatggcggcggcagcatgttcggtaatttattgataattaaaagttatttctcttttcgcctgtacaatatttttttctccctgtcattagactagtttgcaattaattgaaatatataaataaacccgattttcacctgccagatggagttgcttatgtcaaatgtgagcgggatcggtgatgcttattactggagtgtttttaaaatcgccgaggcctttgggcttcaccgggacacagtaaaaaaacggctcctcgcggccaacactcctgtggcagcgactgtcagggggaaccccgtttacgccctgcagcatgtcgggcctgccctgtttagtgtgaagcatgaggcagcagactctgttcatgatccatcccgtatggagccgaaagagagaaaggactggtaccagtctgaaaatgaaaggatcaagctggaaaaggagcagcgaaaactcatccccgttgatgaagtagtcatcgtctattcgtccatgagaaaggctgtcgtccaggttctggagacaattccggatgttcttgagcgcgattgcgccctgactcctcaggccgtcggcgttgtacagcaggccattgatgacctgcgatacactcttcaggaaaaatcctacgaggcttgtgctgctgaattaattcctgatgaggaaggagagagtctctaggaggaataatgggtttttcatcagcccgaaatttgggaagggacatatcggcaggattttccccaccacgtcgcatgccgatttcggaggctgttaaaaaattcatgcgtgttcccaagggggctggtaactcggtgccatgggatcctgaactgacaccctacatcattgagcccatgaactgcctggcatcgcgtgaatacgatgcggtgatttttgttggtcctgcgcgaacagggaagaccattggtctgatcgatggatggattgtctataccatcgtttgcgatccttcggacatgctcgttgtgcagatgaccgaagataaggcccgcgagcattctaaaaagcgcctcgacagaacgttcagaagcagtgcggcggtaaagaaaagaatgagtccacgtcgtaacgacaataatgttcatgataagacgttcagggatggctcgttccttaaaattggttggccctcggtcaacattatgtcgtcgtcggattaccggtttgtcgccttaaccgattacgaccgttttccggagaatatcgacagcgagggtgatggtttctccctggcctcaaaacgtaccaccacatttatgtccgccgggatgactctggtggagagctcgccgggacgtgacatctgcgacagcaaatggcgacgtaagtcgcctcatgaagcgccaccgacgactggtattctttccctttacaatcgtggtgaccgccgccgctggtactggccatgtccgcactgcggtgaatattttcagccagccatggatgccatgaccggctaccgtaatgaaccggatccctttaaagccagtgaggcggcgtatctactttgcccgcactgcagcggcattatcactgcggagaaaaagcgtgagctcaatagtgcaggagtctggttgcgtgaaggtcaggtcattgatcgtaacggcaacgtttccggtgaaccgcgccgctcccgtatcgccagtttctggatggaagggccagctgctgcgtatcagacctgggcgcaactggtttacaaattactgactgcagaacaggagtatgaagcgacaggaagcgaagaaacactcagggcggttatcaacaccgactggggattgccttatcttcctcgtgccagcatggagcaacgaaaaagtgaattgcttgagcagcgggcagagccagttccttcccgcagtgtgccggatggcgttaatttccttgtggcgacagtggatgtgcaggcgggacgtcatcgccgttttgtggttcaggtaacaggctatggcagtcgtggcgaacgctggattattgatcgttacaacatcacgcagtcattgcgcagtgactgcgacggggagagccagcgaattgatccggccagctatccggaagactgggatgtcctgctgacagatgtttttcataaaagctggccgctggcctccgatccttctcaacaaatgcgactgatggcaatggcggtggactccggcggtgaagacggggtcactgataatgcctataaattctggcgtcgttgccgtcgtgatggccttggtaaacgtatttacctgtttaagggcgacagcatccggcgcgcaaaactgatcagccgtacattccctgataacaccggacgaacgggccgacgggcgcaggccgcaggtgatgtgccgctctggcttcttcagacggatgccctgaaagaccgggtgaataacgcgttatggcgtgactcgccaggtcccggctatgtgcatttccctgactggctggggagctggttttacgacgaactgacgtatgaagagcggagcagtgacgggaaatggagtaagccgggtcgcggtgccaacgaagcttttgacctgatggtgtatgccgaggctctggtcattctgcatggatacgaaaagatccgctggccggatgcaccggagtgggcgagccgggaaacctggctggagtgtgtcccggacagtaccgaaccgtcaccctcaccggaaccggtatccacgcctgttaaaaaacaaaaacggaagaaaacagtaactgacgatgttaacccctggctgacttccggaggatggttatgaatcagaatgatattgaagccatgattcagcgttatacggaagctgaaatggcggtgctggacggaaaatccgtcacttttaatggtcagcagatgaccatggaaaacttatctgagatccggcaggggcggcaggagtgggagcgccgccttgcggctctgattacacgacgacgtgggcatcccgggtaccggctggcgaggttctgatggcaattcttgatgatgtgattggcgttttttcaccaggatggaaagcggcaaggctgcgttcccgtgcggtgatccaggcttatgaggccgtaaaaacgacgcggacacacaaagcccgacgggagaaccgaactgccgaccagttaagccagtacggggccgtgtcgttacgtgagcaggcccgttaccttgataacaaccacgatctggtcattggtgtatttgacaagctggaagaacgggtggtggggaaaaacgggattattgtcgagccacatccggtattacgcaatggggccattgcccgtgatctggcagcggagatacgtacccgatggagtgaatggtctgtcagtccggaggtcaccgggcagtttacccgtccgatgctggaacgtctgatgctgcgtacctggctgcgcgatggtgaggtgtttgcccagatggtttccgggcgcataaacagcctgacgccttctgccggtgttcatttctggctggaggcgctcgagccggactttattcccatgaccagtgatgagagcaacaggctgaatcagggcgtgtttgttgatgactgggggcgtcccgaaaaatatctggtgtataaaagtcgtcctgtatccggacggcagatggaaaccaaagaagtggatgcagagcgaatgctgcatcttaaatttgttcgccgtctgcaccagatgcgcgggacgtctttattgtccggtgtgctgatccgcctcagcgccctgaaagagtatgaagattctgagctgactgcagcaagggtcgccgctgctctggggatgtacatccgcaaaggcgacggacagagctatgaaacggatggtaatgacagcaaggagaatgaacgcgagcttaccattcagccaggcattatttacgacgatctgaaacccggcgaagaaatcggaatggtgaagtcggatcgcccaaatcctaaccttgaaacttttcgtaatgctcagttgcgtgccgtggcggcgggcagtcgtctgagtttttccagtacagcgcgcaactataacggcacttacagcgcccagcgtcaggagctggttgaatccactgatggctacctgatcctgcaggactggtttattggtgccgtcacccgcccgatgtatcgtgcctggctgaaacaggctgtggcatccggtgttatcaggctaccccgcgatcttgaccgttcttcactgtataccgcggtgtattccggaccggtgatgccgtggattgaccctgttaaggaggctgaggcctggaaaatccagattcgtggtggagcggcgacagaatcagactgggtacgtgcaggtggtcgtaatccggatgatgtcaaacgtcggcgcaaggccgaaattgatgaaaaccgcaagctggacctggtatttgataccgatccggccagtgataaaggaggcagcagtgccgcaacgaaacgacagtagccgcagcacaccgacgaccagtccgaagaataattcctggttcaggatgcaggctggtcaccagagtgacgcggatatttatatttatgacgagattggtttctggggtgttacagcgaagcagtttatcagtgatctgaatgcactgggcgatatcacccacattaatctccatatcaattcaccgggtggcgatgtctttgaaggcatcgccatttttaatgcactgaaaacacatggtgcgtccattaccgcttatgtcgacggtgtggcggcatcaatggcgtcggtcattgcgatggtgggaaacccggtcattatgccggaaaacaccttcatgatgattcataaaccatttggctttacgggcggtgatgcggaggacatgcgcacctatgccgacctgctcgataaagttgaggcggttctgttacccgcttatgcacagaaaaccgggaaaaccaccgatgaaattgctgccatgctggcggatgagacctggatgtccggtgccgaatgtctggcacagggatttgctgatcaggtgacgccagccgttaaggcaatggcatgtattcagtcaaaacgtacagaggaatttaaaaagatgccggaatccattcgaaatatgattactccgccacgcaacagtgctccacgcgtacaggatgatggacctgcagcctcccggacgccagtgcaggcagcagcacccgtggtggatgaaaacagcatccgtgcgcaggtcctggcagagcaaaaagcgcgtgtaaacggtattaatgatctgtttgccatgtttggcgggcgttatcagtcgttgcaggctcagtgtcttgccgatcctgaatgttcgctggagcaggcccgcgaaaagctgttgaacgagatggggcgcgagtccacgccatccaataaaaataccccggctcatatttatgccggtaacggtaattttgtgggggacgggatccgccaggcgctgatggcgcgtgccggatttgaaaaaaccgaacgtgataatgtctacaacgggatgaccctgcgtgaatatgcccgtatgtcactgactgaacggggtattggggtttccagttataacccgatgcagatggtcggtgcggcgttcacacacagtacgtctgacttcggtaatattctgctggatgttgcgaacaaagccattctgcagggctgggaagatgcccctgaaacctatgaacagtggacgcggaaaggtcagttgtctgattttaaaattgcccatcgcgtgggtatggggggcttcagtgctctgcgtcaggtgcgtgaaggggcggaatataaatacgtcaccaccggagataaacaggccactattgcactggcgacctatggcgagctgttcagtatcacccgtcaggccattatcaatgatgatctgaatatgctgaccgatgtcccgatgaaactgggccgtgcggcgaaatccactattgccgatctggtttatgccattctgacgtctaacccgaaaatctccacagataatgtaagtctgttcgataaagcgaaacatgcaaacgtactggagagcgctgcaatggacgtggcatcgctggataaagcccgccagttgatgcgcgttcagaaagagggggagcgtcatctgaatattcgtcctgcgttcgtactggtaccgacggcgatggagtctgttgctaaccaggtcattcgctcctcaagtgtcaagggggctgacattaacgccggtattattaacccggtgaaagattttgcgaccgttattgcagagcctcgtcttgatgataacagccagaccaccttctacctggctgcgtcaaaaggctccgatacgattgaagtggcttatctcaacggtgtggatacgccatatattgatcagatggagggcttcagtgtggatggcgtgacaacgaaagtgcgtattgacgccggtgtcgcgccagttgatcaccgcggtctggtgaaatgtacggcgtaaacgtcgcagacaacaactctgatggcccgtaagggctttttttgtacctgaaatcagcccctgaacggggctgtgcggagacagttatggcaaagaattttgtagaagaaggaaaaacggtggcgattgttgccagtgcagccatcagcagcggagatctggtgcaggtgggtgatgtttttgcggtggcgctgaccgatattccacagggtgaaacaggcgacggcatgaccgaaggtgtgtttatgctgcctaagctgaaaacggatgacatgaaaacgggtaagaaggtttatctgaagtccggaaaagttcagctgactaacagcggctctgagccgctggtcggggttgtctgggcagatgccggaaccagtgcagaagaagtgccggtaaaactcaatgtctgatcccttttcccggctggcagcgcgtatggatgcgatcacggtcagaaagatgggaaagacagcctcgattaatgatgtcgatatggctgtgatcccgggcgaaacactggcagagctgaatgctctgtccggacctgcggtctctctggtggtgttttcttcgggataccgcccacggcgcggggatcgcgttgtttatgacggacaacaatggacggtcacacggcatgaacgttttaacggtaagccaatgatctttattgagtaaagaggtgtgggatgaaggggcttgagaatgccatccgcaatctgaacagccttgatacccgtatggtgccacaggccagcgcatgggcgataaaccgtgtggcacagaaagcggtctcggttgccacccggcaggttgccgggaataccgttgcgggagataaccaggtgaaagggatccccctgaaactggtacgtcagcgtgtccgggtgtttaaagccagtccgtcaggaaaaatgacggccaggatccgcgttaaccggggcaatctgcccgccatcaaactgaacacaacacggcggcgtgctggtgaaggactgagagtgggaaaatactttttccggggggcatttgttcagcaactggcgaatggccgctggcatgttttgaggcgtcttcctgaagcgcgttttgcaacagggcatgaccatcagggcaggccaagaaaaaatcgtcttcctgtggaggtagtgaaaatcccgctgtccggaccgctgacacaggcatttgaagatgcccgcgaccgcatcattgctgcggaaatgccgaaacagctggggtatgcactgaaacaacaactgaggttatggctgacccgatgaaccgacatacacaaatccgccaggccgtactggcacgccttcgggaacagtgtggagacagcgccacgttttttgacgggcttccggcatttattgatgcgcaggaactgcctgccgtggcggtgtggctgagtgatgctcagtacaccggaaaaatgacggatgaagatgactggcaggctgttctgcatattgctgtcttcatccgggcacaggcaccggattcagagctggatatgtggatggagagcaccattttcccggccctgaatgatataccggcactttccggactcatcgacaccctgatccctctcggttttaactatcaacgtgataatgagatggccacctgggcgatggcggaaatcacgtaccagatcacgtacacgaattaaaggaggtggcaatgaccacaccaaatccactggcaaaaacgaaaggtgcgggaacgacgttctggatgtacaccggcaagggcgatgcgtttgcgaaccctttatcggacactgactggctgcgtcttgcgatggtgaaggatctgcaacctggcgaaatgaccgctgatgcagaagatgacacttatctcgatgatgaagatgcagactggaaaacgacaacccaggggcagaaatccgtcggtgatacttcggcgacgctggcctggcgtccgggtgacagcgggcagaaaaaactggttcagttgttcgactccggtgaagtctgcgcgtttcgtatcaaatatcccaacggtactgttgatgttttccgtggctggctgagttcactgggtaaaaccattgcctcaaaagacgtgatgacccgcaccgtgaaaatcagcggtgtggggcgtccatatctggcagaggagggcactgaaaccgttggcgttaccgggctgacggtggcaccggcatccgccagtgtcaatgtgggagcaaccaccacgctgacctttacagtaaaacctgacggagccagtgacaaagcgatcagtgtgcattcgacagatccacagactgccacggtgaccctgaacgggcttgtggccacggtgaaaggcgtgaagcagggcagtgtcagcattgtgggcatgacttctgacggcgattttgtggcagtggctacggtggctgtcagcgccgcaggttaacaggacgatactcatcatttgccccggttatccggggcttttttgcaggtggagaacatgatgtttctgaaacagggcacgtttaattatgaaaagcagtccgtggtgctcagtgagctgtccgggctgcagagaattgaatatctgacgtttgttcagcagcgaacggcaaagtttgatgccgaagagggagaactgccggaggctgaacgacagattgcttttctgcggatggggatggatatcaatgcctggctggtttcccgctcactgtggaatgcggaacagtctcaggatgttgagacgctttgcgcatccgttattacaacatggtcgtatgatgccctgggagcgggggcggagatggttctgtcgctgagcggtatgggagccattgagaatgccggggattttgagcatgaggcgctgacgccggaaaagtcctgacgcgggaaatgcagtttgtcatgcgccttgcccgggagttccggcgggcagactggcggcggatgctgtcggaaatgtcggccactgagcttggtgagtggggcgattatttccggatgcagagcttcagtgatgtgtggatggatgcgcagtttgcctcgctgaaggcattgatcgtgagaatggtgtccggcagcagtgatgctgcggtggctgatttcagccttttaccggaagagaacgggataccggagcgaacggacgaagaactgatgcatcttggggaaggtatttccggaggtgtgcgttatggaccagatagccaacctggtcattgatttggggattgatgcggcagagtttaaaaatgaaattccccgtatcaaaaaccttctgaatggtgcagccagcgatgcagaacggtcttctgcccgtatgcagcgttttatggagcgtcagactcaggccgcccggcagacaacgcaggcggcttcttcgtctgcaacagccgcatccgtccatgcgcagacggtggagaagaacacacaggctcatgaacgcatggcccgcgaggtggaaaaaaaccgccagcgcatggaggcactgagccagaaaatgcgcgaggaacaggcgcaggccatggctctggcggaggctcaggataaagcggctgctgcgttttatcgtcagattgacagtgtgaaacaggccagtgcggggctgcaggaattacagcgtattcagcagcagatccgacaggccagaaacagtggcgggattggtcagcaggattatctggcgctgatttctgaggttacggcgaaaacccgtgttcttacacaggctgaggaagaggctacccgacagaaagtggcgtttatccgtcagcttaaagagcaggcaacccgccagaatctttcatcttctgagttgcttcgtgctaaggcagcccagctgggggtaagcagtgctgcagaagtgtatatccgcaaaatggagcaggcaggaaaagccacgcattcgctgggtctgaaaagtgcagcggcccgccaggagataggcgttctgataggtgaactggcccgcggcaatttaggtgcgctgaggggatccgggataacgctggctaaccgtgccggatggatagacacactgatgtcaccgaaaggcatgatgctgggcggggttattggcggtattgccgcggccgtctatggtcttggtaaagcctggtatgacggtcagaaggagggggaagaatttaaccggcagttgtcgctgacggggcattatgccggagtcactgccgggcagctgtggacgctcagtcgtgctatttccgggaatggtatcacgcaacatgctgcagccggtgcgctggctcaggtggtggggagtggtgcatttcgtggaaacgatatcggtatggtggcgagagctgccgcacagatggagcgatcggttggccagtcggtcagcgataccataaatcagtttaagcggctgaaggatgatcctgtaaatgccgcgaaggctctggacaatgagctgcattttcttactgccactcagcttgagcagatacgtgtccttggggatcagggacggtccagtgatgctgcacggatagccatgtctgcactggcagaggaaaccggtcggcgtactgcggatattgataataacctcaatgcgctgggcagtacgcttcagacattgtctgactggtggaggcagttctgggatgcggccatgaatattggtcgtgaagactcgctggatgaacagatttcggcgctgcaggaaaaaattcagcgtgcgaagagatttccgtggacgaacgcgtccaccacggtggaatacgatcagcaacaactggatgcgctgaaagagcgaaagcgccagcaggatttgcaggatgcaaaagagcaggcagagcggaattatcaggagcaacagaaacgccgtaatgctgaaaatgctgcgctgaaccggatgaatgaaacggaagcagcacgacatcagcgtgaacttgcgcgtattaatgccatgcagtacgccgatcaggcggtcagggatgcagcgatacaacgtgaaaatgaacgttacgaaaaagccattaagaaaaaaacgcctgccacccgcaatgatgaggccacccggttattactgcagtacagccagcaacaggcgcaggtggaggggcagattgccgccgccagacagtcagcaggcattgtcactgaaaggatgactgaagcacataaacagcttctggccctgcagcagcgtatcagtgacttagccggtaaaaagctgacggcagatgaaaaaagcatgctggcgcataaggatgagctggttcaggcactgacgctgctggatgcaaaacagcaggagctgcagaagcagacggcgctgaatgatttgaagaaaaaatccattcagcttgccagccagctggcggaagaggaacgggctctgcgtcagcaacatgacctggatatcgccacgacagggatgggggataaacagcgtcagcgataccagtcacagttcagtctgcaacaaaaatatcagcagcagcgggaacagctggagcgtgacagtaagcagaaaggaacatacggcacagatgaataccggaatgctgagcagacgctgacagacagtcttaaccggcaactgaacgaaaacagacgttactggcaggaacaggagctgatgcaggcagactggaaaaagggtgccatgcgggcttttcagagttttacagagaatgcggataatgcggcgggtaccgctgagcagttgtttaataccgcgttcagtagcatgggcaacgggctggcgacgttctgtaccaccggaaagctgaattttaaatccttcacctcttccctgttgtcggatatggcaaaaattatggcacagatggcgatgatgcaggcagtaaagggcgttggtagtgcactggggctgggttctgttctcggcagtctttcctttaatgcctgtggtggtgtttatcagtctgctgatttgagtcgctacagtggcacagtggttaaccgtccgacgttttttgcttttgcaaaaggcgctggtgtgatgggcgaggccgggcctgaagccattctgccactgcgtcgtggtgctgacggcaaactgggggttgtggcagcgaccagtggtgcgggtatggcgatgtttgccccgcagtaccacattgagattaataatgacggcacgaacgggcagataggcccggctgcactgaaggtggtgtatgacctcgggaaaaaagcagcagctgactttatgcaacagcagtcccgtgatggtgggctgttatccggaggtggacgatgaaaaccttccgctggaaagtgaaacccggtatggatgtggcttcggccccttccgtcaggaaggtgcgctttggtgatggctattcccagcgagcgcctgccgggctgaatgccgacctgaaaacgtacagcgtgacgctttctgttccccgcgaggaggccatggcactggaatcgtttctggctgagcacgggggctggaaggcctttctgtggacgccgccttatggctaccggcagataaaggtgacctgcgcaaaatggtcgtctcgggtcagtatgttgcgtgttgagtttagcgcagagtttgaacaggtggtgaactgatgcaggatatccggcaggaaacactgaatgaatgcacccgtgcggagcagtcggccagcgtggtgctctgggaaatcgatctgacagaggtcggtggtgaacgttattttttctgtaatgagcagaacgaaaaaggtgagccggttacctggcaggggcggcagtatcaggcctatcccattcagg

SEQ ID NO: 26 - DNA, 109954 bp, Escherichia coli
  source 1..109954: mol_type = genomic DNA
aagaacggcattgcataaccttgcagtggcgatcgagcattacaatgaaaaccatccgcatagtgcgttgggttatcgctctccgcgagaatatcgacgtcagcgggtaatgttaacttaagatacaccccctgtctggaaataagggggcaagaacagcttaatattaacttaataaatatcagctattcttataaagaaaatctgaattgtttttcgtagcgttgaccatctaataacgtagcgttaaaacatttagctcttatcaggatgctaaaaacatcatgattcatagttaagttaattctgagagcatgaaatgaaaatcaccatttccggtactggctatgtaggcttgtcaaacgggcttctaatcgcacaaaatcatgaggttgtggcattagatattttaccgtcacgcgttgctatgctgaatgatcggatatctcctattgtggataaggaaattctgcagtttttgcaatcagataaaatacactttaatgccacattagataaaaatgaagcctaccggtatgctgattatgtcatcatcgccactccaaccgactatgatcctaaaactaattatttcaatacatccagtgtagaatcagtaattaaagacgtagttgatattaatccttatgcggttatggtgatcaaatcaacggttcccgttggttttaccgcagcgatgcataagaaatatcgtactgaaaatattattttctcccccgaattcctccgtgaaggtaaagccctttacgataatctccatccgtcacgtattgtcatcggtgagcgttcagaacgcgcagaacgttttgcggcgttattacaggaaggcgcgattaagcaaaatatcccgaccctgttcaccgattcgactgaagcagaagcgattaaactttttgcaaacacctacctggcgatgcgcgtggcatactttaacgaactggatagctacgcagaaagtttaggtctgaatactcgccagattatcgaaggcgtttgtctcgatccgcgtattggcaaccattacaacaacccgtcgtttggttatggtggttattgtttgccgaaagataccaagcagttactggcgaactatcagtctgtgccgaataacctgatctcggcaattgtcgatgctaaccgcacgcgtaaagattttattgccgatgccattttgtcacgcaagccgcatgtggtcggtatttatcgtctgattatgaagagtggttcagataacttccgtgcgtcttctattcaggggattatgaaacgtatcaaggcgaaaggtgttaaagtgatcatctacgagccagtgatgaaagaagactcattcttcaactctcgcctggaacgtgatctcgccaccttcaaacaacaagccgacgtcattatttccaaccgtatggcagaagagcttagggatgtggcagataaggtctacacccgcgatctctttggcagcgactaacatcttgttatcagggcgattttgccctgattctcttatgtttcctttgtaataattcattatttttatcatttatcctatagcattcatagcgattatcgctaaactatggcgacttaaaattatttcgtccgttagggtaatgatgagagtagaaaataataatgtttctgggcaaaaccatgacccggaacagattgatttgattgatttactggtgcagttgtggcgcggcaagatgactatcatcatttctgtcattgtggctattgccctggctatagggtatctggccgttgccaaagaaaagtggacttccactgctatcgttactcaacctgatgtggggcaaatcgctggttataccaacgcgatgaatgtgatctacggatcggctgtaccgaaagtctccgacattcagacttcacttatcggacgttacagcacggcattctcagcattagcggaaacgctggataaccaggaaaaatcagaaaagctgaccattgagcctactgttaagaaccagccgttaccactggcggtgtcttatgtgggtgaaacacctgaaggtgcgcagaaacagctggcgaagtatatccagcaagttgacgaccaggtaaatgtagagctggaaaaagaccttaaagacaacatcgcgctgcgtatgaaaaacttgcaggattctttgagaactcaggaagtggttgcgcaggagcagaaagatctgcgtatccgtcagattcaggaagcgttgcagtatgcgaatcaggcgcaggtgacaaaaccgcagattcaacagactggcgaagatatcacacaagatacgttgttccttttggggagcgaagcgctggagtcgatgattaagcacgaggcgacccgtccgttggtgttctcaccaaactactatcagacacgtcaaaacctgctggatatcgaaagcttaaaagttgatgatcttgatattcatgcttaccgttatgtgatgaaaccgacgttacctattcgtcgcgatagcccgaaaaaggcaattactttaattctggcagtgctgctgggcggtatggttggcgcggggattgtgctggggcgtaacgctctgcgtaattacaacgcgaagtaatcttttcggttttaaagaaaaagggcagggtggtgacaccttgcccgttttttttgccggatgcgacaacaacatcgcatccgcttaccccgcaactcactgatgccgtttacgcaggttctcaatcaccgtcgttaaatccagatcctgatcctgcaacaacaccagcaggtgatacatcaaatcagatgcctcgttggtcagctcaaagcggtcatgtaccgttgctgccagtgcggtttccaccccttcttcgcccactttctgcgcaatgcgtttggtgccgctggcatacagtttggcggtataggaggtttccgggtcggcagatttgcgttcggcgagcagttgttccagttgatacaggaacagccactggtgagcggtgtcgccgaagcagctgctggtgcctttgtggcaggtcgggccgatgggattcgccagcaacagtaacgtgtcgttgtcgcagtccggcgcaatatttactacgttgaggaaattgcccgacgtttcgcctttggtccacagtcgctgtttagtgcgcgagaagaaggtgactttgccgctttcgatggttttatctaaggcttccgggttcatatagcccagcattaacacttcaccggataccgcgtgctgcacaatcaccggcataagtccgtcggttttttcccagtccagttcgcgacgttgttgttctgttaacatatcctgatctccacgccctgtgttgccaggtacgcttttaattcaccaatattgattatttgtttgtggaatacggaagccgccagcgcgccgtcaacgtcggcatcgcggaaggcttcgaggaagtgttccatggtgcccgcgccaccggaggcaattagcgggacgtggcaaacttcacgcacttttttcagttgttcgagatcgtaaccgttacgcacgccgtcctgattcatcatgttgaggacgatttctccggcaccgcgtttttgcacttcctgtacccagtcgagcgtttcccactgagtgacgcgggtgcggctttcatcgccagtatattgattcacatgatatttaccggtttcagcgtcgtaccaggtatcaatacccaccacaatacactgcacgccaaaacgatccgccaggcgagtaattaacgtcgggtccgccagcgcaggagagttgatggaaattttatccgcgccaaaggaaagaattttcgcggcatcttccagagacttaatcccacccgccacacagaacggaatgtcgatgacttccgccacgcgagatacccagcttttatctaccacacggccatcgctggaagcggtgatatcgtagaacaccagttcgtctgcaccttcttcagcgtagcgttttgccagcggcacgatatcgccaatgatttcatggttgcgaaactgtacgcctttcaccacctgaccatcacgaacgtcgagacacggaattatgcgttttgccagcatgcgatggcctccttcacggtgaatttaccttccagtaatgcacgaccaactattacgccgcgcacgccagtaccacgcagggcagcaacatcgttaatgtcgccaataccgccggaggactgaaatgccacctgcgggtatctggcgcacacttcttcatataaagagacgttagagcctgccagcgtgccgtcgcgcgagatatcggtacacagcacatgtttcaggccgacgggcagataggtttccaccagttgttccagtgaaacgcccgagttctcttgccagccgctgaccgccacctgcttgttgccttgctcgtcaatacggacatccagcgccagcactaaggcatcggcaccgaagcgttcaaaccagcctttcacaatttctggtgattttaccgcggtggagccgaccaccacgcgcgcaacgcctgcttcaagtaacaccgccacatcttcttcgctacgcacgccaccgccaacctgcaccggaacgttaacgcccgcgaccagggttttaatcagcgggatttgacgttttgccggatcttttgccccggtcagatccaccagatgcaacacttcggcaccttgcgcagcgtaatcctgtaagcgtggcagcgggtcgttaccgtaatcgcgttgtttgccgtaatcgccctgatggagacgcaccacagtgccgtcaattaaatctaatgccggaataatcatcacatctccaggaagtttttcagcaacttagcgccagcggcaccagaacgctccgggtggaactgcacgccgtagaagttatctttttgtactgccgcggtgaacggttcgccgtaattacactgggcgatggtccacggattgactggcattgcgtagctgtgaacaaagtaaaagtacgcgccgtcttcaatcccctgaaacaggcggttgcctgcctgcgggtaaacgcggttccagcccatatgtggcagtggcagaccaaagtcggtcattttcggcacgtcttcgtcgatgatgcccagcaagtcgacgccgttgctctcttcgctgcgccgccccagcagttgcatccctaagcagatgcccagcaccggttgggtacaggctttgatgagatcaaacagctcgcgctcacgcacctgatccatcgctgcttgtgcggtgccaacgccgggtaaaaatagtttatcggccagcaacacgacgtccgggtcacggctgactttgggttcataaccgtggcgcgcaatggcagacttcaccgagttcagattggcgcagccagtatcaaggatcaccacgttcattacagcactcctttcgacgagggcagggtgtcgccttccacgcggatggcctggcgcagggtgcgaccaaaggctttgaacagactctctacacggtgatgatcgtttttacctttggttttcaggtgtagcgtcacgcccatggtgtatgagagcgaacggaagaagtgctcgatcatttcggtgctgagatcgcccacgcgctggtaggtaaactcggctttatattccaggtgcgggcgaccagagatatccagcgcgcagcgggcaaggcattcgtccatcggtagcacaaaaccaaagcggcaaataccgcgtttgtctccgagggcgatttttagcgcttcgcccagcgccaggccggtatcttcgacggtgtggtgatcgtcgatatagaggtcgcctttgacgttgatttccatgcggaaaccgccgtgggtggcgatctgatccagcatgtgatcaaagaagccaacaccggtgttaatcttgctgccaccttcgcgatccagccacacctggacgtcaatttgcgtctctttggtgttgcgcactacatgggcgtaacggtctcgtttagtgagttgctcgccaatcatcggccagttcagggtttcgcggtcgtagcgtaaaccattaatgcccatgttttccgccagttgaatgtcggtcgcgcgatcgccaatcacataactgttggcacggtccatcgcttgctcagccagataacgctccaccagttttactttcggcttacggcagtcgcactcatcggcgggcaggtgagggcaaatcagcacttcatcaaactgcacgccctgtgaggtgaagatctgcatcatcaggttgtgcgggccatcgaaatccgcctgcgggaaactttgtgttcccagaccatcctgattagtgatcatcaccagcttgtagcccgctttttgcagcttcagcagttccgggatcacgcccggttcaaaggcgagtttgtcaaaacggtccacctgaaaatcactcggcggttcgctaatcagggttccatcgcgatcgataaaaagatacttctgactcatcaaacttgctccgcacgtaaggcgtcaatgacgcgctggctttcttcacgggttccgacggtaattcgcaggcagccgcttaaagagagttgtttattctgatcacgtaagataatgccctgatcccacaaagatttaaacactgcactggaggctttaaagcgcgccagaatgtagttggtttcagagtcaaaaacctgctccacgcaggggatctctttcaatgcggcaatcagatattcgcgttctgcaataatttgcgccacccgctcacgcatggcgacgatcccctgcgggcttaacgcctgggccgcaatgtcggcaaccggcgtcgagagcgggtagggggcaatcactttcatcagcaggttgatgacttcttcgtttgccagcgtaaatccgcaacgaagccccgccagagcaaatgctttcgacagtgtgcgtaaaatagccaggtgcggatattccgccagccagccagccagcgatgcctgcgggcaaaactcgatataggcttcatcggcaaccacaatcgccttaccgcgcgttaactccagcagggtgcgaaaatcctgcggattgatcagttgcccggttgggttgttggggctgcaaacatagaccacttttacgccgtccagcttgtcggaaatgccctgtaagtccagttgccagttttccagcgtcggcactgtgcggcactcgacgccaatggtttcagcgctgacgctgtacatgccgtacgttggcgggcagtagaggatggcgtctttacccggttcgcaaaaagcgcgaatcagtagttcaataccttcgtccgcgccacggctgaccagcacctgttccggttttacgcctgcatattgcgcgtaattttcaatcaccgctttcggctggcattccgggtagcggttgagcgtttgctgagtaagctgaaactccacggctgtgggatattcgttggcgttcagccagacgtcgccattaccgcccagacgacgcgccgactgatacggcgtcaggttgcggacgttttcacgcgctaaatcggtaatagtcacggtgctcatgcttgctccttaagggcgttaacacgcaaagtaacggcatttttgtgggcggtcaggcgctcggcggcggccagtgtttcaatggtcgaagccagcgcggagaaacctacttttgatagttcctgcacggtcatgcgcttctggaaatccgccagcccgaggctggaacaggtggcggtgtaaccgtaagtcggcagaacgtggttggtgccggaggcgtaatcacctgccgattccggtgaccagtcaccaagaaataccgaaccggcgctggtaatgctatcgaccagttcacgggcgttgcgggtctgaatgatcaggtgctccgggccgtactggttggagatctctacgcactgcgctaaatctttagtcacgatcaggcggctggcgtttagtgcctgacgtgcggtttcggcacgcggcagttctgccagctggcgttcgacagcttcggcaacttgatgcgccatatcagcatcgggcgtcagtaaaatcacctgtgagtccgggccgtgttcagcctgggaaagcaaatcagaagccacgaaatccggcgtagcgccgctgtcagcaatcaccagcacttccgacgggcctgcgggcatatcgatcgccgcaccgtccagacgctggctcacctggcgttttgcctcggtgacaaaggcgttacccggcccgaagattttgtccactttcggcacagattcagtaccaaacgccagtgcggcaatggcctgtgcgccgccgacgttaaacacgtcctgtacaccgcacagctgcgccgcataaaggatctcatcagcaatcggcggcggtgagcacagcaccacttttttacagcccgcaatacgcgccggagttgccagcattaataccgttgagaagagcggggcggagccgccaggaatatacaacccaactgaagcgaccgggcgcgtgacttgctggcaacgtacgcctggctgcgtttctacatctaccggcggcagcttttgcgcagtgtggaaggtttcaatattttttactgccaccgccatcgcctgttttagctcgtcgctcaggcgttcgctggcggcggcgatctcctcagcagacaccttcagtgcggtaaccgtggttttatcaaacttcgcgctgtattcccgcagggcgtcatcaccacgtgctttcacgttatcgagaatatcgttaaccgtgcgggtaatgctttcagaagcggagatcgccgggcgcattaacagctggcgttgttgctccgcagtacagctattccagtcaatgattgtgttaaagctcatggcgatcactccatcatcttctcaatcggcaggaccagaattgaactggcacccagcgctttcagtttttccatcgtttcccagaacagggtttcgctactgaccatgtgcatcgctacgcgttgttggtcacccgccagcggcagaatggttgggcgttcggcacctggcagcagggcgatgacttcatccagacgttcggtcggtgcgtgcatcatgatgtattttgattcgcgcgcctggatcacaccctgaatacgggtcagcagtttgtcgatcagctgctgtttggattcttccatttcaccatcgcgctggataaggcaggctttcgagcggtagataacttcgacttcgcgcaggccgtttgcttccagcgtggcaccggtggaaaccagatcgcaaatcgcatccgccagtccggcacgcggggcgacttcaacagaaccgttcagtaagcaggatttaaaagagatgcctttctggtcgagataacgcttgagcaggtgaggataagaggtggcgatacgtttaccgtttaaggagagcgggccgtcccaggcttcatcaaccggcgttgccagcgaaaggcggcagccgccgaaatccagacgacgcaaggtaaagtagcgcggatcttcaccctgggcgcggcggttaagcagctcttcttccagcacgttttcgccaataatcccgaggtcaaccacgccatccattaccagaccgggaatgtcgtcgtcacgcacgcgcagaatatcaatcggcatgttttctgccatcgcgatcaggcgctgggtgtgaagattgattttaatgccacagcgtgccagcaattcgcgtgagtcatcacttaaacggccggatttctgcatagctatgcgtaaacgagtgttgtctgtcattttgttattcctctttaaacctgtctgaaccgttatcaaccgcgcaataaaaaagcccccggaaggtgatcttccgggggctttctcatgcgttcatgcaccactggaagatctgaatgtcttccagcacacatcgcctgaaagactagtcaggatgatggtgatgatggtggtgtttaaattgaacgcgtgtcataaaagtctctgtgaatgtttattcaactgatgtcttttaacctaaaccactttcacgttagaaagcaagggcttttttatatattttatggcgatggatttgtttaatgaatgagcggggaaaggagggggctaagaggactgtcctctaagctgacggcaccaaaaatagcgaagcctggattttcgtctcactgacaataccttgatctacaaactaattaataaatagttaattaacgcccatcattgtacaatgaactgtacaaaagaggagattgacatgcgtacaattagctacagcgaagcgcgtcagaatttgtcggcaacaatgatgaaagccgttgaagatcatgccccgatccttattactcgtcagaatggagaggcttgtgttctgatgtcactcgaagaatacaactcgctggaagagacggcttatctactgcgttcccccgctaacgcccggagattgatggactcaatcgatagcctgaaatcaggcaaaggaacagaaaaggacattattgagtgaaactaatctggtctgaggaatcatgggacgattatctgtactggcaggaaacagataagcgaattgttaaaaagatcaatgaacttatcaaagatacccgcagaacgccatttgaaggtaaggggaagccagaacccctgaaacataatttgtcaggtttctggtcccgacgcattacagaggagcaccgtctggtatacgcggttaccgacgattcactgctcattgcagcatgtcgttatcattattgaacagattcattcatagaatgaattgtcagttttgatacgctagcgtagccttatagatctaaggtgtatcaggagataacggatgaaaaaggtcgcaattgtcgggttagggtggttaggcatgccgctggcgatgtcactttcagcgcgaggctggcaagtcaccgggagtaaaaccacacaagatggtgtcgaagcggcccgaatgagtggcattgatagctatctgcttcgcatggagcctgagttagtttgcgattctgacgatctggatgccctgatggatgtcgatgcgctggtcattacgcttccggcacgtcgtagcggccccggcgatgagttctatttacaagcggtacaagagttagtggatagcgcgctggcccatcgtattccccgcattatttttaccagctcaacatctgtctatggcgacgcgcaaggcacggtgaaagaaactaccccgcgtaatccggtaaccaacagtggacgagtattagaagaactcgaagactggctgcacaatttacccggtacttcggtcgatattctgcgtcttgcggggctggtcggaccgggacgtcatcccggacgcttctttgccggaaaaaccgcgcctgatggtgaacatggtgttaatttagtccatttagaagatgttattggcgctatcactctgttgttacaggcacctaaaggcggacacatctataatatatgtgcgccagctcaccctgcgcgtaatgttttctatccgcagatggcccgtttactggggctggagcctccgcagttcagaaatagtctggacagcggcaaaggtaagattattgatggcagtcggatttgtaatgaactgggatttgaataccagtatcccgatccgctggtaatgccgctggagtaaacgatcacgccagcaggacgccgcatgcactgcaagggggcgtgtatgaaaccactgctggatgtgttgatgatcctcgatgccttagaaaaagaaggcagttttgcggcggcgtcggccaaactctataagacgccgtccgctctgagttacaccgttcacaagctggaaagcgaccttaatattcaattgcttgatcgtagcggtcaccgcgctaaattcacccgtaccggaaaaatgttattagagaaagggcgggaagttctgcataccgtgcgagaactggaaaagcaggcgatcaaactgcatgaaggctgggaaaacgagctggtgattggcgtggacgacacgtttcctttttctctgcttgcgccactgattgaagctttttatcaacatcatagcgtgacgcgcctgaagtttatcaatggcgtactcggtggttcctgggatgccctgactcaggggcgagcggatattattgttggcgcgatgcatgagccaccatcttccagtgagtttggtttttcacggttgggcgatctggaacaagtctttgcggtcgcgcctcatcatccgttagctctggaagaagagccgttaaaccgtcgtattattaagcgatatcgggcgattgtggtgggggatactgcgcaggcaggcgcttctacggcctcacaacttctcgacgaacaagaagccattaccgttttcgattttaaaaccaagctggagctgcaaattagcggcctcggctgcggctatttaccccgttatctggcgcaacggtttctcgatagtggcgcgttaatcgagaagaaagtggtcgcccaaactctctttgaacccgtctggattggctggaatgaacagaccgcagggcttgccagcggctggtggcgggatgaaattttagcaaatagtgcgatcgccggtgtttatgcaaaatctgatgacggaaaatcagccatttaaagaaaaattattatgacaagcctctcattctcttgtcatttcccccccatttaggcacaatgcgccgctgtcaaaaaatgactaaaaaccgacgtttcatcagcgtcggttattttttgcttcaaaccaatcattcataccaagaggccgggcttcgtaccggatagatatttactaaaaatcgacagttgttgtcgctgaggaatccaaaaaaatggggcaattttttgcttacgcgacggttatcaccgtaaaggagaatgaccatgtcgcataacgttactccaaacacctctcgcgtggaattgcgtaaaacgcttacgttagttccggttgtaatgatgggtcttgcctatatgcagccgatgacgctgtttgatacttttggtatcgtttcaggcctcacggatggtcatgtgccgacagcctatgcgttcgcattgattgcgatcctgtttacggctctgagctacgggaagctggttcgccgctatccttctgctggctctgcatacacttacgcccagaaatccattagcccgactgtcggctttatggtgggttggtcttctctgctcgactatctgttcgcgccgatgatcaacattctgctggcgaaaatctattttgaagctctagtgccttccatcccatcgtggatgtttgtggtggcgctggtggcctttatgaccgcctttaacctgcgtagtctgaaatccgtagcgaacttcaacactgtaatcgtcgtgttgcaggtagtgctgatcgcggtgattctgggcatggttgtttatggcgtatttgaaggtgaaggcgctggtacgctggcgagcactcgtccgttctggtctggcgatgcgcatgttatcccgatgattaccggggcgacaatcctgtgcttctcctttaccggctttgacggcatcagcaacctgtcggaagaaaccaaagatgcagagcgcgtgatcccgcgtgcgattttcctgaccgcgctgattggcggcatgatcttcatctttgcaacttacttcctgcagctgtacttcccggatatctctcgctttaaagatccggatgcgtcacagcctgaaatcatgctgtatgttgcgggtaaagcgttccaggttggcgcgctgatcttctccaccattaccgtactggcgtccggtatggcggcgcatgcaggcgtagcgcgtctgatgtacgtaatgggtcgtgacggcgtattcccgaaaagcttcttcggttatgtacacccgaaatggcgtactccggcaatgaacatcatcctggttggcgcgattgccttgctggcaatcaacttcgacctggtaatggctacggcgctgattaactttggtgcgttggtggcgttcaccttcgttaacctgtcggtcatctcgcagttctggatccgtgagaagcgtaacaagacgctgaaagatcacttccagtatctgttcctgccgatgtgtggtgcgctgaccgttggtgcgctgtgggttaacctggaagaaagctcaatggttctgggtctgatctgggcggctatcggcctgatttacctggcttgcgtcaccaagagtttccgtaacccggttccgcagtacgaagacgtagcgtaatcatcttttgtaataataaaccggagtcgaatgaatatttggctccggtttttttattcttttttatcgaaatcctcattaataaccatttgttctaatttagagaatttggttattggtctgcattccaccagtcatgaataatttccctattaacattcatctggttaattaatttatgttttcaatgatattaagcgggctaatttgtggtgctctgctgggatttgtcatgcagcgtgggcgtttttgcctgacaggtggttttcgcgatatgtatatcgtgaaaaataatcgcatgttttacgccttgctgattgcaatttcggtacaaagcgtgggggtttttgcgttaattcaggcgggactactgacttacgaagccggggcgttcccgtggcttggtactgttataggtgggtatatcttcgggctgggaattgttctggcgggtggatgtgccaccgggacctggtatcgcgcgggtgagggattgatcggcagttggatcgcgcttttcacttatatggtgatgagtgcggtgatgcgttctccacatgccagtggtttaaatcaaaccttgcagcactacagtactgaacataactctattgctgagacttttaatttgtctgtgtggccgttggttgccgttttgctggtgataacgctctgggtggtgatgaaagagttgaagaagccaaaactcaaagtcgcgaccttaccgccgcgccgaaccgggatcgctcatattctgtttgaaaaacgctggcatccctttgtcactgctgtactcatcggtttgattgcgcttttagcctggcccctgagtgaagcaaccggacgcatgtttgggttaggaatcacttccccaacggccaatattctgcaatttctggtcgcgggtgacgtgaaatacattaactggggcgttttcctggtgttagggatcttcgtggggtcatttattgcagccaaagcgagccgtgagttccgcgttcgcgcagctgatgcacaaacaacattacgtagcgggttaggtggtgtactgatgggcttcggtgccagtattgcaggtggttgctctatcggtaatggactggttatgactgcaatgatgacctggcagggctggattggccttgtatttatgattctcggagtctggactgcgtcctggcttgtgtatgttcgaccgcagcgtaaggcgcgactggcaactgctgcggcaaattaagtaaggtgtaaagatggcgattaaaaagctggatgtggtgacgcaggtctgtccgtttccactcatagaagcaaaagcagcactggcagaaatggccagcggcgatgagttggtaattgagtttgattgcacccaggcaactgaagcaatcccacagtgggcggcagaagaaggacatgccatcaccgattatcagcagattggcgatgcagcgtggagcatcaccgttcaaaaagcctgactcaacattgtcctccgccgtaccagcggcggaggcttcaaattagacgatctcttccgcgtactgccaaagcgcttttaacagcgccactttctctttgtcatcggcatattgttgtgccagcatctgcaattcatctgcataaccctgtaaaaactctggcgtgaagacctggcggcggtgctccagccagcgttgctgctcggcataatccagcgtccccgggaagttgcgcgcccgataattgaacaacagcttttcaatccgtttatcgacaaaagtgatatccagtgccggtaaattacgcggctcggtttccagcacaattttcattgctgcacgatcggcgtcactgaaaaagccgttataaagctgtgcatccacgttatctgaaggcgtaaacggttcggcttccgcgaatatcgccaccactttttcgcgcacttgcggattttcacgcagaattttcaggttatcgaggcaatgctgacgattaattcccagtcggtcggcatcttccgggcgtagcgtattcgcctgggccagcaccggacatttattgatatgcaccagcttaaccggaacggcggcgttatcgccaagatcggtttttgcggtatataaacgctcgcgcaatgtgtcgctatccagttccagtaatggcgaaatgtctcctgccaaatccaccataattacggcattgcgattttcaggatgccacgccagcggtgccacccagctggtattgccgcgccatgctccaaacattccggaaacgtgcaccaggggtttcatctgcggaacatcaatcaacgccatcagtttgtgtttattacgatgggtaaagagataatcaaacaggcgtggctgacgcgtttttaccagctttgccatcgcaatagtggcgtacacatcagccatcgcatcgtgggcgttgctatgttcaataccattcgctttggttaaatgctcaaggcgaaagctcggtagaccgtcatcattttcaggccagtttattccttccgggcgcagggcataacaggcacgcataacatccaacaaatcccagcgcgagttatcatgctgccagctccaggcgtaaggatcgtagaaattacgataaaaaacgttgcgtgtgacttcgtcgtcgaaacgcacattgttgtagcccagaatacaggtcttcggtacggtaaaaagcgagtgaatacgggcggcaaacgcggcttcgttttctcctttcgcccgtgcttcctgcggggtaataccggtaattaatacggctcctggctggggtaaatagtcatcagcgggcttgcagtaaaagacttcgggttcgccgatgacattgaattcgctatcggtgcgaatggctgcgaactgtgcagggcgatctaacgcggggtgcgtgccaaaggtttcgtaatcgtgaaagaggaaggtaggttgtttatctgtgtctgtcattgtctagcattgtccactgtagttaattaactatctgttataactcgaaaaacaacccttttttcacctgagtatgtctacgaacgtcaaatatagttgtttactgtgcgctgttgtccatgtgatattgtgtaccagatgtgtaccaaaccattatttttgagcgtaccaaatattatttatggctataagcgacacaaaactgcgtactatttatggtaaaccatattcgggcccacaagaagtggctgatgccgatggcctcagcgtacgaatttcaccgaagggggtcatccagttccagtaccgctatcgctggcatggcaagcctaatcgacttgggcttggtcgatacccatccctgtctttgaaggatgccagacagatcactgctgacttgcgaaagctctatttctcaggaacggatccacgcacctattttgaagagaaggtggagaactccatgacggtcgcccagtgtctcgactactggttcgacaactacgtctctacaactctcagagaaaagacccaggcactttaccgatcaacggttatgaagcgcatgcatgacgcctttcctaatcgtccggcatcttctatcacggttaagcaatgggttgacctgcttaccgaagaagaaagagataatccacgccgagcaaggcaggtgctaagtcaactaagatcagcaataagttggtgcatgcggcgtcagttgatagatagttgcgcaattatgagcatccaaccaagggacttcggctcccgcgctgaggtaggggatcgggtactgtcgtatcacgaactggctaagatttggcttgctattgaaagaagccgtgcgtctacgtcaaataagctccttcatcagatgcttatgctgtggggggcgaggctctcagagcttaggctggcaacaaagacagaatttgacctgctggacaacgtatggaccgtaccgaaagagcatagcaagatgggcagtgttatccgccgtccaatcttcgaacaaattaagcctttcctcgataaggccatgacaacgtacaatgatgttcttttccctggagaagacataaacaaaccaatcagcatcgctgcagccaaccgattcgtaaatagaataaggggagggatggatataggttactggcgaacacatgatttcagaagaacgcttgttacacgtctgtccgagatgaatgtcgagcctcatgttactgagcgaatgctcggtcatgaacttggcgggataatgtccgtatacaataaacacgattggatagaggctcagcgcaaagcgtatgagcttcacgctgataaattgttctggcacatcaggagcatttctgattaacgccaccgttaagaatccacccttcaacagcttcacgaaggtatgattttgggtgggttctgactggcttcggaaatccatgccgtttggtatagttccagattgtctgacgtgatgaaacaccgagcttgttcatcacttctttctcaggaatcaggctggtatcggtcatcttaattctccaggcaaaaagaaaccgccatcaggcggcttggtgttctttcagttcttcaattcgaatattggttacgtctgcatgtgctatctgcgcccacagcatccagtggtcatagcagtcgttgatgttctctgcttcgataaccctgttgaatggttctccgttccattcacctgtgactcggaagtgcatttatcatctccataaaacaaaactcgccgtagcgagttcagataaaagaaatccccgcgaatgcgaggattgttattgtcttttcttcgtgcatttgtcgcgctttcggcaccatccagataggcacatccgtccgcaattaacacatataggccacatcatttttcctcttttggtttatgaatctgaatggtcatgccgctttgagtggtgactacaacgacagaaccaggctgaaggctgttaagattgaatgcttcgtaaaacgaatccaaggctagtgcttttttattctttcggttccaccaacgccatcccttgctacaggctacactgacaatccactgcccactcctgtaagccatataaaaccagatgagcaaaacctgaaggaatgctatccagtcaataatcgtatatttcgcgaaggagtccatcacttcacctcctgctgcggtgctgctggcatttcacgccagtgcgtaactgagtgcggatccggatattcggtgccatcatcccagcgattgccattccacattgcagaccacatctcaccgtcttcatacatgaccattaccggaattaacttatccggcatccgctcactacagcttatccaaccatccggagttaccggaacttgtggaatggctgtctgctctcgaacgtcattaggcgctataggttctgctgccaactgactggcatatttgttaatggtaacgataagctcttgctcagcctcatccagacaatcaccgatacctcgcctgtcaccgtcaaaatcatcgaaatcggcacgaatcctggcaaccttcaggattgcggacaacacctcactaggaattgccggatagttggttgacgtttccgcgatttcccgaaaattattggttgacgaattcttgttttcccgaaagtttccggactgaagcatggcggtgcggcaggcgttccatatttcggcagcaatatcgcgctcgctatcggttaatttgtacgtggaaacatagccagagagcatttctacgttttccggagttgcttcttccggcactaccggcgctggcggggcggcaaatagatatccgccaaagtcaggaagctctccaatggcctgtacgaacttttgtttgcctacgtcaactcctaatgggtaatgagctataatctttgccaccggctctgcttccagcgatgccagtgcgatacgcagggcagccaggatattcccctggtaatcatcaagcccgaaaggaagctcatcacgaacgctttcataatcgttgatagcctgctgcagccattctcttgtgatagtgctcatgatgcctctcctttacctgcttcggtgacgtttattccagcgttgtgcagtgcctcaagaacctgatgctgcctgtaaaccatttcagtgtggtaaggctcgtcaaaatcgacgcgatgcaacatgctatagcattgcggaagcacaacctcccgcaactccagttctgctatgcgcttttctgatgcttcaagtaacgcctgcttatcgcgtagcgcttcttccagttcagcaacatggcattcactatcaataaggttgttctctgctgcttccagctcaacacgcagcttccctaccgttagcgcaatatcctcgttctcctgatcgcggcttttgatgtattgcaggtttctttcccgttcatccaacaatgccagcgcgatatctggcgaaaagtgcttcataaaatcgttaagcgcattaattcgctgatcgaaaggcattacaggtgcttcaccagcaatttttgttttttcagcgatttcacgaagcttttgataatcaatcttgctcactggttgcctcctttgcgccacatcgcattcagatatttgttgtcattaacagaaccgaaactatttctcttaagcaattcctctctcgatggcattggctttacgcgctggcgaataatcatttctgccggaagaatgccgggattgtatgcaagtcctctcatgatttactctcaacgaactggtcaatagccatgctaagtgacatacctaaagtttcgatatgctgctgaatatcctgtagcgtctgcgcctgagataacaggatttcacggttgcataattctttaaccagatgctcaaacttgctgtaataaccgatacggcttagtgtttctttccctgcattctcgccttctttgataattcctctttcactaagaatcagatcgtgtttggttccggtaataacgtattttccgaggtcgatgtttagcttcattgttttcatggtaaattcctcagtcattactgatagcgccatagcgtgagcggtaattacgcaggcgcgggtcgatatattcagggaagtgggtatatgtggctttgcggaatggtcggattgatgtttcgtttattcggtctttttcctgtttttctgcgagttgtatatcgcgtcggcacttccgttcttcttttgtttctggtggcagagcaagaaacgcgtcgagattattcttgatattttccagcacctccgatacggaattgccggaacagcggcgcgggtcatccgcaccatacaaaggcgctggcatgtttttctcctgtttattatttagctaactttttccagatcgctgaaacgtatttggcttggtgaatggcatcatcaagcgcgttgtggcgagttcctttgaatggcatatctcgcttagggtcgaatcctattaccttcccaagttcgacgattgttcttacgtcgcggtcattccaccactgccacggaactggctgccctgtcagcgaataactgtttcggagaataacgcagtcaaatgatgctccattcccccaaacctgaacgaatttgtggttagcgttctttatgatgaattcagataaccatgaaagagccgttgaaagctcctgagtgttgctggttagcgattttctggcttcttcactctgttccagccaccataaaatcgttgaagcgtcaggacgcgctcgatatcgcattgatgattcaagcgagatatttaccgagaactcttctcctgtttctccggtattcgggtcaaagaataccgacccaatagaaataactggcgcgtatggcccgttgcccattgtttcaaggtcaaccatcaagtgattcatgtaagtccttaaattgcgtgaatagcgtgacgagggaaggggagagttactggtgcaaaggggatatcgtcgtcaaaatccataggtggttcgctgtgattcccttgctgctgaggttgctgtctttgttgctgaccgtcatttcgctgaggtgaagactgttcattgcctccttgcttgccaccaagcatttgcatggttccaccaacgcccacgatgacttcggtagtgaaccgatcctgtccgctttgatcctgccattttcttgtccgcaattttccttcaagataaacctcagagccttttcgcagatattcgctggcaatttctgccagttttccgctcattaccacgcggtgccactccgtctgctccttttgctctccagtttgcttatcacgccattgttctgacgtagcaactgtaaggtttgcaaatgccgttcctgatggtgaatatctgatttctggatcatgcccaaggcgaccaataatgatcaccttatttacgcctctgcttgccatttatgccgcctgttttagttcgttaactctgatattcattacctgaacgcatttagcctgcgcctcctcgttgccagccattaattgccagtcacgctgataacgctcgatgagttttttcttgtcagtttctgttgacgcataatcgctgaagtctttcaggatttgttcgcagtcaaccgatggagatttctggttggtattttctggtgatggtttgttatctgatactggcattgccaagcccggcagcgatggagggagccagtaaaatcctgttccatccttcagttttgccctgcgccacccctgctttttatcgagagatgtttgtgcgaaaccttcctcaaggttatacagataccgaccgattccccactgaacggcagcacgcttcattgcacctgaacgaccacctttgacggcttctacctgcgtgttttcagcagcatcccatttggttacccattcggaatcaatcttgattgatatgccgcattcaactccgccgttgttgggaatatcgcggtattcattgcgccatcctgctttgccgcaaacatcgtccaggcgtttcatgattgccctgttcgtgacataagccagcaccatagcccacacctttccatcgcgtgttttaccgctttgctgtattcgccattcgatatcttcagggctgaatggctcatcgaatttattcaaatccataattcacctcagaatggacatggcccaaggaaataacgctgatttaatacttcgactctggacaaattaaggcatacccgcattccttcgcggtcgccattatggcgataccagagagctttctgcgtgtacatgcgtctctgtaacttgctctccttcactgtggttgcaagtgacatgaatatctccttcgttaccgattaattctttcatctgacgaatgaattcttcgtctgaccagttatctgtaaaactcatttcctgcgataccacggaaggttgatagctgatttcatcgctttatttgcttcaagccacattttggaatcaccaataaatcgggctattactgctttgttctgtgcagcacgaagcatctggtgattgatggctatttcattgcgcataataagacctcaactcttttccatccgtcacgtaatttacgggtgattcgttcaagtaaagattcatttagttggaaggcacccatgcgagcgcctcccgcgattgcgtaaatcatgggtggttccttatgttggttttattagtaggttatttttgttgcgaatacttcgccttttacgatggctgttatgatatttttagcaacatcttctgatgcaccaaccttgataaggtcagcaagtattttgttatttacgtctttccggtgagctttatcctttgctctacgctcttcttcgtccttgattcttttttcttctgctattctggcttgctcttttgcttcagcctcgcgccggattcgttcagcctcctcctgtgcttttctgcgttctgcttcaattgctgcctgcttttctctttcagctcgttctgctgcctcttttgcttcgcgctgtgctcgttgctctgcttcaatgcgttcacgctctgcacgttccgctgctgccttagcttctgcttctcgccttgctgctgcttcaatttcggcttttgcctttgcttcggcttctgctctggctttctcttcagcttctttttttaagcgttcttcatgctctcgcttttcctgctccgctttgagtcttgcctcttttctttggcggtcaaattcgcgatccatcaaaatcgctatttcatggtcagactcaatttgctttgcgagagcttcagctgctgccttagcttcctcttcggctttaatccgcgcctgttcttcctcataatcagtaagaggctggcgtgccttggctttcagctcatcaaggcgatcacgcactgtcttgcggttagcatcaatgagctttggaatttccttcagttcagcaacaaggtctttgccaagaccatcgagatatgttttcgtctgcgcaactttatacgccagagaagcgatctcctttctgccctttgccgttgtgatatcaggcacaaaggacataacttcacgttcaaccttttgaaggatttcttcaatctggtcggcagactgaaatacagtcattgcatttgctttttcaataacaactaaatctgttacttcactcatatatcctccatcaaaaaaattgccctcacactggagggcaaagaagatttccaataatcagaacaagtcggctcctgtttagttacgagcgacattgctcacatagcagactcgtaaatctgctataggcgcttattcgcatcgcatgacaacatcaaatttttcgagattactttgtcgcaacaatccctcttctacgcggtcagcttttctataattatcaaattcgaaatgtttaattacttctttcgtttctcgctctataacttcaacaatgtatttcttattcatcattcttcccccagggccttgctgatggctgccttggctcgtttgtattcggttaactctctgcacccttcgtcatgctcgtaaaggaagacaagctcttgcagtgcttcaagcaaatcaggagctgctgctatcagtagcgcatcctccctttcatttcttgttgctgcttcaatgtatgtgtcaccaatcgtcacaccatggaacgtagtcatcatctcgttgacgtttctaaccgtgtacttccatttaccaggcgtacccttaaactctttcatatccacctctgttgtttatgccaaaaataaaggccaccatcaggcagccttgttgttctgtttaccaagttctctggcaatcattgccgtcgttcgtattgtccacaccattgattcttatcaatagtcgtagtcatacggatagtcctggtattgttccatcacatcctgaggatgctcttcgaactcttcaaattcttcttccatatatcacctcaaataagtggtttgctgcctaatttcattttctggcgaccaacacaagtcacacccatttcactgcgtggcttgcggtagtaaatacggttctgtttacgctcgacttctactaccttcttgcagcgaaggcttccgagtgatgctgctttgtctgctctgacgcaaccagagagctttagcgcaatctttcgcgccagtcgctgttcttgcattgcctgttcacgttgagcctgtctgcgtgctctgcggcgatttctggcgttatcgtcagccagatatgtaatgactactgtcatgttgacctccgatgaaacaactttggaatttttttattacaaagtggtttccttccccgccaattagacggggatggaagagcatttatgagcctttatggactctgctcgatcagttctatttaattaatctctcaattgaatgtaagtattcacataaatcctcctacctcttgtgcagctttcttgaatatggtggcggctgcataacgcctatggaattgactttggcggtgacgcgccgggtgcttatcttccggttgccgtcgtgcagctgcacttcacgtcaccccaaagccaactactctttggttcccgcatttcggcgggacaatcccatcaatgttaaagagcctgccaatctgttccgtttggctaccagcgtcctgctgatggcttaaatttaagatctctttaattaatggtcaagagtatttttgaagaaaacttaaattttctttcgtaacttaagtttggctttgatttttaaaggaaataaaaaaaaggggcgaatgcccccttatggaaggtttgctagttttgcatcgacaactacgccgatgattttgcagtttccgttgatctcgatcatcggatattgtgggttaagtggttttagaaacttcctgcctgcatcaataactaacttcttgaaagttgcctcgttttctccttcgagctttgcaactaccagtttcccgttacgcggctctacttcaggatcgacgagtattatcattccttcagggatactgagaccggccggagccgtcattgagtctcccttcacgtccaaccaaaacgaatcttcggaacagtctacggttgtatcgtaccagttatctattgcacgcttatgatatggttccacagcttccatccagcatcctgcgctcacccagctaatcagagggtatgaccctcttggatcatgcctactgtgataggcaatgtttgaaagactttcctctcctttcatcagatagtcaggggaacacttcaacgcattagccagggcgagaagattctctccatttggctctgtctcagagcgttcccactgagatatggcaacattagacacgccgaccatctttccaagtgcggcctgcctgatcttgagttcttttctccgagcgcgaatgcgctctcccatcaattgagttttcatagttaagacatcttaaataaacttgacttaagattcctttagtggataatttaagtgttctttaatttcggagcgagtctatgtacaagaaagatgttatcgaccacttcggaacccagcgtgctgtagctaaagcgttaggcattagcgacgcagcggtctctcagtggaaggaagtcatcccagagaaagacgcctatcgactggaagtcgttacagctggcgccctgaagtatcaagaaagcgcttaccgcaaagcggcataagcaaattgctctttaacagtcatggtcctcattcccgccgaaatgcgggaatacaacgcgcataagttgatgcgcataacttcttattagttaaggaaatacttacatatgcaacttacaagtactcgcaagaaagcgaatgcaattacaagcaacatcctgaatcgaattgctgtacgtggccagcgaaaggttgccgacgcgttagggattaatgaatcgcaaatttcgcgatggaaagacagcttcatcccaaaaatgggaatgcttctggctgttcttgaatggggtgttgaagacgaggagttggcggaactggctaagaaagtagccagaatgctgacaaaagaaaaagccccgaagaacggcgaattcttcgaggcctgatgtagaaagactggatcaatccacaggagtaattatgacaaaacgtcgtaagaaataccaggaaaaagaagagattcgacaccctgattcacctgagggattagtggtagccgcagcaaataacagggcgttcgcagagcgccttgttggtgtttacagactagccaaagcaggagtgaaacatgggcgtcgttaagttagctgattacaggcataaccctgtacaacatcaggaggcatccagtatggggtatgtctctatacaccgccagtttatggacagcaggctctataaggactctcaggcagtacatctttggcttcacttaatcctcaaggctaatcacgaatctactgtcgtcaatacggatatcgggccgataactgttgatcgcggtcagatgataactggacgcccgtcgctggtcagagaaacattcatcccagacaacaaagttcggagcttattacggacttttgagtcgaaagggatgcttaatatttgctcgatggggaagaaatttagcctgtttacaatcgttaaatatgacgattttcaggcaaaaaattgtccaacggttgtccaacggttgtccaacgcaaacaccagtaatggcgcggctctcagcggagattgtccaacggttgtccaacggttgtccataaacaataatataaataatatctctaatactgacgtattagagagtaccgcagcagacaaaaagtctgacaagaaaaaaccttccgttagctgtcaggatgttgtcgatgcttaccacgaaatccttcctgaagcgccaaaaatccgcgcactgaatgacaagcgtaaaaaccagatccgaacgttctggcgcaaagccggagtgataacccgccagcttgacgggcatgggttcacgatgcaggactggagaaattatttgagctacgtaggcgaaaattgccgatggatgttcgaagagcgtccaaaccatcaacgcggaaccgtctggcacaaaaagggatttgatttcctgcttaacgacaatacctacctgaaagttcgtgagggtgaacacgatgaccgataatttttatgcgccgccccatagcatcgaggcagagcaggcggtgattggtggattgcttctggatgatgacagcagtgagcgcgtccagaaagttctggcgatgctgaagcctgattcattttacagccgaccacacaaaatccttttcgaagaaataaccagaatgcaccgggagcaaaagccagtagatggcctgacgcttttcgatgaactggagcgtaaatcgttaacggcgtctgttggcggttttgcttatatcgctgagatcgcaaagaacacgccaagcgcagcaaacatcgttgcttatgcaatgcaggttcgcgaaaccgcaatggaacgctacgccatcaaccgcatgactgaagcgacggaattgctctattcccgcaacggaatgactgcaacgcagaagtacgaagctattcaggcgattttcacgcaactgacagaccatgcaaaaaccggatcgcgtcgcggccttcgctcatttggtgaggtcatggaagactgggttagcgaccttgagaagcgatttgacccatcaggcgaacaacggggaatgagcacagggatcccatcgctggacaggatgctgtcaccgaaaggtctggtgaaaggctctctgtttgtcattggcgctcgccctaagatggggaaaacgacgctatacagccagatggcaatcaactgcgcagtgcatgagaaaaagccagctctgatgttcagccttgaaatgcccggtgaccagatactggaaaaactggtaggacagaagtcaggtgttaacccgaatattttttaccttccggcgacaaatgacgctgatgacggctatcagggtgattacgatggtgacttcaacagggcgatcgaaacagccaatcgcttgagtgaaatcgacctgctttacatcgacgacacgccgggattatctctggctcaaatcgtcagcgaaagtcgtcgaatcaagcgagaaaaaggatgtgttggcatgattctggtcgattacctgacactaatgaccactgagaaggccgatcgcaacgaccttgcttacggcatgatcaccaaaggactgaagaaccttgccaaagagcttgattgcgttgttgtgcttctgacgcagcttaaccgcgcactggaaagccgaaccaataagcgcccattaccaagtgactcgcgagatacagggcagattgaacaggattgcgattattgggtggggatccatcgtgaaggtgcttttgatgacagtgttcctcctggtgaaaccgaactaatccttcgtctcaatcgtcatggcaataccggcacggtgtattgcattcaggcaaatggcgctatttatgacacagaccaacagtctgctgaaatgcgccgccgtgaacgcgaggaaccgcagtccaagaagaaaggaggattctgatgaataaaaaacaattagccattctcgaaaaggcatgggatgcacaaatatcatgcgctttgaaagaacaggcactaccaataatccagaccaaatcgaaaatagccaggcagttatgcgatgacggatttctgaacgaagttgagattacgcaccagatggtaacgttcaaagggtatgagataaatcatcatggtatagcggcgtattgctcccaccttcctgatgacgttgacattgatgaaatggaaagggagatgaagcaatgaccatctacatcactgagttaataacaggcctgctggtaatcgcaggcctttttatttgggggagggtaaatcgtggctgagttaattttctctgcattgagggttctcggtgctatgtggatggtggcgacgttcattgttgttgccagcagttttgtccggttggtaggcgaaggtaaagacctggttggtgtgcttttcggtagcatttttctgtgggtgattatcggtgttatgcctgttgtcgtagcaaaagtggcgtggcgttttgtgagttgaactgagggtaagtaccgatggacgaatcaagaaagaagtttgaggaatacgttgccaaaaaattgagattaccattcgagatgataaccgaggcaagaaatggtgataggtacttcgcattttcaagcatggatattcgtcactccttaaatgagtggtggactttatggcaggcatcgcgagcagctatcgagattgagctgcaaaagccaaagaaaggcccacttcccggtgattatcacattggctatgactcaggtgcagaatcgcaatacgaaagcgatgtagaggctatccgcgccgctggaatcaaagtgaaggagtgagtatgagcgcatacgaagaaatcatgttagccctgcgattctttttcggtgtggaagaagatgaaaacgtaaatgagattatcggacaagaccatgacccgatagggactattgcagctgcacttgacgattacaggagcgtaaatggtgaggaaactaacgtttgaactaagaagccccatccatcagcagaacgccattcaagctatccagcaaattcttccagacccaaccaaaccaatcgtagtaaccattcaggaacgcaaccgcagcttagaccaaaaccgaaagctttgggcttgccttggtgacgtctctcgtcaggttgaatggcatggtcgctggctggatgcagaaagctggaagtgtgtgtttaccgcagcattaaagcagcaggacgttgttcctaaccttgccgggaatggctttgtggtaataggccagtcaaccagcaggatgcgtgtaggcgaatttgcggagctattagagcttatacaggcattcggtacagaacgtggcgttaagtggtcagacgaagcgcgactggctctggagtggaaatcgcgatggggagaccgggcagcatgatgcgatgttatcggtgcggtgaatgcaaagaagataaccgcttccgaccaaatcaaccttactggaatcgatggtgtctccggtgtgaaagaacaccaacaggggtgttaccactaccgcaggaaaaggaggatgtgtggcgagacagcgacgaagtatcaccgacataatctgcgaaaactgcaaataccttccaacgaaacgctccagaaataaacgcaagccaatcccaaaagaatctgacgtaaaaaccttcaactacacggctcacctgtgggatatccggtggctaagacatcgtgcgaggaaatgacaatggattattcacagttaagtgattttgaaattaacgtggcggtattcgaagccattcataacggatcaccggattacaaagaaggtgagaatggcgcgatggtgtttatctcatttgagggagacattgtaaacggagacgcagttgaagtagaagttgagcgcggatcctttaacccatgcgcaaacccagcagacgcatggccgatcatcactgaaaacaaaattagcaccatgtggatgacagcggaaaaagaatggtgcgcatggtcaggaggtgatttagaggaaggttgttgggaatgggaaaatattcctgactactgcttctgcggtgaatcgcctctccgcgccgccatgattgtatttctcatgatgcaggacgccaataatgcttagcccatcccaatcccttcaataccagaaagaaagcgtcgagcgggctttaacgtgcgctaactgcggtcagaagctgcatgtgctggaagttcacgtgtgtgaagcgtgctgcgcagaactgatgagcgatccgaatagctcaatgtacgaggaagaagacgatgaatgagttaataaatggcaatgccatcaaaatgacaagcattgaaatcgctgagttggttggtaagcgtcatgacaatgtgaaacgtaccatcgaaacgctggctaaaaatggtgttatccggcttcctcaaattgaggattgtggaagaatcaatgggttaggcttaaatcaaagtttttgtgtgtatgtattcgaaggcgaacaaggaaagcgagacagtattgtcgttgtagcccagttgtcgccggaattcaccgctcgtcttgttgaccgttggcgagagcttgaagaaactgcggttaatatccccaaaacgttaccggaagcgttgcgccttgctgctgatcttgctgagcagaaaatgcaactggaaaaccagctcgcaattgccgcacctaaagttgagtttgccgatcgagttggcgaggccagcggaattttgattggaaactatgcaaaggttgttggaattggtccaaacaaactgtttgcgtggatgcgcgatcacaaaatccttattgcttcaggttcccggcgcaatgtgccaatgcaggaatatatggatcgcggctatttcacagtgaaagaaacagcggtcaacacaaatcacggaatacagatatcgttcaccacaaaaatcaccgggcgtggtcaacagtggctgaccagaaagctgctcgataacggaatgctgaaagtaacaggggaggctgcttaatggctaacctacgcaaagaagcgcgcggaagagaatgccaggtacgtatttacggcgtatgcaatggcaatcctgaaaccacagttctggcacattaccggatggctggaatttgcggaacgggaatgaagcctgacgacctgatcggcgcatgggcttgtagcgcgtgtcacgatgaaatcgaccgacgcacccataacctcgacaacaaagacgccagactttaccacctcgaaggcgtaatcaggacgcaggcgatactgctgaaggaggggaagattaagccatgaacgaatatcagtttgtacttccatacccgccgtcggtgaatacctactggcgaagacggggaagccaatactacatcagcgataaaggccagaaataccgaaaagacgttcagcaaatcatccgccaacttaagttagacattttcaccaaatcacgactccgcatcaaagtcatcgcagacgttccagactcccgccgccgcgacctcgacaacatcctgaaaggtttactcgactcccttatccacgccggatttgcggaagacgacgagcaattcgatgacattcgcgtaattcgtggcgtgaaagtaccaggcggaaggcttggaataaaaatcaccgaactggagaacgcatgaacgccacaattcaaacgataccagagcttcttatccagacacgaggcaatcagaccgaagtggcaaggatgctttcctgcgcaagaggaacagtgctcaagtacaaccgagacagcaaaggcgagcgtcacgtaatagttaacggcgtcctgatggtcacgccaggcaaaaagggaagacgatgagactcgaaagcgtagctaaatttcattcgccaaaaagcccgatgatgagcgactcaccacgggccacggcttctgactctctttccggtactgatgtgatggctgctatggggatggcgcaatcacaagccggattcggaatggctgcattctgcggtaagcatgaactcagccagaacgacaaacaaaaggctatcaactatctgatgcaatttgcacacaaggtatcggggaaataccgtggtgtggcaaagcttgaaggaaatactaaggcaaaggtactgcaagtgctcgcaacattcgcttatgcggattattgccgtagtgctgcgacgccgggagcaagatgcagagattgtcacggtacaggccgtgcggttgatatagccaaaacggagcagtgggggagagttgttgagaaagagtgcggaagatgcaaaggcgtcggctattcaaggatgccagcaagcgccgcatatcgcgctgtaacgatgctaatcccaaaccttactcaacccacctggtcacgcactgttaagccgctgtatgacgctctggtggtgcaatgccacaaggaagagtcaatcgcagacaatattttgaatgcggtcacacgttagcagcatgattgccacggatggcaacatattaacggcataatattgactttttgaataaagttgggtaaatttgactcaacgatggataaatgcactcgttaaataaagccctgagttaatagctcggggctttttgcgtttgcacaacaggtaagagcattgaacccgcagatctcgcggaattggtgaaaggtgccgcgcagtgctcttatcgttgtggtgaagctcaatggcgagttagcagataggcgatagtgaaaatactagttatgtagctgaccgccgcgcgtactgcaatcggcagcgcaccgatggaagcaggttcgattccggccgccacaacccaaactgagccgtagccactggctatcatgaattcatcggtgatagttacgctgcggccttctacacatgaccttcgtgaaagcgggtggcaagaggttgcgctaacaacctcctgccgttttgcccgtgcatatcggtcacgaacaaatctgattactaaacacagtagcctggatttgttctatcagtaatcgaccttattcctaattaaatagagcaaatccccttattgggggtaagacatgaagatgccagaaaaacatgacctgttagccgccattctcgcggcaaaggaacaaggcatcggggcaatccttgcgtttgcaatggcgtaccttcgcggcagatataatggcggtgcgtttacaaaaacagtaatcgacgcaacgatgtgcgccattatcgcctggttcattcgtgaccttctcgacttcgccggactaagtagcaacctcgcttatataacgagcgtgttcatcggctacatcggtactgactcgattggttcgcttatcaaacgcttcgctgctaaaaaagccggagtagaagatggtggaaatcaataatcaacgtaaggcgttcctcgatatgctggcgtggtcagaggggactgataacggacggcagaaaaccagaaatcatggttatgacgtcattgttggcggagagctattcactgattactccgatcaccctcgcaaacttgtcacgctaaaccccaaactcaaatcaacagcagcaggacgttaccagcttctttcccgttggtgggatgcttaccgtaagcagcttggcctgaaagacttctctcccaaaagccaggatgcagttgcattgcagcagattaaagagcgtggcgctttaccgatgattgatcgcggtgatatccgtcaggcaatcgaccgttgcagcaatatctgggcttcactgccgggcgctggttatggtcagttcgagcataaggctgacagcctgattgcaaaatttaaagaagcaggcggaacggtcagagagattgaggtatgagcagagtaaccgcgattatctccgctctggttatctgcgtcatcgtctgcctgtcatgggctgttaatcattaccgtgataacgcaatcgcctacaaagagcagcgcgataaagccacatccatcatcgctgatatgcagaagcgtcaacgtgatgtagcagaactcgacgccagatacacaaaggagcttgctgatgctaacgcgactatcgaaagtctccgtgctgatgtttctgctgggcgtaagcgcctgcaagtcgccgccacatgtgcaaagtcaacgaccggagccagcggcatgggcgatggagaaagcccaggacttacagcagatgctgaactcaattattaccgtctccgaagtggaatcgacaagataaccgcgcaggttaactacttgcaggaatacatcaggacgcaatgccttcgatgatagcgataattttactcatcatccttcacatctggctctgtagacagggtggtgatcacttctggagtgaatccagattaaacatctcattgctgatgcttgaagttgagcatctggcgcgcggtaaggggctgcgttgagataagagccagtcattacaaataccaggatttagcctcgcatttgcggggcttttttacatctgcagtaaaccgcgcatcgcagcgcgtaacaatcccgagtctttcagaaagctgagcctgagaattgccgtatatggtggcgaccatctcggggacggcttttctgtgcgaacaggctcatctttctaaaaggtaaacgctatgaataactttgttgaaattacctcaagaattggtcgcatgtaccaagattttcttataagtggaaaggggtctggcgacatcatagaggaaattgacaagctaagtgcagagctgagaaggaatgggtgtgttaattctatcttttttgaaactttgctaaagcaaggcttcatgtttgacatgattaattacaacaaagtcgcacccagtgcttcgcaaaaatcatatgtgtacgttctgcatgctgaagatagtgggctaacaaaaatagggtttagtcgcagggttaataaacgaatttcagagatatctcgcatgagtggtgggaagctaaatctaattgcaaagattccggccgatagagagattgaaaccaaattgcaccaaaaatattacaactataggtcgcacggggagtggtttagcctcaatcgttgtcatttgaaagagctaaaagaaatgcctggtaacgaactgaaataatccccgggctcactaattaacggcagtacagcgaaacaacccaagccagtaagtggggaaataacactggcagccactgaaagatgaacctccagccttatggcaaaaaagattctttgtggtggcggactgatggaaagacatccgctgaatcgataacgaacaagtggaagatgttgcgatggtttccgtaaacaaagaccagaaggaaggcgttgaatacatcactggtgctgatggtgtgaaaaggccaatggcttattacaaagcggctgaagagagggcaagaatggaaaatatccctaaatgcggctcatttttcgacatgctgaaccttcagcaatggaagttgtgaacaactaacaggtcgctcaggcggcctttttatcgccatcacaaaaacatctttaacaaccaacaaggtcataattatgaacgaccagcaaatcgaaaaagaaatcgttgagaaaggcaaaaccgctccgcgagttaccccgcagcacatcgaagacgtgattaaaagcgagcattactttactgcttatgatggacgtaatggtgccatttccagcaacgaatattgtggcagggaaaaaccagaagaagacgatcgtgatttatcaccattgaagttgctcactttctgcgtactggtgctgaagaatggcttcaccgtcaccggagagagtgcctgtgcaagccctgaaaactttgatgcagaaattggtcggaagattgcccggcaaaatgctgtaaacaaaatctggatgctcgaaggttacttgctgaagcagaagctaagcgaacagtagttattacaaaagccattccctacagagtggctttgacaatggcttataccctacacgggataacttaactgatatcccttttaacggataaacggagccaacaatggcagagattattcccatgactgaagaacagaaattccagttagagatttacaaactggtcatgaaccagaacgcagccgcagaggaagcatttcagttcattggcactgacgagctgaagcttgagctattcaaaattcacttccagtcaggcggcgctaattcagatatcacgacccgcacaatcgaagcggtgcgtaaatcgaaggaagcgttagacctgttcactaccggagtgtaagagatgactgaacaagaaatgccgagataccagtgccacaaaaaagttcgcgccctgaagattggctctatagaacataagccaaacccagatcagtctggtaagactggctcttctagttatggggcaattattcatccggatgataagaaatacgcagcatttgatgttagcgcggaatatatctgtaagcaccgaccaatgtctggaggctattacgttgtctatgaggatggatatgaatcatattctcctgctgaggtatttgaggctggatattcaaaattataggaatcctctatgacaagcgtcgttgatcttggtaaggagaagaaattcccaattactcaagagctatacgagcggcttgaaagcgtcatccatgattacgatggtgaaatcagtttatgcgaggcgattggcgcactcgaattgctgaagcagtcactgattgaaggcgcgaaagagtcctcaacctgaaatgacaattaagtgagatgaatatggcagcaccaaagggcaaccgattttgggaggcccgcagtagtcatgggcgaaaccctaaattcgaatcgcccgaggcgctgtgggctgcttgttgtgaatacttcgagtgggctgatgataacccgctatgggagggtaaggtattttcatatcagggaaaaataattaaggctaatgtccctaagatgcgagccatgactatttcaggattgtgtaccttccttgatatcaccaggcaaacatggggaaccttccggtcaatggaaggtttttctgacgtcacatcacgagcggaagacatcatctacgaccagaaattttctggcgcagccgctgaccttctcaacgctaacatcatcgcccgtgatttgggcctcaaagagcagtcgcaagttgaagacgtgacacctgataagggagatcgcgataagcggcgctctcgtatcaaggagctattcaaccgtggaactggacgcgattcttgataacctgagcgacgaagagcaaatcgaattgctcgagctactcgaagaagaagagaactaccggaacacacacctgctatatgaatttacgccatacagcaaacagcgtgagttcatcgacgccgggcatgattatccagagcgctgttttatggctggtaaccagcttggtaagtcatttactggtgctgctgaagtcgcgtttcaccttaccgggcgttatccgggcacaaaaggctatcctgctgatggtaaatatggcggtgagtggaaaggtaagcgtttctatgagcctgttgtcttctggattggcggcgagacaaacgagacggtaaccaaaacgactcaacgcatcctgtgcggtcgtattgaagagaatgatgaaccgggatacggttcaataccgaaagaggacatcattagctggaagaagtctcctttctttccgaaccttgttgatcatcttctggttaagcatcacacggctgatggcgttgaagatggcatttcaatctgctacttcaagccatactcgcaaggccgtgctcgctggcagggtgacacaatccacggcgtgtggtttgacgaagagccaccatacagcatttatggcgaaggtcttacccgtaccaacaaatacgggcaattctcaattctgacgtttaccccgctgatggggatgtctgacgttgttaccaagttcctgaagaatcccagcaagtcgcagaaagtggtcaacatgaccatctacgacgctgagcactacacagacgaacagaaagagcaaattatcgcatcttatcctgagcatgagagagaggcgcgtgctcgcggtattcctactatgggtagcgggcgaatcttccagataccggaagagacgattaagtgtcagccgtttgagtgtcctgatcacttctacgtaattggcgggatggatttcggatgggatcacccgcaggcgcaggttcagctttggtgggataaggacgcagacataatctacctttcacgtgtgtggaaggcgaaagaaaagacagccgttcaggcgtggggagctgttaaaccatgggcgcataaagtgccaaccgcatggcctcatgacggaaaccagcatgagaagggcggcggtgagcagctcaaagggcagtatgcagatgctggttttatgatgttgcaggagcatgcgacatggcctgatggcggcaatgctgttgagcctggcatcactgaattgcgagacatgatgcttgatggtcgcttcaaagtattcaacacctgtgagccattctttgaggagtttcgcctctatcaccgtgatgaaaacgggaagatcgtcaagcttaacgatgacgttctctccgccgttcgctatgcatacatgatgcgccgcttcgccaaaatgatgcgcgacatcaaaaaaccaaaagagaaaaagataccagccccaatcaggcccatcgcacggagaacttaaatggccgacgaaaacagactcaattccattctgtgtaagtttgacgcagactggatggcgagcgatgaagccagaaccgaggcgacaaatgacctgtattttagccgagtgtcgcaatgggatgactggctatcaaactacaccaccctgcaatatcgcggacaattcgatgttgttcgcccggtggtcaggaaactggtcgcagagatgcgccggaaccctatcgacgttctcttccgacccaaagacggcgctaatcctgatgcagccgatgtgttgatggggatgtatcgtactgatatgcgccataacacggcaaagattgccgttaacgttggcgttcgtgagcagatagagtccggcgttggtgcatggcgtctggtcacacagtacgaagacaacgacccaacaagcaacaatcaggtaatcagacgcctgccaatccatgaagcctgctcacacgtcatatgggacgccaatagcaagcagatggataagagcgacgctaagcactgcacggtgattaacgccttgtcgcgcaatggctggaaagagttcgcagaggattacggtattgatccggacaccttgccatctttccagaatccgaacgatacatggctgtttccgtgggtatcgaatgatgtcgtctacgtcgctgagtattacgaggtcgaagagaagaaagaaaaagtcttcatctaccgcgacccgctgacaggtgagccggtcagctattaccagcaggatatcaaagacgtcatcgacgacctggctaatcgtggattcattaaggtagcagagcgcaaggtgaagcgtcggcgtgtgtataagtcgatcatcacctgcacgcagatactgaaagaccgcgagaagatagccggagagcatattccaatcgttccagtgtatggtgaatggtcattcgctggtgacaaggagtgctacgaaggagtggtaaggctgacgaaagacggtcagcgccttcgtaacatgatcatgtcgttcaacgccgatattgttgctcgttcaccgaagaagaaaccgaccttcttccctgagcaaatcgaaggctacgaatacatgtacggtggaaatgacgactatccgtactatctgcagaacaagaccgatgaaaacggtaacgacctgccgattggtccaatctcctacatggaaaaccctgaagtgccgcaagccaacgcttatatgcttgaggctgccaccaacgcagtgaaagaggtggctagtcttggtgtggatgcgcaggcagcaaactctcaggtcgctttcgataccgtcaatcaactgaacatgcgggcagaccttgagacatacgtgtttcaggataacctagctaccgcaatgcgacgtgatggcgagatttatgcctcaatggtcaacgatatttatgacgttcctcgtcatgtaacgctgacacttgaagatggaagcgagaaagacgttcaactctatgcgcaagttgtcgattaccagtccggcaatgtggtcacactcaacgacattcgcggtcgctatgagtgctatacagacgtaggaccatccttccagagtatgaaggaacagaaccgcgcagagattcaggagttgctcaccaaggttccgcaaggtactccagagttccagatgctgatgctgcaatacttcacgctgcttgacggtaaaggcgtcgagatgatgcgagagtacgcgaacaagcaactggtgatgatggggctgaagaaaccagaaacacctgaagagatggagatggtgcagcaggcacaacaacagccgcagcagccatcagcagagcaaattcaggcgcagggtatccttctgcaaggtcaggctgaattgctcaaggcagagaaccaacaggcgcagattcaggttgaagctgccaaggttgaagctcaaaaccaactcaacgccgcgaagattgcagaaatcttcaacaatatggacctcgacaagcaggcagaactgcgtgagtacctcaagctcgtaggtcaattccagcaacagcgcagcaaagatgctcgtgctaacgctgagctgcttcttaaagatgcagaccagactcattcacaacgcatggatttcgcgaatcttatgcgtcaagttcaaatcccctccggcggagtagccgagacacctcaataagagagagttaatcatggaacaaaccaccgacattcaggcttctgaagaattaaccctgcctggcaatcatgcagcggcatctgctgatggcttagttgttgataatgccaacgacaacgcaggtcaggaagaaggcttcgagattgtcctgaaagacgatgagaaaccaaaacaagacccggcaactaatgctgaatttgcccgtcgccgcatcgaacgcaaacgccagcgtgagcttgagcagcagatggaagcggttaagcgtggagagttgccggagcacctgcgggtgaaccctgagttaccaaaacaaccagaccctaacgattatctttccgaagatgcactggctaagtacgactatgaccagagccgcgcactggctgccttccagcaggcaaacagtgaatggcagatcaaggctatggacgcacgaagccaggctgtcgccgagcagggtcgcaaaactcaggagttcacccagcaatcagcgcaatacgtcgaggcagcccgtaagcactacgacgcagcggaaaagctcaatatccctgactatcaggagaaagaggatgtattcatgcaactggtgccgccagcagtcggtgccgatatcatgcgtctcttcccggagaaatccgctgctctcatgtatcaccttggtgctaatcctgagaaaacacgccagttgctggcgatggacgggcaatccgcgctgattgaactcactcgactgtcagaacgtttaactctcaagcctcgagccaaacctgtttcagaagccccgctacctgatgaacccattcagggacacgctgttgctgcaaatatctctgcgattgaaaagcagatggaagcggcagcaaacaaaggggatgtagagacgtaccgcaagcttaaggcgcaactgaataaaggaattcgataatggcattaaatgaaggtcaactggtcacgtatgctctggatgaaatcatcgaaaccgtccagaacctgacgccaatggcgtccaaagtgacaaaatacacccctccggcagaatccatgcagcgttcaagcaacaccgtgtggatgcctgttgagcaggaagctccaacccagactggctgggatttaactggcaacgcaaccgggattctggaactctccgtgaaatgcaacatgggtgatccggataacgatttcttcgagcttcgtgcagatgacctgcgtgatgagcgttcttaccgtcgccgcatccaggcatccgccaaaaaactggcgaataacattgagtcagcaattgccaaacaggcaaccgaaatgggctcacttgttgttcacgatacccgcgcaattggtccatctactggcctgtctggctgggattttgtgtctgatgcagagcgcctgatgttctcccgtgagctaaaccgcgatatgggcatcagttacttcctgaaccctgacgattaccgcaaagcaggccgcaacctggtagatggtgacatctttgggcgcgttcctgaagaagcgtatcgcaacggtactattcagcgtcagattgctggctttgatgaaattcttcgctcaccgaaacttccggcagttaccaagtcaaccgctactggtgtaactgtgtctggagcgcagaagtttaagccgcaggcatacacccttgataccgatggtaacaaagagaacgtcgacaaccgtgttgcaacggtgaccgtatcctccaccaccggatttaagcgcggcgacaaaataagcttcactggtgtgaaattcctgtctcagatggcgaagaacgtgctgactgatgatgcgactttctcaatcacccgtgtgatcgatggtactcacatcgaaatcacgccgaagccgattgcactggatgacgcgtcactgacaaaagaagagaaggcttacgctaacgtaaacacctctcttgctgataccactccggtaaacgttctgaacgtggcaacaaccaccgctaacgtgttctgggctgatgactcaatccgtctgctgtctcagccgatcccggtaacccatgaactgtttgctggcatgaaaacgtcttccttcagcattcctggcattggtgttaacggcatcttcgcaacgcagggtgatatcaacactctgtctggtaagtgccgtattgctgtgtggtattcagcatgtgctgtacgaccagaggcaattggtgttggtctgcctaaccagactgcgtgataaccagagggagcttcggctcccttttctattggagataccaatgagcgtaatgatttttcaggctggcggagataccaaaatctgggggcgcaagctgaaaacgaaaaccgttgatcctgatgatgtagctgtgcacttatcaaatggctggtataagcaccctgacgatgttcctgatgatcctcttgttggtgatcaaattgggagtgttggcggaggtgaaacttccccagttgatatgggcgaagtgtccgacggttatcacacttttaacgagctttacgctcaccgagtgcgcctcttctcatcgctgatgcatgcttacgctgagctttcgtggtggtctcgcaaacacagtgacggtgaagagtgggatggctggatcattgctggtatcaccactccagaaggcgaaatcacttatcacctacctgttgaagaaatcgagttccttcctgaaggtactgagcttgagttcgggaaagagtgggatggtcatgaagcaaatgatgttcttggacgactcctgagtttgcgtccggccattgcagagccagaagaaaaacagcgtaaaaagcctggtcgaaaacctaaggcggcagcagatgaacctgacaacgaagggtgatttagttcttgcggcattacgtaagctcggtgtggcatcaaatgccacgttaaccgatgtcgaacctcagtccatggaagatggtgtcaacgaccttgaaatgatgatggctgaatggcttggcggtgatgcgtcaccaggtatcaacgttggctacattttcgctgatgcagatgtcgctccagatcctggcgatgaacacggtttatcaaataacgctatcaatgccgtcattttcaaccttgcctgccgcattgctccggattatgcgctggaagcgtcagcaaaacttataactactgccagatacgggaaagagcgactcgtcaaactgtctgcaatggacagagcaaaagccgctaaatgtaagtccggttatccaaaccgtatgcctgttggtagcggtaaccagttggcgaagtggaacggttggaattacttccaccagaaggaaccttgcgataacgggagcgaataaatgccaattcagcaacttccgcttatgaaaggtgtcggaaaagacttccgaaacgccggctatatcgactatctgccagtgaatatgctggctacacccaaagaaatcctgaacagcagcggatatcttcgctcattcccgggcattgccaaacgttctgatgtgaacggtgtatctcgcggcgttgagtacaacatggcgcagaatgctgtttatcgcgtatgtggtggcaagctgtataagggcgaaagtgaagtcggtgatgttgccggaagtggtcgtgtatcaatggcgcatggtcggacatctcaggctgtaggcgttaatggtcaactggtcgaataccgctatgatggcacggttaaaaccgtctcaaactggcctacagacagcggattcacacagtatgagttaggttcagttcgcgacattacgcgcttacgtgggcgttatgcgtggtcaaaagacggaactgattcatggtttatcactgaccttgaagacgaatcgcaccctgaccgatacagtgcacaatatcgcgcagaatcgcagccggacggcatcatcggtatcgggacatggcgagacttcatcgtctgctttggttcatcgacgattgagtatttttccctgactggtgcaaccaccgttggtgctgctttgtatgtcgcccagccatcgctgatggtgcagaaaggcattgccggaacctactgcaaaacgccgtttgctgactcgtatgcgttcatcagcaatccggcaacaggtgcgccgtctgtgtatatcatcggctccggtcaggtatcaccaatcgccagcgcgagcattgagaaaatactacgctcctacactgctgatgaactggctgatggtgtgatggaatcgctgcgatttgatgcgcatgaactgctgattatccatcttccgcgccatgttctggtgtacgacgcatcttcaagcgccaatggtccgcaatggtgtgtgctgaaaacaggactgtatgatgatgtgtaccgcgctatcgacttcatttacgaaggcaatcagataacgtgcggcgataagctggagtccgtgaccgggaaattgcagttcgatatcagcagccagtacaacaagcaacaggaacacctgctgtttactccactgttcaaagcggataacgccagatgcttcgatctggaggtggaatcatccactggcgtagctcagtacgccgaccgcctgttcctctctgctaccactgacggcataaattacgggcgtgagcagatgattgagcagaatgaaccgttcgtttacgacaagcgcgttttgtggaagcgagtagggcgcatcaggaaaaatgtcggtttcaaattgcgcgttatcacgaagtcacctgtcactctgtctggctgccagataaggattgagtaatggctgattcatcactgaatgatcctgtcgtggttcaggctacgcgccttgatgcttcaattttgccacgcaatatattcagccagtcttacctgctgtatgtcataaatcagggagctgatgtcggtgcaattgctgggaaggcaaatcaggctggtcagggcgcttacgatgcccaggtaaaaaacgatgaacaggacgtcgaactggcagatcacgatgcaagaatcaccgcaaacacaaaagcgataaatctacttgaggtcaggttaacaactgccgaagggaagatagtcgtactgcgtagcgatgttgattacttgctggatgaggttatcgatattcaggcgcatctggtcactgttgaccaaagactggataacgtagaaaacgatgtctctggcattaagagtgattacgtatcgaaaaccgtaaccgaatcgcagtctcttgcgtcaccgctggatgtaaaaacatcatattcagttgatggaattcaggtcgttggagcaaggcagaccggatggactgcagccacaggtacacctcttcttggctcattcaacgctaaccagtcatacacggtcggcactacgtacacacaatccgaagtcgcggctctcgctacaggtttgcagcaggctcggcagcgtattctggcgcttgaaacggcacttagattacatgggctgattgactgatgattacattcaaaccaacgcgaaacatcgacctgatcgaagctgtcggaaatcaccctgacattattgccgggagcaacaacggtgatggatacgactacaagcctgaatgccgttactttgaggtgaacgtgcacgggcagttcggcggcattgtttactatcaggagattcagccgctgacattcgattgccacgccatgtacctgccagagattcgcggcttcagcaaggaaatcgggctggcgttctggcgatacattctgactaacaccaccgttcagtgcgtcacatcgttcgctgcgcgcaaattccgccacggtcagatgtactgcgcaatgattggccttaagcgtgtaggaaccatcaagaaatacttcaaaggcgtggatgacgtgacgttttacagcgccacacgtgaagaactaatcgacttcctgaatcacgggagatagccatgttatatgcatttaagctgggcagaaaactgcgcggcgaggaaccttggtgccatgaaaaaggcgggaaaggtggtagctctgataaaagcgcaaagtatgcagcagaagcccagaagtatgccgcagacctgcaaaatcagcagtggcagacgatcatgaaaaaccttgctccgttcacgccgcttgcggagcagtatgttaaccagcttcagaatctttccagtttagaaggtcaggggcaggcacttaatcagtattacaattctcagcagtataaagaccttgcaggtcaggctcgttaccagagtcttgctgctgcggaggcgactggcggacttggttcgacagctacaagcaatcaactggctacgattgctccgactctcggtcagtcgtggttatcaaaccagatgagcaattacaataatctggcaaacgttgggcttggtgcgctgcaaggtcaggcaaacgctgggcagacgtacgccaacaacatgagcagcattgcacagcaaagcgcagcacttgccgctgctaacgccaataaaccatcaggccttcagacagcaattagcggcggagcttcaggggctatgactggcgctgctcttggctctattgttccaggacttggcactggattaggtgcggcaattggcggcggacttggcctgcttggatcgttgttttaaggggtaatcatggctacttggcaaggaacaaatggcggattgttggctggtatcggtggtgtcaactcaaacgctccgagcgtaaatgacatcggcaacacgcttcagcttaccaggcagaacaatgatattgagcgttcaggcgctaacaatgttgggctgacagctttgcaaggtctttctggtattgcgggtgtttttcagcaggaaaagcaggctcagcggcagaaagaatttcagcgggcatacgctaatgcttatgcgtctggtgatcgcggtgctttgcgtcagttggctactcaatatccagaccagattgaatctgttcgcaaaggcatgggattcattgatgaagaccagcgcaattctatcggcaccttagcggctggcgcacgccttgctgcctcgtctccagaagcaatgcaatcatggctgcaaaacaacgccaaggaactgactcgcgtcggtgttgaccctaacagcgttgctcagatgtatcagcagaatccttcaggatttggtgagtttgttgatcaccttgggatggctgctctcggtccgattgactacttcaatgttcaggacaagatggctggtcgtgagattgaccgaggcaggctggcagagacaatccgcagcaatcaggcaggagaggcacttcaggcgagagggcaggatattagccgagcaaatgcgttaacgtcagcatatgcaccaacagccgcaatgcagaattacaatcagtacgcgcaaatgttaaaggcggatccagatggtgcagcggcatttgcggcagcggcgggaattaatcccaatgctaagaaattacttaaggttgaaaccaatcctgatggctcggtaactaagtattacaccgatggcagcgaggaagcaggaaaactaaaccaacctatatctggtgatggcattaaaccaattagcttgccacaagcgcaaagcatcatagataaggctaatgagggttccaagaaggcggcaggatttgctttgcgattaaaagattcaatggactcaatgaatcagcttagtaaaagcattgaccctaagcgagttgcattaataaatcgctctcttggtgatgggactattgcaaatttaagcctatcaccagcggagcagcaatatatggtaaatgcgagagacgccttgtatgcaattttgcgcccagaaacaggtgcagcaattactctgccagagatgcaggagtattccaaaatgtacctgcctcagcccggtgattccaaggctgctactgaaacaaaaatgcgaaaaatgcagggccaatataactcattacgtggtcagtctggtcgtgtttatgatgctttggtggtttcaagtgctgcaaatagtcaacaacagagcaatagccaacaaccgacaaatacccaacagcagcagagtcaatccggatcatatacctcaaaatcaggcattcaatttacggtggaatgatgaaagtaactgcaaacggtaagacatttacctttcctgatggtacgagcaccgatgatattggcaccgccattgatgagtattttgctggtcaggctgttcagcaacaaacagttaatcaggccaataatgcaccaacacgggaagaaccatcattgatgcaacaagctggcgattggctcactggtggtcaaagtgtagggcaaattgcagaacaggctggtcgtggtctggtaaacataccatttgacgtattgcagggtggcgcaagtctgattaatgcaatcagtcaggggcttggtggccccaaggttttggatgatgtttatcgtccagtagacagaccgacagacccctacgcacaagccggtgaaacaattggtgggtatttagttccaggagttggaacggcaggaagcatggctattggatcactggcagaggccgcaaatcagaaaggcgatttcgcacaaaatgcagccaaaaatgccggagttaaccttgccgctcagggggttctttccgcagcagcaaagggaatagggcgtggaataacggctataaaaggtgatattgcgccagaagtggcgaagaaaattgccacatcagaatcgatgggcgtaacaccaatgacatctgatgttatcccgccgaaaaatgctttcactcgtggccttactcaggatgcagagggtgctttgcttgggacaggctcaaagcgagcggagcaatatgcaacgcgtagtaaactggtaagcaattattttgaccgttttggtgagtataaccctgatgatgtggtgaaatctctgaccaccacgttaagggggcggaaggatgccgctggcgctgttatcaatgacgtcaccaataaaatgggtaatgccgcagttgataccacaaataccatgaatgctctgaatacagcgatcgcaagacaggaacggcttgggacgtctgccaatcaaagcctgcttacatccttgcgtaacctacgtgaagaattagcaaaccctgcaactgatttggatgttacgtttgatctcttgcgtcagcacagaacagcatttagatctaatgttcagggagatgctatggtcttccccaaccaggcaaaagcagctaccaatatggtagagaatgcaatgtcaaaagatcttcgtaacgcagttgcaaaaaaccttggtgcatcagacgcagcaaaataccttaaagcaaactccgattatgcaaacgtttataataaggtgcttaataaaaacattgctaacaagctcaacaaggcaagcagtgaagccagtcctgaacttataaataccgttgtattaagcagaaaaccatctgacgtgaaacgaatctggagcgcattggatgataaagggaaagatgctatgcgtgcagcttacgtcagcaaaatagcggaaaaggccggtgactctccagccaagttcatcactgaagttaataagctgaaatctcagtcaggtggtgaaatttacaacactattttttctggaaagcacatgaaagagcttgattctcttcatgaagttctgcagcaaacagcaaggtcagacaccgcaaatgtagtaactcagacggggcaatcgcaagccaacaggataaggacgattggcgcaactgcgactcttggcgtatcaatggggcttgaggctggtttcggtgcaatgatgcgcttgtatgagtccaaagcagcaaggaatgctctcttacgtttggcaaacaccaaagcaggaacaccagcctatgaaagagcgctaaataatgctgcaaatgcgatacgccctatactttcaagccaaattacagcagaacagcaataaaagataaggtataactacctgatattactgctactgttgcatgttaccgtgtttccaaatcctgaattgcagtttgtatatgtatcaacgcgtgttgggtaaggttgagttataacaggctgtctcgctttttgctcgatcgcttgcattgtgtttacagcctgataattcaataaagcctgctggaatgcttggctttgcgctatttgttgggcttgttcttggctttgtaattgaacataaagattctgaagctcaagtcttgcctgcgcgtcacttatcttgccatcatcgacaccttgcccgagcatcttcgcagcaaggacatataacttaggtgttggtgctgatgccatgcgtgagtcgttcttcacgctagcatcaaggcaattagccatatcgctaagctttggatagcgttgttcgcaacttgcctgatagtcgctaacctttgcacaccctgccagcagaagcgggataattaacagcgatcttttcatatgattaactctccttatctttgccatcatggcactgttgggtgtaaatgagttattaactcaatcgacaatatcttcacgaaaatactttttgttattaagatctttctgattctaacaaaacggaaagtaatatgaagaggattatcggcgtcgttgctggcgctatattgttatctgggtgcgcaactattgttggtgacgaaacacagcttgtgcaagtgaacagcaatccttccggtgcgagctttaaggtaaaagacgaatcaggcgtgattgttgcgcaaggtaagaccccgcaaggagtaactcttgccaagtcagatggtagttattttggcaaaaagagctaccagatcactatggagaaggatgggtacgaaccagttaccctaccaatcaaagccaatgctaatggttggtatattggtggaaaccttgtgtttggtgggttaattggttggcttgctgtagatccatttaatggtgggatgtataccttgaagcctaaagaggcaaatgcatcccttataccgtccacaaagcaagactaataaatggaacccaccatcaggtgggttttttgtacaaatccttcagcgtatcaaacaccatcttcttaacaagttcagactgctcatcagcgatgcgttccgcatcgtctcgatagcctgaaattttggatggctttgatacagcatcagtcactatctgaactaattctgaattaagagagcggccattggatttggctcgctgttttagtttttcctttaattcgtaaggtagccgcagattaaattgcgggtcatctcttcccattcttgatgcctcgcttttgtgagtggatcggcatcttattatctgctggttgcatcctcaataagaccacagtggtctctttgtttgattaataatgcatcactgtggcaatgctgcggcgattccttgtatctggagcaaattaaatgacagacattacagccaatgttgtagtgagtatgccttcgcaactcttcactatggcgcgttcttttaaagccgtagccaatggcaaaatttatatcggtaaaattaacactgacccggtaaaccctgaaaaccagattcaggtttatgtggagaacgaagatggttctcacgttcctgtttcgcaaccaatcatcattaacgctgctggatatccggtatataacggacagattgccaaattcgtaaccgtgcaaggccattctatggctgtttatgatgcgtatggtacacagcagttctattttccgaatgtgcttaagtatgacccagatcaactagagcagagactttccagcaattccggagcatcattaattggcaccgcatcagggcaaactgtccagcaaaatctttccgaccatgaggaaagatttactcaaaatgaagacaatattagatctcttcagatcgccaccactgataatacaaataaaatagatgctctgattgtacgggacaaggcagatttcgcgcaaaacagaacgtcaaagtttaaacaaggcgcggctgcatttgtgaatggcaatcgatccacggtaattatcggcgactcaataagccatggagcgttcgcaggtaatctctatacaaatggatggacgagattactcgcaagagccattaataatgaatacggaacacagtcatacgggttcatcccaactggcactcttggtagtggtagcacgctaagtaaagatttgcacagcgtcgcttttgttggcacatgggttggggttgaaaatgcggatgcagcgagctacccaaatggatttgcatttagaggaaacactacatctcatcgggtaagtatcacgattccgtcatttatgagtagggcactaatacattatgcgactcaaccaggtggagcaacagccacagttgctgtcaatggaactgtagttacgacaataaactcggcaggtgcgctgaacgggttttcaaccgtagaagttcctttaacagataatggtaccggagagtcattgatttctattcagttgaccacggatggaaattttgactggattggtaatagctatttttcgggtgttacggaatctgtaactcaaaactttagccagtctggtaggagattgtattatgtagatcaatcaacaattaacaccatttgccaaaactccaacacacttataatggcacttggatataatgatgctggagaggtttcatcagaatatcaaactttattcaaacagcgtattgactggattatagcggcagcaaattcaaatggtgttcgcgttgttgttcctgatttttgctggacataccctgatacaaattatgcacgaaaagaattaaaaaggttggcggaagaaactagtgggatatacatagatttcccgtcattactggtaaaggatgacgggtcacctgcagatcctaattatctaaataatgtattaaagctttttgttgatggaacacacccaaacgctgatggtaatgctttcgtgtttgaggttatttcaagaagtatgggactggcaattaactcaaagtcctcatcattaagtctttcagattttaatcttccaattaaattaacaaatccgctcatcaaaaatgttattactatcggaaattccatatcttcagtaaggagggttccgggaggagtattgctcaaatgcctgcttacaatgcccggtggtgctgagagcctaccaacaggaacggtcataatatgtgatgcgttcccggcaagcttcggtgacagcaagatcatgcagagcacgcaaaccatgataatcacagatattgcagctgatacatttgtcggaacagtggcgctgtcagctaatggtcagcttgttgccacaataagaaccaaacctacgaaaaaccagctcaattttgtgattttttcgccagcagcaccaggggcttaattttcctgcaacttgagacttatttactatggggcaaaaaattatcgcaaaacgactcaaaacctcgggaggcggtgattcatcttgcgctaatgcttttttggtaaataagacagaaatgggacacacaaagctttgcataggtttgcaaggctttgtgatgctttcctatgacaccttctcatcaagccagtccgcccaccactgcatcatttctctgcgtttatcgtagttgatgcatcactatcacactgtaatagcttattactggtttgcagacaggtaggcatgaacagatacctgcgcatgaagacggaactagtccagatgtgatatttgtggtgatcacatacatcatcaacgatgctcgttatggtgagtttgatgactacccgctgaagtgaaaattgtgttgtgtaccaaattgcgtaccaaactaaaatcacaaatcatgaaacccttgttcatggcggttctcaggggtgtttcgcgtaatcgtgaaacaaaaaggtagattgttgcttaccgtcattcatcattaggttaaatccgttatttctgctgtctgccagagtatcaaatatcaccgtgctaatcagctttagcgcaacaatttgacagcgagtggcaacagatcatgtcagataaaaatgagagagtagtcacattttcttgcactttattccagccagttcataagtatttccgtaaaaagaacagctatttgaaactcctgagggtttgctgttgaaacgccgtcttattattgctgcttctttgttcgtttttaacttatcgtctggttttgcggcggaaaacattcctttttcacctcagcctccacagattcatgccgggtcctgggtactgatggattacaccaccggtcagatcctcaccgcgggtaatgagcatcaacagcgcaatcccgccagcctgacaaagctgatgacgggttatgtcgtggatcgcgctatcgatagtcatcgcattacgccagacgatattgtcaccgtggggcgcgatgcgtgggcgaaagataatccggtgtttgtcggttcttcactgatgtttttgaaagagggcgatcgcgtatcggtacgtgatttaagccgtggtttaattgtggattccggaaatgacgcttgtgttgctctggctgactatattgccggtgggcaacggcagtttgttgaaatgatgaacaactatgccgagaagctgcatctcaaggatacgcattttgaaacagtgcatggtctggatgcacctggccagcatagctcggcttatgatttagctgtgctttctcgtgctatcatccacggcgagcccgagttttatcatatgtacagtgagaaaagtctcacctggaacggtatcacccagcaaaaccgtaacgggttgttgtgggataaaaccatgaatgttgacggcctgaaaacgggtcatacttctggtgccggttttaacctcattgcttcggctgtagatgggcagcgtcgtctcattgcagtggtaatgggggctgacagtgcaaaaggtcgtgaggaagaggcaagaaaattactgcgttgggggcaacaaaactttactacggtgcaaattttgcaccgtgggaaaaaggtcggtacggaacgcatctggtatggcgataaagaaaatatcgccctgggaacagaacaagagttctggatggtactaccgaaagccgaaattccacatatcaaagccaaatatacccttgatggtaaagaactcaccgcgccaattagcgcccatcagcgggtaggggaaattgaactttacgaccgtgataaacaggtggcgcactggccgctggttaccctggaatctgttggggaaggcagcatgttttctcgcctgagtgattatttccaccataaggcctgacctttcttttgcagcagactggcaggagtgcgagtctgctcgcataatcaacactcattccttgtggttttaatattgcaactatactgtatataaaaacagtgttaatggaggcgtcatgaactacgagattaagcaggaagagaaacgtaccgttgcaggtttccatctcgttggcccgtgggaacagacggtaaagaaaggctttgagcagttgatgatgtgggtagatagcaaaaatattgtgccgaaggagtgggttgctgtctattacgacaatccagatgaaacacccgccgaaaaattacgctgcgacaccgtcgtgacggtgccgggttactttacgcttcccgaaaacagtgagggcgtcattctgacagaaattacaggtggtcagtatgcggtggcggtagctcgtgtagtcggtgatgattttgctaaaccctggtatcagttctttaatagtctcttgcaggacagtgcttatgaaatgttaccaaagccctgcttcgaggtttacttgaacaatggcgcggaagatgggtactgggatatcgaaatgtatgttgcggtgcagccaaaacatcactaattcatctcagggcggtgtgttgacgcgaagaccactctttttttgaaagcgaaaagagtaagatgcgcctttcaaatttttcgctcctgccgggaaattacactgttcccggtatgtccgtcggataactcagaggcgcgccttctggccgacagatgtgttatgagcgcttttaatcttcattacggagtttctgcgtgcgtgccgataagtcattaagcccgtttgaaatccgggtataccgccattaccgcattgtgcatggtactcgggtcgcgctggcattcctgctcacttttctcattatccgcctgtttactatccctgaaagcacctggccgctggtcaccatggtggtgattatggggccaatctcgttctggggtaacgttgtccctcgtgccttcgaacgtattggcggtacggtgttgggttcgatattaggtcttatcgctctgcaactggagttaatctcgttaccgctgatgttagtctggtgcgcggcggctatgtttctttgcggttggctggcgctgggcaagaaaccgtatcaaggattattgattggggtgacgctggcaattgttgtgggttccccgacaggtgaaattgatacggcgttatggcgaagcggcgatgtgatcctcggctctttactggcaatgttgtttaccggtatctggccacaacgggcgttcatccactggcgcattcaactggcgaaaagtctgaccgagtataatcgggtctatcaatcagcattctcaccgaacttactcgaacgcccacgtctggaaagccatctacaaaaactcctgaccgatgctgtgaaaatgcgtgggctgattgcgcccgccagcaaagaaacccgtattccaaaatcgatatatgaaggtatccagaccattaaccgcaatctggtttgtatgctggagttgcaaatcaatgcgtactgggccacgcgccccagccatttcgtgttattgaacgcgcaaaaacttcgtgatacccagcacatgatgcagcaaatactgctgagccttgttcatgcgctgtacgaaggtaatccgcagccggtctttgccaatacggaaaaattgaacgatgctgtggaagagctgcgtcagttgctcaataaccaccatgacctgaaggttgtggaaacaccaatctatggttatgtgtggctgaacatggaaacggcacatcagcttgagttgctatcgaatctgatttgccgggccttgcgcaaataattcctgaacttcagaatcattttgctgctgcttcgattcagcaaggataaagggtatgatagtgaaaagggataaaagcattgtcatctgcggcagctatgagtaatgttggccctaacgaatagcggttgcttaaacgaatccgactctcacattatcaggggtataaaaatggaaactaccaagccttcattccaggacgtactggaatttgttcgtctgttccgtcgtaagaacaaactgcaacgtgaaattcaggacgttgagaaaaagatccgtgacaaccagaagcgcgtcctgctgctggacaacctgagcgattacatcaagccggggatgagcgttgaagcaatccagggcatcatcgccagcatgaaaggtgactatgaagatcgcgttgacgattacatcatcaaaaatgccgagctctccaaagaacgccgcgatatctccaaaaagctgaaagctatgggcgaaatgaaaaacggcgaagcgaagtaattcctgttttattcaatgagggttgcccggcaaccctcattgctcattgattcttttctgtgtatcaccgtcatcattctcatctgataacctgtcgaaattagcgacagccttcttctgtatgcagcaaggctaaaagttctgccactccatggttattaaccgcactggttactaacacgttgtgcgctccagcttcccgtaaccaacatttcaccaaagatatttgttccatgctggctaaatctgctttggttactactccaatgaccgggcgattcattgacgaggtaaagcctggcgaaaaaggtgaccacggtgcgtccgcattaagcaccagcgcgataatgtccgcttcgcaggcactgaccaacagtgcactgtagaggctgcggttttcgaggtattcgcctggtgtatcaatggtggtcggggaccagacgattgcctgcgttttctgataatgaatattttcgccacgcagacattgcgtgagtgacgtttttccgcactggctggggccgatgagcatcatacgttgcataacgtcaggtccgcgtaatggggcaggcggtaaagcgcatcatttcacccagcgtacgggtaacctggctaagtgcatattcaatcgcagaaacatcaccagtcagcactacggcaccggtaaaacgatcaagaaaaccgatctctacagcgcctgattttgtggcgatatcgcatgcgatgatagatgcttcgctgggggtaattgtcagaataccaatagcggaaatggtgtctggtaaacccaatttcttaaacagatccttccctggattggcaatgacatgtgccagcgtgacctgcttaccagggacatattcctgaatcatccgttcagttgtgtgctgagttgtcattatccctccaccatctgacgccacatggcttcatgtggacgggcaatcactgaccgatagaccaaaaaacctttttcccccgcacgctcgctggcgacagagaccgcgttattaacatctgaaatatcgccagcaaccaccatgtagcatttaccgccaatgccaaaagccatatgtacgcgaacgagaatgacattcgcagctttgacagcacaatcggcagcgtcaatgcaggcggcgacactccaggtttcgactacgccgatagcccggtgctgttcaacatggttaagtccgctgattgcagaaaagaggctgggatgaatattcggcaggacaagactgtcgaccagcatttcaccagcaagggacgctccgctgttgatggcctgttgcaccgcgcccacatcgccaccgagcatcagcagaaattttccggggcatagcgttttgctgaccagtaactcaacgttggcgcttttcagcatggcgtcgccggtttccatccctttcgcgatactgctaagttctaaaatacctaccgctttcgacatggttaacctctcacaagcgtaatcgcgttttctgtcacatcgctgaccatgccatcaatactggcatgaatgggggcacctaatgtgccgtgtggaatttgacctacacattgcccatgaacgacgcgatcgcctttttgtacacacgcaattgcgctggcaccgatgtgctggcgtaacaataacgtcactttttcgggctgaggcacctgttcagacaatggcgcatcctgataccacggggttaagccaagtctggttaccagccgttttacgggaatcagtcgataatttgccatgggatctgcaggatttaaggtaccttcgtaacggagattttgtgcgcgtaattcctgcttaagcaggcggtttatgcgcattggtgaaattcctaccggacaggcgacgctggcgcagacgttgcactctgaacaggtgagcgccgtcagtaacagttgcggcgtagcgagctgttggtagttaaccgcacgtactagtaaatggggagccagttcgtggccgattaaatgacgtggacagagatcggtacacaagcggcattgctcacaaacagttttcgcgacggcaagtacgctgcggtcattctgcattcgacgttggatcagtgaatgagagttgggtaaaaccagcaagccgccagtggttttgctgactggtgtgtcgagcgatgtgatcaaacttcccatcatcggcccgccattgataaaaccaggagcatccactgttgcgccgcccgccagcgccaggacttcacgtaaagacatgccgatggggacggttaccgttattggtttcgccactgcaccattaacggtgagtgtgcggcgcgtcactggatactgttgctcgacggctctggcaatattaagtacggtttgaacattattgaccaccacaccgacgctaacgggtaatgcagcgggtggaacgcggcgaccagttgccatccagatggtcagcacttcgtctcctgcggggtaaacgtcgggcaaaatatgcaggcggatatccggtggtaacagtggtgtgagtgcgtttattgccagttgatatttctctttcagcgcgatgattccgctgctggccccggtggctttcatcgcatagtgaacaccgcgaagcaggcggctggcttgctgcgccattaactgttgatccactttcaacatgggttcgcattccgccgcattcaccaggaaagtgtcaacacgcgcttgtagcttaatatgggttggaaaacctgcgccgccagcacccacgacacctgctgcttgtactcgctcgcggatggtctggtcgtcgcaggaggttaatccgacgttcataacaactcctcgagcagttctgcaatcgcggaggcatcagccgcacgcgggttggtatgcaacgttgcatccgccagtgccgcctgaaccatatctggtatgcataatgaccattctgcttttttttctttcagcgcattggcaagagtcggcagcttacaggttgttttaagctgctcaatatgttgaataagtgcattcaggctggcggtgtcattggcgttgtccgggcataattggcacgttttcgccagccgggcgtagcgtttggcagcgcgcggatcgccagcattaaagcggataactgccgtgagcaggagcgcattcgccagtccgtgcggcagatgaaactgtccgccgagttgatgagcaattgcatggtttaaaccgagtccggcctggctaaaggccattcctgcaagcgtcgatgcattatgcattttgccacgggtggcaagacaatcgccttttttcactgcagtgggcaggtattgaaaaacaatttgcacggctttttcgaccagtgcatccgtgaagtcgctggcgcgaggagaaacataagcttcaagcgcatgggttaaaacatccatcccggtattggccgttatcgccggtggcacgctgacgaccagagatggatcaaggatcgcgatatccggataaagtgcattatcgaaaaggggatatttaatccctttctcaggatcgctgatgacacaagcactggtcacttcggaaccggtaccgctggtggtaggaatggctacgcaggtttcaatttcaatgccacactggcgaccgaaccagacaatcgcttttgcggcgtccagggcagaaccgccgccaaaaccgataaccacatccgggcgtaaagtctgcatttgcgcaatgcctttcaccacggtctggatagttgggtcgggcgttatttcgctaaaaatactaagacgattactgtcgggcagcgcctgatgcaacgtgttaatgagtagtgagcgtgccagaaagacgtcgcaaataatccagatgtgtttatgagagaaacggctaagtaccttgagacttcccggtccgctgtataaacgcgtctgcagtgaaaaagtattcatttccgtttctctagcgaattgaaaagccgctggttaacacgcagcgtcgtgagcgggcaaaagtccgtgctgacgttgtcccttctccggtcggtgtagcaatggtaaaggtcgtaaagccttcgccgccgacgccaatacccgcccaggaggggccgtttttgacaaagattgaggtttgcataacgcgcgcagcaaggttgagccgtgagacgttctgcgagtgcataattgccgtgtggtgcaagccgtcttccactttcaacgccagagtgagagcgctgtcaaaatcgttgaccttcacaatgggcagcattggcatcagttgttcacaagtaacccaactatcattggcgtcgacaacagcaatcagtaggcgcggcgcttttgcgggcaaagggaggcctgctgcttccagcaaggctgatgggcttttcccaaccagttttttgttggcgctaccgtctggcaggcaaattgcacgcaatttctccgtttgctcatagttaagaagaagcgcgccaaaactttgcatctgctgaattaaatactctgccactgatgctacgacaatcaggcttttttcagcgatacacggcaggttgtaatcaaatgaagcgccgttgatgatatcttcggcggctttcacaatatccgccgtttcatcgacgatacacggagggttacccgctccggcaccaatcactttcttgccacttttcattcccatggcgacgatccccggaccgccggtaatcgccagaacgctgattttagggtgcgccatcatctgttcggtagcagcaaaggtcggttcagatacggtaacgatcaggttatgaatgccactacagcgaaacgcgatgtcttcgattgtggtaatcagttttaacgaaacgtatttggctcccgggtgtggactgaagtagacgctattacctgctgccagcatgctgatgctgttgttaatgatggtttccgtggggttggtgcttggcgtgaccgagccaataaccccaaacggggagtattcaaacaaaaccatgccaccatcaccggttagtgcagtggtggttaaatcttcaattcctggcgtgttatcgagtgccgctttgttttttaggtacttatcttctttatttcccatccccgtttctttggcgctttcttctgctagttcggtaaggcggggcattaattcttcgcgaatggcgctgataatggcgctacgggttttcagcgggcactgttgaaagcgtaaaaaggcctggtgtgctgcgcagaccgcttcatcaacagtctggaaaatagcgtttctttgcattcgtggtgtagcggggacaagttgttcacgcagaatattgcggatcagtgtttctaattcagagttattcattggtttactcccacgttaattgccgccattgcgctttgggcaatatccatgtcttgttcaacgctaccgccgctgatgccaagcccgccaagcaatattccgtcacgccagagggggaagccgccaccaaaagtgacgactttgccttgcatatggctttcgagcccgtaaagcggcgcgccgggttgcacggtatcagcaagtttgtgggttgccgttttcatcgccacggcggtccaggcttttttcggtgccagttcactgctgaccaacagggcatcaggcatccgccaggtaacactttctgttccgttggcatcaacaatgctgatgacaacgggaatatgcagttcatctgcgcgcattgccgcactacgaatgagctggtgaagatcctgaaaagtgagcggcattgtgcgttccttcaatgctggtgtgtggttggcttcgtgataacgttttgtgatttcctgaatcatcaggttttgatgagcaacgttgtcttccacgcgggcgagggcatacagacaatcggaaagtcggttgatatagtgcagcaaaacattccggacggtggtttccgttgtcagttcaaccagacgtctttcagcccgtcgagccactgtgcgggcgaaatgcatgcggctcgcggcttcacatcgaccaggcagaatgaagctgtgaactggggggacggcgttcattgcgctatcgatcgcgttttccagcgcagcaatttcttccgtactgatgtaacgctgctgcgctgacggctgttcgctttcactcgcgagctcggcgctaaaccaaaatatctgttgttgaatggcttccagtaagatgcgatggctttcgatggcggtggcgcaataacacagactgagtgtcgcgttcagttcatccagcgtgccataggtttcgacacgtagatgagttttgctgacgcgctgtccggtaaataaagacgtacttcctgaatcacctgttcgggtataaattgccatctttcagctccttagcgcgaaagcgtatcgacaatgccgaccactgccaggtcgatggcctcgttagggcctgaaaacacatgtctggcgctggaaccactgctgaggagtaccaactcaccaacgcctgcgccgactgaatcaacggcaacttcgtcgccggttaatggcgtgagaggcagttcgccgtcagcactgatccggcgaaccagcagcagttttttcccgatcagagaaggtgatttttgcgtggatactaccgcgccagtgactcgagccagatgcataggttactcctgcctgattaactgaatatttcgggtaattgccgcttcacgagccagtgcggtcacacaacatttccgctgtaaaaccagtattcccgagcttaactgtgcgatatcggcataacttaaaagtcgattatgatgaaggtagatcggctgcccttgttcgtcgcaccagcttagcggtagacgggcgagagtcttcaattcaatggcgttcaggaaatgacgctgcaacgacaattgaatgtgcaatccccaggctaacgcttcgtgtatctgaattgctgctcgatctgacgtttcgttctccgcaagttgtcgcagcagcggcagatcgacatatcggatttgtaatgacgcatactgatgaacgctctcttgaacgctggcgtctcgcagttgaaaaacagtcagcacgagtgtttttcccgcacgttgtttaaggcgaaaaaccacttcgtcaacaatacgttgcatcagcatgttattcatggcactgacaccagtgtggcaaaaacgtcagggctatcagcgcctgcggcgttggcctcatcggtatcaatatgcatttcaagacgcatatccggagagacgcgaacagtgacgttttcgaatatcagtcgtcgctcatcaccttcaatggcgaccgccactttatcgccatgcgtaacgccataaatcagggcatccagcggagacatatgaatatgccgttgcgcgacaatgacgccagatgtgatctccagttccgcaaatgggcttatcaaacgaatccccggagtgccgctgagatcgcctgacatgcgtagcggggcggtgatccctaacgttctggcgtccgtccgggaaatttccacctggcttgcattgcgtaacggccccaacaagcgaacgttgtgcaatttgccttttggtccctccagcgtaacaacctgttcagcagcgtattggccaggttgcattaacggctttttctcgctaatcggttgttcaggaaaaagacgcaaataatccgctgatgaaagatgtatatggcgactggaaacgcccagtgggatagggcgctcgcgcatctcatccagaatctggctcactgtttcctgcaaggtttgtttatccactgctactcccctcgcttgttggcgtacaggcaaagtgagcggggctcacctttttgccgctgacatgccgggtcaagacacaaattacaactgataatctctgaggtgacggttgttgctggtgttttgcttgtttcaaccgtcacggtcaatgcttcagttgtgtggggcagaatgccgtctcccgggcgggcaatcactttgtgtgcgacaaggccatttcgctgtccggcgaaactggctcccgtcgcgatcgccgcattaaccgaggcgacgtcaccggtgattttgatgagcgtccagcctgagccattggtcttctcaaggccaaccagcgtgatggacgcggcttttgccatagcgtctgcgcaactgatggcgagagccagaccactgacttcaagtaatcccagtgattgcttcacgctgtgctccttagcaaatggggttatgccgatttaggtaaaatagcctcaacatcactgtgtgggcgcgggatgacatggcaggatttcacttcgccaacggcgcttgccgcagcgctccccgcatcaacggcggcctttactgcgccaacatcaccgcggaccatcaccgtaatcagacccgaaccaatcttttcatagccaaccagttgcacgttggcggatttaaccatggcatctgcggcttcaattgcgccaactaacccttttgtttcaaccagtcctagtgcgttgttcatacagcgtttctcctgtggattatgagtggcattccctgaagggaatgccttttaccaggcgggcagcgttattgccgatgctgcgccgggcatggttatcttgttgatacatcagcgtaaacagtggcgctgatgccggtaagtttttgtaatgcacaatcagcttttcccggtcgcaggctatgccaaccaacaggggggactgacgagcagcctgccaggcgctatcgatgacttcacctgacgggatatgttgaatgcgaaaggggataccttcctcttcaatgccaagaagcacctcattccatgtactgatacagtcacctatttccgtaacgacaatagcgggcgtatgttctttactttccatgagccaactccctgtgccaggaaatcagtagcccggtagctaccgcattgcgcgggccttcactaccacggatattcccccgtccggcgaccaatcgataatgcgccaatgcatcggtgactaactgcggtacttcgaaatccagggaagaaccgcccaccagaacgacgaacggaatatcgcgaatatttccgcctggacttacctgacgtagcgcgcgcagggcattggttacgaagacgcgctctttcgcactgcggcgaacagcacgtactttttccagtgttaaatcgccgggaataggcaccagttcgtcaggtttcaccacacaaacgcgggcaaatacatgaggggacagcggagtagggaagaactgaacgctgccgtcttcatggcgtaaatggaacaggctttctacttttgccaacgggtattttttgatttcttctgccagataacgatcatttaagcccagttccctggcaataatcatcgtcaccatgtcgcccgctcccgcaaggtgagtagctatcatttcccctttctgattgatgatggaggcatcggtagagcctgcacctaagtccagaattgccagtggacgtgtggttccaggggtagtcaaggccccctgaatggcggcttctgcttctgcgcctccgacctgaacatcaacatgcagtttttgcttaatttcactggcgatcatcgccatttgcagacggtcggatttcaccatagaggcaatacccacagcctgttccagtgaaaattcacctgccagactaccggttacgctgacggggacagaggtatctatcgccagcaaatcctgaataaaaatttcgttgctgggtttgttggtcagttcagccatggtctggcgaacatgttccagcattccgccgatgttggtgcctggttctcccgtcacgttttccagttttgggcactcaccgaccgctttcataatggcatcggcaccagcagctacatcaacgcgcgttgtgcgcccggcagaaagcagttcgatatttccggcgggtatcgaacgggctttaacgtcgccagagggcgttttcactaccactgctgaacggttgccgattagcgcccgcgcgacaggaacaatatttttagtctcttcagcattgagggcgaatacggtggcaatcccatacgggttagacagggtttcgataactttcccgggaacggcaacttcaattgctgccagcatgccgagcggaatacgatcgatgtagaggacttcatccacaataggtaaaggaatttccaggcggttattgaccagtacgccatcgtcgcgttgcagaataacgccagtcagctgatatccggcgcgtacggaggcgtttatcatcgtcgcgatatcggcaaaatcaaatgccgatgacaccaccaggatgtaaggtgtgtccgccgggcgtgttaataactcttgcggagtgatggtgagccctacgcccagccccactccgcccggagttttcgggttgtgaccgatcatggttgattcggtgatgatagtttcagtgatggtttccatcgccacatcaccaatgaccggagttgcttcgttgatacgaataagcgaaatatcgctaacattgatgccgacttttttcgttgcctgtgcgagcgcctcctgaataccatggacgttacgcaacgtacctttgattccggtggtttccgccagggcgctactcacgaacgacaactctccagttgcactgagcgttgccagcgcaacctctgttgatgagttgccgatatcaatgcctgctatatatcgcatagttcgtccttaatcgtcgcctttcagttttttgcgctcgacataaagttccgcagcttcacggacaaatgcagcacaaattttggcctgataacgctgttcaagatcgtcagcaatggcaataagttcttgcttagttgaacgataagggcgtaacgcattgtagatttcgaggatgcgatcatctggtactgaggtaagctcagcggcgcgttcaaaattcatcgccagacgatcgcgaccagcatctctggcaatcgcagcctgaatacgcaatgtttcaggggtaatgcgcatatccagggcggtgacgttatcgcttagcacattttccagagtgaaatcgtcgagcgttttattggtcgctgttttaacccattccggatgtttatttgccagcgggtaatccgtcactttggcgctcagtattgatgcgttggggaccgcagaaacaggagctgcatcctgtaaactgttcatgcggttcaacacgtccctgaccatcgactcaattgcatcggtattcatgaaggtttcctttgttaaaacgtcacgcgcagttcttgcggttttttgccagtgaccacgtacttcgtctctttaatatgcaaaatggcagatttggcctggtatttcggccgcgccatttgatcgttgagggtcggcaccggttgtggagactcgcgcttcgcataacgcgcggcgtttttgccaatctgacgataagtatccagcgtcaacaaaggcgcttgtgggaaaagttccaggttagacaagggaggaagtccctgctggtggataaccgttgtgcctttcgactgaataccgatagcaatacctgaaccactaagacgatcgccttcgactgctacgaatgcgacatcggacgatttaaagcagcgaatcacacgggctttaatgccttcttcttcgataccggcaatcacttcgcgcaagatgtttttatgcggaataccgatgatattgacggtttgcgccaggccgaacgccgggcctacagcaataatgacttcatcttgctgagtgccttgttgggcttcgccaatttcggtcagaaaatttccggtatctggcgcggaagagacagttgcagagacaggtgcgcgaaatgaaacggacttgtcgctgggttgcatttctgccagcacgtcttcgataatctgacgcagtaatttttcgttaatttccatttctcacccttagtcaatttcgttgggatcaagtgcaccgggaatatttttgatctcttcccagcgttccccttgcaggcggtaacctgtagccggtccggcgtaatcattgacgtcattgaccgcagagagcacttgtccgtcatcgacgatgatggctgaggtatggagataatcgccggtcagttttgctttttgcatgttgagcatgtcctgggcgacatcggtaaaaccgccttgcgccagggctttcaccacttccaggctgttccggtttttattgataatctcctgggcgaacttgatgtcttccacaatattgcgctcaggcatatcttttgaaccgtgggcataggttgccgcttcgacttcttcatcggtaataggcggtagtcccataccggcaaagacagcctgtaaagcgcgagcggctttattgcggatagcgataacatcttcttcgcgtactggtcgcagcccaccatcaaccttcaggtcacgctgaatgacgttgtaatcatcgaagtcttcagcatcttcgtttgaaccagcaaacatgttgtcgtagttcggcacagcggaaaaaccggaagagataaagtcggtgcctggcagaaattgcatcaggaaacgtgcggtacggcgcatatccgagtgggtaaaggtctggtcattactggaggcgcattccagatccagcgatgagcaaattaagttttccgctaatactgcgcggatgcctgatggcacagctgatggaacaccgatgcagcttaccgaaccattctgcagaccctgaacgcctgcggctttggtgatgtaaatgcaacgagcctcgaggtaaagcattgatttgccttccgcgtaacccatctgtacttcagagccggagccggaagtaaagcgcatttttaagccacgagaagcataggatgacgcgagaaacccttttgaccacggggtatcatcaccatcggtgaaaacaggttctgtaccatagacagaaattgtttcggcgtaacaggtgtggcctaacataccgagtttcagttcggtggcttcttccagtgaacactgggtcaagacgcccggacgtcccacctgtgagccgaccagcagggcgatggcgttgaacggtgcatagcgagcaacggcaacggtggtttcctgttcatcaaacccgcgccatgcgccttcagctgcgtcggcggcaatttgtactgggttatctttgacgttggtgacatgagcctgttgtgatggtgttcgacgggcgcgcattttctgcatcgccatcatcatctctaccacgttcatctgcgaaaccacttcgacgatttttgcaggcgtcattgctgtggtaaggggaacgatatcgctacgtttgacatttggatcgcacaacatattggcaagttttaccgaatccatcgcgatgacttcttcggcgcgcgcgagattgatgccgtagcgggcgataaagtggtcgatcaggtcaaactggctggcgggttttccatccagttcggtaacgacgccgttaacaattttgattgacggtttaggatcgttcgggctttccatcgcaataaagccttcttcaatccactctttaacgaaaccgtcctggttgaccgggcgttttgccagtgcttcaaatcttttcgatctcataaatctgcctcagagaattcagatgtaggaagggcgatcgtttttcggtgtatcgccgagagtcgaaagcacggttttaccgatttcgcgtgcggagatgaccgcctggcggactgcgccggagtcacccgagataattagaatgacttcattgctgtagctggtgccttgagctggggagctgtatgccacaacatccacattggcggacttcagcgcggtgtcggccatcagaacacccacagcagccggagcgccgacaataacgccgcaagcccgtccctgtggtgcaccaaacgctttttccagtgcatagctggcgcgggcggtatattgcagttcaagatgtccggcttcgttggcatagacatcgccaaaggtccgatcgagttctttcagggcgacttcaataccgcgtttcacgtcagaaacatcgttgccacctaagaggatcaatgagccatgtccggcaccgcctttagtatcccgaggaagttcaatgctaataacttcagtgttggtggcttttaccgcttcatcagcggccataatgtgtggccctgcgccaatacgcgcacccagaatgccaatggaacgatagcgtttttcaagtttcatcgcgtccaacagggcgctatcaacgttcgcaatgaccagacctacagtgtcgccaatagcggtgccaacaaattccgttaacgtgcagcttttttctgccatagccgtctctcgtgtttgatgagtggtttccgggagaacctcatgctctggcgtcgctacgcgagcgatgacctgcgccatgatctgttcgaccagttcattgctgctcatgggttaattccctttggtaagattttttcgacatcggtatgtgggcggggaataacgtgtacggcttttacttcaccgacgttacgcgcagctacggcacctgcgtctgttgccgcttttaccgccccgacatcaccacgaacgatgacggtcaccagcccggaacctattttttcgtagccgaccagcaaaacatttgccgacttcaccatggcgtctgcggcctctatggcggcagttaagcctttggtttctaccattcctaacgcttcttgttgcataaagacctcgcctggatttttttgacgatatgactataaaaaaaagcgaggaaaaagaatggctgacttaatcggctaatgagaaaaattaatagagaacaaatattataaaattgcttttatgaactatatgttgttaatttattagttgttttgtggatatttcaatgtgaattaattgcgttggctagtgagtttaatcgcgagtaatatttcgttgagtttagttcgaggaaggaactgtgatatttgtttcaattttattatatcatgatggcaattttttattgtgaaagtttgacagtaattattactttcaacactgattaacgctgtgttgcatgattcggcaatgacaataatttgttatgttagcacgatttttacacgagtctgtcatgcatgttggcaatattttctgcagagcaattttttatagttgcgctcggtatacacaacaatcagagcatagttggctgataaagaaaaactccgtaaagaaggtgtcactatgaatgattcactcaaggcgcaatgcgttgccgagtttttaggcaccggactgttcctcttttttggcattggttgtttgtgcgccctgaaacttgctggggcaagtctgggactgtgggaaatttgtatcatttgggggttagggatttcgcttgctgtttaccttacggcaggtatttccggcgctcatctcaacccggctgttaccattgctctgtggctgtttgcctctttcccagcccgtaaagtgctgccattttgtgtggcgcaattagcgggtgcctttggtggtgcggttctggcatattctctatacagtagtctgtttaccgattttgaatctgctcacaatatggtgcgtggtagcgcagaaagtttacaactcgtcagtatcttcagtacttatccggcagcggcgattaatgtatggcaagctgcgttggtcgaagtggtcataacgtccatgttaatgggggtgattatggcgttgaccgatgacggtaatggcgtacccaaaggaccgcttgcacctttacttattggtattctggttgctgttattggtgcttctaccggaccattaaccggttttgccatgaatccagcgcgtgattttggacctaagattttcacctggcttgcggggtggggagaaattgcgatgactggtggacgcaatattccttatttcattgtacccattattgcaccgatcattggggcatgtgttggtgcggcgatttatcgctatctcattgcaaagaatttacctgtcaatagtgttacacctaaaggaattagcgaataacgaaatactctggcagttataaacatttatttttttactgtttgtgatctgctttccgaacttattaaaaagtctcccgcttcacggaggcttttgttattgtcctttgtgcttctcgtcagtaaatcatcagggatgatgtgaagattaaatgtaaaacaattgttttgctataacaataaattaactgggaggttttatcatgatttctgcggcgacacttaattcagaactcattaataaaatcgcgcaggattttgcgcaggcgaccagccttgcggttgtcgtggtcaatattcacggcgatgaaatttccgagctgtttaacttcactccattttgtcagatgatgcggcaacaccctcagctaagcactcgatgtcgcatgagcgatcgttgtgggggcctggaagcctctaaatccgatcagccttgtatttatcgctgtcatgccggattaaccgatttctctattccactggtaatcgccggacatttagtcggttttgtattgtgcgggcaagttcgtctgcgtaatgatgatgtcgatttggtcgatattctgaatgtcgatgattgctggcaggcagatcccgaattacttaatgaattccgcaaagttcctgagatggattactcaagagttatggcctctgctgatttgttgaagttgattgtggaaaattgcctcaaaaaacaactcaattttgtggttattaaagagaacaaatctcggtcagattcggtgcgccagactcgtgcgcctaatccccacgacaataaaatgaaaaaagctttacgctatattgatgcgcatttatcagacgatttgcgtctggaagatgtcgcctcgcacgtttatctaagtccttattatttcagtaagttattcaagaaataccatggaatcggttttaatgcgtgggtaaaccaacaacggatggccagcgctcgtgagttactgtgccatagtgactggagcatcgccagcattgcgcgtaatttaggtttttcgcaaaccagttatttttgcaaagttttccgtcagacttatcaggttacgccgcaggtgtatcgacagcaagtgagtgaaaatgcggcgatggaaacggtatagaataaatgctaaaaaaagggaaggtttaaataaacgctggaatgaataattaacgttatttacgtgttatgggaaaagtgaaatcagctcataacatacgctgacaggtgtggcacatttgtgcctgggaagagggtgaaaatccctcgcagcccccgctgctgtaatgctgacaaacccgaaaatgccactgatcgcgagattgggaaggtcgggtgaggatgacgctaagccagaagaccagtctgtcagtcaataccaacaacttcggtgggaagtgggttgcccggaagcgtccggtagagtactggcgcgtctttatacccctaccaccctgaaaggatcagggtatggcggcatcatttagttctttcatcgcagtgccgacaggcaccagggctgcattcaaggtgtggcaatattgtttcatggcttatcaaccagaccgccattacaggaaattaagtggagggcgagaggcatgaaaacgataaaacccgaatcgatagctcttttttgcctcttatctggagatgtggatctggcgaaacatctggctgaaatattgccaataacctgttttgttggtgaggactggcagcaagatttccagcctcttgatggtgggcctgtgcaatcgttatcagatgcgtatagcgattattcagtgctgctattgatagcagctgaaagcgagatatccgtaccagaatggctcgctcattctgagggaatgacggtaattttgattgcagaacacaatgcccgtttgctgactggtccggctggtggggctgtagcattaatccattatctgaatgaaatctgtcattccagagaaaccgctgtcaatgacgcattttgtcagacgttaacacgaggaagtctggctattccacatagccatcttctttcgtaatggattgagaatgctggatttttaattatattacgcgcagtattaatcgcgtaaatgttttgcggtcagcaacggtgggggatccattgttctgttcaatgaataccatcatacaattgaatcaggagtcggtatgatgattttggtgacggggggcgcacggagcgggaagagtcgccatgcagaggcgcttattggggactcttcacaggttctgtatatcgccacctcacaaatccttgatgatgagatggctgcacggatagaacatcatcggcaaggccgcccggcgcactggcgcacggtggagcgttggcaacatcttgatgaattaattcatgcagacattaacccgcatgaggctgtattgctggaatgcgttaccaccatggtgactaatctgttgtttgattatggcggcgataaagaccctgatgaatgggattatcaggcgatggaacaggcgattaatgctgagattcagtcgttgattgctgcctgccaacgttgtcccgcaaaggttgtattagtgactaacgaagtgggaatggggattgtgccggagagtcgtctggcacgacattttcgtgatattgccgggcgggtaaatcagcagctggccgctgcggcaaatgaagtatggttggtggtttcgggtattggagtaaaaatcaaatgagtaaattattttgggcgatgctctcttttattacgcgtctgcctgtaccgcgtcgctggtcccagggactggatttcgagcattattctcgcggtattattacttttcctttaattggattattgcttggcgcgattagcgggctggtcttcatggtgctgcaggcatggtgtggcgtaccactggcggcactgtttagcgtgcttgtgctggcgctgatgaccgggggattccacctggacggcctcgccgatacctgtgatggcgtattttctgcacgtagccgcgatcgcatgttggaaatcatgcgtgatagccgtttaggcacccacggcggtctggcattgatttttgtggtactggcaaagattctggtgttaagcgagttggctctgcgtggcgaaccgatccttgcatcgctggcggcagcatgtgcggtcagccgcgggactgccgcattattgatgtatcgtcatcgttatgcccgggaagaagggcttggcaatgtgttcattggcaaaattgatgggcgacaaacctgcgtcacactcggcttagccgctatttttgctgccgtattattgccgggtatgcatggtgtggctgctatggtggtgacgatggtggcgattttcatcctcggtcagcttctcaaacgtacgctgggcgggcaaaccggcgatacgctgggagctgctatagagcttggtgaactggtcttcctgctggcactgctataaagagacgtgacatgcaaacacttgccgatttactgaatacgatccctgccatcgatcctgccgcgatgtcgcgtgcacaacggcatattgacgggttactcaaacctgttggtagcctgggaaggctggaggcgcttgccatacaactggcaggaatgccggggttgaatggcataccgcatgtgggcaaaaaagcggtactggttatgtgtgccgatcacggcgtctgggaggaaggggtcgctatttccccaaaagaagtgacagccattcaggctgaaaatatgacccgcggaacaaccggcgtgtgtgtgctggcagcacaagcgggcgctaacgtctacgtaattgatgttggtattgatactgctgagcctatccccgggcttatcaacatgcgtgttgctcgaggtagtggcaatattgcttcagctccggcaatgagtcgccatcaggcagaaaagttgcttttggacgtcatatgttatacgcgggagctggcaaaaaacggtgttacgctgtttggtgtaggtgaactggggatggcaaacacgacaccggcagcggcaatagtcagcacaatcactggccgggctcctgaagaagtggttgggattggcgcaaacctgccgacagataaactggctaataaaattgatgttgtgcgccgggcgattacgttgaatcaaccaaatccgcaggatggcgttgatgtcctggcaaaagtgggtggatttgatttggtcggaatggctggcgtgatgttaggcgctgcttcctgcggtttacccgtgttgctggatggatttctttcttatgctgccgcgctcgcagcctgccagatgtctcctgcaatcaaaccgtatctcattccttctcacctgtcggcagaaaaaggggcgcgtattgcgctgtcgcatttggggctggagccttatctcaatatggagatgcgtttaggtgaggggagtggcgcagctctggcgatgcccatcatcgaagctgcctgtgcgatatataacaacatgggcgaacttgctgccagtaatattgttctaccggggaatacgacttctgatttgaacagttaaaaacgaaaagtctgataaaagctatacttaacggatagctttcgcgacttaggaaagggacatgatgcgtcgtgtaaatattttttgctcatttgctctgctttttgccagccatactagcctggcggtaacttatccattacctccagagggtagccgtttagtggggcagtcgtttactgtaactgttcctgatcacaatacccagccgctggagacttttgccgcacaatacgggcaagggttaagtaacatgctggaagcgaacccgggcgctgatgtttttttgccgaagtctggctcgcaactcaccattccgcagcaactgattttgcccgccactgttcgtaaagggattgtggttaacgtcgctgagatgcgtctttattactacccaccagacagtaatactgtggaagtctttcctattggtatcggccaggctgggcgagaaaccccgcgtaactgggtgactaccgttgaacgtaaacaagaagctccaacctggacgccaacgccgaacactcggcgcgaatatgcgaaacgaggggagagtttgcccgcatttgttcctgcgggccccgataatcccatggggctgtacgcgatttatattggcaggttgtatgccatccatggtaccaatgccaattttggtattgggctccgggtaagtcagggctgtattcgtctgcgcaatgacgatatcaaatatctgtttgataatgttcctgttgggacgcgtgtgcaaattatcgaccagccagtaaaatacaccactgaaccagatggctcgaactggctggaagttcatgagccgttgtcgcgcaatcgtgcagaatatgagtctgaccgaaaagtgccattgccggtaaccccatctttgcgggcgtttatcagcgggcaagaagttgatgtaaatcgcgcaaatgctgcgttgcaacgtcgatcgggaatgcctgtgcaaattagttctggttcaagacagatgttttaagagcgttggtaattagaaagcaaaaagcctgctagaaagcaggcttttttgaatttggctcctctgactggactcgaaccagtgacatacggattaacagtccgccgttctaccgactgaactacagaggaatcgtgtgaacggggcgcatattaatggcagtgcatggtgatgtcaaagggtgaaatgcatttttttgtttgtttgctgtcaatttcaacaaagtggtgagctttcaatcttattgggtaatgaaccatcgtggtgcataccctccttttatagggcaggggaacgcgacagctgattaaaggagcaaatgacgaatctatcataatctcttatttgacagttggttagcttgtacatcaacgccaaaataaaactggcaagcatcttgcaatctggttgtaagtaatggcggcacttgggccgattcttaaaaaccggaggcaacatgaacttcagacgcctgaaatacttcgtaaaaattgtagatattggtagcctgacccaggctgctgaagtattgcatatcgcacaaccagcgctcagccagcaggttgccacactggaaggtgagttaaatcaacaacttttgatccgtacaaagcggggcgttacgccaacagacgccggaaaaattctctatacccatgcgcgggccattttacgtcagtgtgaacaggcccaactggcggtgcataacgttggtcaggcattatcggggcaagtctcgattggctttgcaccaggaaccgctgcgtcatccatcaccatgcccttattacaggcggttcgcgctgaatttccggagatcgttatctatcttcatgaaaatagtggtgcagtgcttaacgaaaaattgataaatcaccaactcgatatggcggtgatttatgagcattcccctgtggctggtgtatccagtcaggctttgctgaaagaagatctttttctggtaggtactcaagattgcccggggcaaagcgttgatgtgaatgctattgcgaaaatgaacctctttctccccagtgattacagtgctattagacttcgtgttgatgaggctttttccctacggcgactcacggcaaaagttattggtgaaattgagtctattgccacgcttaccgcagcgattgccagcggcatgggcgttgcagtattacccgaatcggccgcgcgttcgttatgtggcgcagtaaatgggtggatgtcacgcattaccactccttccatgagtctctctttgtcattaaatttacccgccagagcgaacttatcgccacaggcacaggcagtgaaagagttgttaatgtcagtgattagttctccagtgatggaaaaaaggcagtggcaattggtgagctaagtgttatatcggaatggaataagatgcgggtttttattatttgttatgccgggcattagactttaacaataacgggaaatctgaactgcccggagtttaccgtgaatttccaacaactaaagataatccgcgaggctgcacgtcaggattacaacctgacagaggttgcgaatatgctttttacctcacagtcaggcgtcagccgtcatattcgggaactggaggatgaacttggcatcgaaatatttgttcgacgaggtaagcgactgctgggcatgactgaaccgggcaaagcattactggtcattgcagaacgtattctgaatgaagccagtaatgttcgtcggcttgcagacctgtttaccaacgatacgtctggcgttctcactattgcaacgacgcatactcaggcacgttatagcttgccagaggtcattaaagcttttcgcgaacttttcccggaggttcggctcgagctaatccaggggacgccacaggaaattgcgacattgttgcaaaatggcgaagctgatattggtatcgccagcgagcgtttgagtaatgacccgcagctcgtcgccttcccgtggtttcgttggcaccatagtttgcttgttccacacgatcatcccttgacgcaaatttcaccattgacgctggaatcaatagcgaagtggccgttaatcacttaccgacaggggattacggggcgctcacgtattgatgacgcatttgcccgcaaaggtttgctggcagatattgtattaagtgcgcaggattctgatgtcattaaaacctatgttgctcttgggcttgggatcggattagttgccgaacaatccagcggcgaacaagaggaagagaatttaatccgtctggatacgcggcatcttttcgatgctaatactgtctggttgggactgaagcgaggacaacttcagcgtaactatgtctggcgctttctggaactttgtaatgcaggactgtcagttgaggatatcaagcggcaggtgatggaaaacagtgaagaggaaattgattatcagatatagcaaaaagcccgctataaaagcgggcttttcagaaatttggctcctctgactggactcgaaccagtgacatacggattaacagtccgccgttctaccgactgaactacagaggaatcgctgttgaggcacatcttaacggcgaaaaatcttttgtcaaacccgatttttaaattccccaactgtttgccgtttctatcaacagtttgttgcatttgcagacaatttgttggcgaaaatctttgcagctttgctgattctccctcattatttgaaatgtggtttcactttctgcaattaaggtcggctttgaatatctcctctgctttacgccaggttgttcacggcactcgctggcacgctaaacgcaagagctacaaagtgttgttctggcgcgagataaccccgcttgctgttcctatcttcatggagaatgcctgtgtcctgttgatgggtgtcctgagcacttttctggtcagctggctgggaaaagatgcgatggccggcgtgggattggcggacagcttcaatatggtcattatggctttttttgcagctatcgatcttggtactactgtcgttgtggcatttagtctcggtaagcgggatcgacgacgagcgagggtggcgacgcggcagtcattggtgatcatgacgttgtttgccgtactgttggcaacgcttattcatcattttggcgaacaaattattgatttcgtcgcgggtgatgccacgacagaagttaaagcactggcgttgacttatctggagctgacggtactcagttatccagcagctgccatcactttgattggtagcggggcacttcgtggtgcagggaatacgaaaataccgctactgattaacggtagcctgaatattcttaatattattattagcggcatattgatttacggccttttctcctggccgggactgggatttgtcggggctgggttgggtttaaccatttctcgttatattggcgcagttgcaattttgtgggtgctggcgattggttttaatcctgcgctaaggatttcgttaaagagctattttaaaccgctgaattttagcattatctgggaagtcatggggattggtattccagcgagtgtcgaatcagtgttatttaccagtggtcggttattaacccaaatgttcgttgccgggatggggaccagtgttattgccggaaattttatcgcgttttcaattgcggctcttatcaacttacccggaagtgcgctcggctctgcttctacgatcattacaggccgaaggttgggggtagggcagatagcgcaagcagagattcagttgcggcatgtgttctggctttccactcttggattaacggccatcgcctggctaacggctccctttgccggggttatggcatcgttttacacccaggatccacaggttaaacatgtcgttgtgattctgatttggctaaatgctttatttatgcctatttggtccgcctcatgggtgctacccgctggatttaaaggtgctcgcgatgcccgttacgccatgtgggtttctatgttgagcatgtggggttgccgggttgtcgtcggttatgtgctgggcatcatgcttggctggggtgtggttggtgtctggatgggaatgtttgccgactgggctgtgcgggccgtgctgttttactggcgaatggttactggacgttggctgtggaaataccctcgatccgaaccgcaaaagtgtgaaaaaaagccagctgtgtcggaataaacgacaaaatgcagattatttcagcaaacgatttcaaatttaaaaaacaggctttgacattatgggtgggcatcgctaatattcgcctcgttctcacgattcctctgtagttcagtcggtagaacggcggactgttaatccgtatgtcactggttcgagtccagtcagaggagccaaattttggttttgagacatctctatgagtctcaaaacagttaaaaaataaaaattatttttacccggttaccttgtaaaaaagtgaccgggttttttgatttctgtgtttcgtgcgcttaatcgagtctcacgcttcagtgagcaaattgcccctccccaacagacatcacgattcgcaaggtcaaaaactctgttccatgaagtaccgtacaaagataaagagaaaaatgccttatgcgggatgtcgctatcgcgtctttatcgggaaactatgcgtaattgccactttgccttctgtaatcagaaaaagaagaactggaattttaataaatattatttctctgggaacgaggggggtataatcaatatgacgagttgaatattatattttttataagaattatatgagattaaagaaatctgccgtaaagacagatttctttaaaatataattagagatttgcgacgttatgataaactttttgtacatcgtcgtcatcttcaagggcatcaacaagcccttcaaagatttctaaatcttctggggaaagctcaacttcagattgcgcaatcatttctaattctgttgttgagaactcagtgattccagctgcttttagagccgcgattcctttatgaaggtcagtaggttcggtataaataacaatgttaccttcttcttcagtcacatcacgaacatcaacttcagcttcaagtaaaatttcaaaaatatggtcagggtctgatcctttaaatacaatcacacccgtattgtcaaacatatagctgacagaacctgccgctccgatattgccgccttttttattgaaaattgtgcgaacgttagcaatcgtacggttaacatttgaagtcaatgtctcggcgataatcattgagccattaggaccaaagccttcataacgtccctgcacgaacgtttcatctccgccgcctttggctttatcaattgctttatcaataacgtgctttggaacttgtgcctgctttgcacgttcaataacgaattttaaagatgtgtttaattctggatcgggttcaccttgtttagcagcagcatagatttctacaccgaattttgcataaattttagacgttgcaccgtctttagccgtttttttagcaacaatattggcccatttacgtcccactggaatgatctcctcgaaaatttatttacattactggtaaatcgttaacatgtgttaattcggcatattatatcataacaggaaaaatctcgtctattagaaataaaaatattctaaagccataatcttatatttaattttataaaaacttatattgttggcgggattttttataattgtgttttgaaagcatacttgcttttaatatgtggaaatcattaagacgataataaaacacgtatccgcccaaggaagcaaacagcccacgattattgcaggctatttgccaggtgtcttacttactccttcacatctatttctgataagaaggttcagaacttattatcggaacggcggctcattaaaggttcgtaatttacgcgaatgcagtcggtcgccttctgcgcgcagcaaatcgatcgcccgaatgccaatttgcagatgttcggaaatagcgccttcataaaaacggttagcctggccgggaagtttaatctcgccatgcaacggtttatctgaaacacacagtagtgtcccgtatggcacgcggaaacgatatccttgcgcggcaatggttgcactttccatatcaattgctacggcccggcttaagttaaaacgaagtgcagaagctgagtaacgtaattcccagttcctgtcatctgtggttaccacagtgccagtacgtagccgctgtttgacttcctcaccgggcctgccgctcaccagcttggtggcgtcataaagcgcacgttgcacttcagcaatgctcggaataggaatatcgggcggcagaaccgcatcaagaacgtggtcatcgcgtaaataagcgtgtgcaagtacataatcgccaatggcctgactttcacgtaatccgccacagtgaccaatcatcaaccagacatccgggcgtagcactgccagatgatcgcagatggttttagcatttgacggtcccacgccaatattcaccagagtaataccctgaccatcggcggtaattaaatgccatgctggcatctgatgttttttccatgcaaggtcggaaatggcttcttctggcgcttcggtttcggcggtgatccagttcccgccagcacaagaaagggcaatgtagggactatcaggatcgaggatctggctgcatccccaacgaacgaattcatccacataacgtgtgtagttggtaaacaagacgaacggctgaaaatgttcaactggcgtaccggtataatggcgcaaccgtgcaagggaaaaatcgacgcggcgcgcatcaaaatgcgatagcggggagaattcagttggatgataaatgccgtctgcagtttcatcgccaatttgcgccagttctgttgtcgggaagtagcgagttaacccagcgctcattgagcgatcaagtgtcaattcagagccatcgatgacataaggataagggatttcatgctgcgagggttgcactgagatatgcgcaccataatcctgatacagcaacgtaagttgttcattgagatacgaacgaaagagagtagggcgagtaatcgtggtggtgtagctgcctgcgtgagtaaaacgaccaaatgcgcgcgttttggggggattggttgtgctaccgtcccaggttacggtcagtgatggatagacaaaaagaccttgtttgcgggcgttttcatcaggtaattcgccacttgtaatatagttgccaatggcgttgcgtaatgcgactacagattgctcatacagcgcgtcgagtttatccagtgcctgagctggggtcagaccggagcccttattattcatgtgtgtctcctgttccatacaattaccgcacatccgatagtatgtcacaggaatgtgaaacaaaagtgtaaggcgaagatcggatgatcttcgccagactatcaagcgcgttgattgtctttcatcaacaaagcggtcattgcggaaatcagacatccagccagcaaataaatggcgacgctatgccagttcccggcaaagtaagtgatgagtgcagcggcaataaaaggtgtaaatccaccgccaaccacactggcgacctgataaccgactccagcaccactatagcgataactggcaccaaacatttcggtaaacatcggttgttgcacacacaccaccatgtcatgcgcaatgtttgccagcattatggagaagaaaactatccagaaaatagattgtgcttcaagcgccataaagaaaggaaatgcgctcaacgttccgattaacgcacctgtgatataaaccctgcggcgaccaaaacgatcggcaagccaggcaaaacagggaattgtcaagcagcttaatccacctaccagcaaaccaatattgaggaaaagttcgcgcggtaaccccatattctgggttgaataattaagtgcaaaggcagtaacgatgtacatcgtcagcaattcgcacagtcgtagcgcaataatcttcaggaaagcaccgggatgtcgtaacagcgcttcgataaccgggatgcgttttttcgcggcagcttgataatgttgctgttgttcaaattccgcggactcctccatgccattgcgcacccacaatgctcccagtaccagtacgatgctaaacaggaaaggaatgcgccagccccagcttaaaaactgttcgtcagtcgtcatcatactgatcaatgaaaccagtccggttgaaagcagtaaacctacaccgtagccaacttgtacaccgctactgtaaaaggcttttttatttttcggtgcactttcaacggaaagcaacgccgcgcctccccattcgccgccgacggcaaatccctgaatggcacgcagtgtcaccagcaaaataggtgcccaccacccaatggtcgagaatgaaggaagaataccaatcaaggctgtcgcgatgcccatcatccagacggtcagcattaacatgcgcttacgtcccagtcggtcgccaaagtgaccgaaaatgacaccgccgagcggacggaaaaggaatccgacgccaaaggtggcaaatgcggcgagcgttcccatcgccgggcttacttgcgggaaaaactcgcgattaaacaccagtgcggcggtgatgccatagagtaaaaaatcataccagtcgacgacggcaccagcgaagctgcctaacgcagctcgtcgggcgcgacttaacgaaagcgtcccttcatcgggacgagtggagatgagcgtggagtccataatgatcctgtttgtactgtctttttataattagtatggaaaaggtaactcacattgccgtcgatctataaacgaaccttatgagactacctcgacagagcgcatctgcaaatgtttttatggctgattagcggcaacatgaaaaattcgatggaagatgaaagcgcaggagttgctggtgttgtttaaggattaagcagaggacccacaggttagagatatgaaacataaaagtccgcatatgcacaaaatggcaccctgatgagtctgatagactgcattgtattataaccagtagggaggcgaggttaggtatgtttttagcatcattgttgagacgtattgcatttagttactacgattataaagcttataatttcaatattgaaaaaacagactttgttgtcatccatattcccgaccagattggcgatgctatggccatctttcctgttattcgggcgcttgaattgcataaaattaagcatcttttaattgttacgtcgacaattaatttagaagtgtttaatgcacttaaacttgaaaagactaaattaacattagtcacaatgactatgcaggatcacgcaacattaaaagaaataaaagatttagcaaagaacataacacagcaatacggtacgccggatctttgtatagaggcgatgcgtaaaaagaacctgaaaacgatgatatttatcagtcagttgaaagcaaaaacgaattttcaggttgttggtttaaccatgaagtgctactcccctttgtgcaagaacgcgtcccggatggatcagaatctccgggctcccgtacccatgacatgggcatttatgatgcgtgaggcgggttttccagcagtcaggccaatatatgaattgccactaagtgaggatgtactcgatgaggtgcgcgaggaaatgcgatcgttaggatcttacattgcgcttaatttagaaggtagctcgcaggaacgtacattttcattatcgattgcagaaaatctaatagcaaaaattcaaagtgaaacagatataccaatagtgatcgttcatggaccaaaaggggaagataaagccagggtattagtggattgttataataatgtctaccgtttatccttatcaccctcgattaaacgttcagcagcaatcataaaagatgcttatatcgcaataactcctgacacctcaatattacatatggcaagtgcctataatactcccgttgttgcaatttatgctgattacaaaacgcgatggcccgcaatggccgatgtttcggagtcagtcgtcgttgggcaaaaaattgacaatataagtctggatgaattcgcaaaggcattaaaaagtgttttggcgagaatatgagacagtacttatgcatagtaatgccgatctgttatgaacggtggtgtcatcaatactctgaggctggtcaatcatcacagaaaaccagcctttggatcaaagctgtactcaccggatacgatcatagtcacatcgaacgcgattcttgcggtgctgcagttttatttattcattttctgtgagagaagggcaagctctatagagggaatgtaaaaaagagtgctccgaatggagcactctttaagaaattataacggaaaatcacaggtttttataacatgtcgcataagcaaacccaagcttttcaaatacgctttgatcacctgttgccagggaaactacgtattgttcgcttgagtttgcgggactagatgaccaatacatatttgattgaaaaccagcgtcagtcgtgtaatgccccatatctccccattcactgtacagtgacccgatgcctcgggaacgactatggtttaaatgatctgcacggggaagtgtgtagccattgctactgcaaaaattttcagcaaggctgtatatcatgaaagcatcgccggagttcacccaccaactcttcacacggatttcgtatacatagctagggcctcctgattttggcgtcgccgtaatcctttcccaattgctgccgacatttttaaatgtcactttaccggtagcatcaacatcgacccaggaggtagagcttgaaaactcataatcagccgccgtttttcctggggcaaagttgtcattattcaactgataatacgccccggtgaacccctgcgaagggaatgtagttgtcggtaggtcagtaccattgactgatactgtaccgctcattattttgtcttctgcgcgagtgaattgtattgtggtactcagaccagcttgatgaacaccattcaatacagggatcagcgttgcgataccctctccgccgcctgtaacagtggctttgtaatcaccgttgatatttagactgtaatcaattgcgctaatttttatatagggcacgttagtacctgattgcacaaattccatcccttcagaaactttgatcggattgcctgatatatcgtgcagaacaagacgtaattcagcactatcggtatagtcccctttcagtgatgaccgattgctcttaaggacggactgcgaggtgtctgccgggccagccaccagcgttatatctactgtttgcattccaccagcggtcgtgactgcgcttaccgtgacgctacctgtcatcgctcctttcacgcttgttgtcgcgattccgttttgatcggtcaccgctgttaatgacgttaatgtggcagagccgctttttaaggcgaagtacacagtgagaccttcgatcaggttaccactgccatcctcaaccgttgcctttaaggtacttaaatcactgttggtggcggcgatagtcgatggatcagcgataaagctagcaacatgtgcggtgcttgagttgccagtgactttcacggttgtctgtgtctgtattgttacgccgttatggaacgatgcagtcaccgtatatgtaccgactttattgctggtcagaacgaccggagcctgacctgaagagttagttctcacttttccgccacttaacgtcgccccttctggcgttacgctaaagttgatgacctgaccctccactggagtgccatttgcagaggttagcgttgccgtcagagtagggcctgtaggggcatagacaccgataagcggactggacgccgtgagtgtcagtttttcatcaatagcctccagttgtttctcaagtgaggctccattcgccagggatgctttcaccatatacgaaccgtttctttcgggcgtcatggagacctcggctataccatgcgtatcagtagagacaatattttggctgatggtcatgtgctctggtggctctgcactgaatgttacagattcattaagaatcgggttgccaaactggtcgttgacgtgagctttaactgctacgtcttgtgcgaccattagctgaccttcaggtatctccagactggtaatcgttgcagaattaatatctgcttttgcattcagtaatcgcgatatgacttcagtaggtttatctgccagagaggctgaaactgttttcagtccgacttcggtgcttgtcacaagaatttcagcgaaaccctgatcatccgtttcaacgctggtgctgcttagcgtgacggaggttccgcggaaattaacttttatgccttctaccgggttgccgttagcgtcagtgacgcttgcagtcatggtcgcgccctcggtcgtgctgacgacgaatgagtatacagaggttaaggaggctagtgttgcggtaccagcatcggcaatcaaagtcacctgtttcgtatcactgacaccataattgttcacgctaactgtcacggggtaggtgccggattttgtaccgctcagtgtaacttcagccttgccgttgatatcagtaatggcggaaccgccttgtccgagagtgaagcttgcgctcacgtctgccggtagcgtgaatgtcaccgcctcattggctaacgggttgccgtttccatcagtcactgttgcctgaagtgtggtcatcccaacgttattggcgataaagttgtcctcggtaacgttaagattaacctgcgcactgagcgtatccgcaataaagttcaccaccaactgctcactcttaccgccagtcatcgatgctgtaacagtatgagcgcctgcttttgtacctttcagcgtgactttcgctttgccttcagcatcagtaatcgctttaccgccatcgctcagcgtgaagttcgccttcacatcttccggcagagtaaatgttacttcagtgttggctatcgcattgccctctgtatcagcgactgttgctgttagtgtcgtgagatcgttattgtcggcaatcaacggatccttcgaggctgccagcgtgatttcggcattcgcgacgttcggcacataggtcactgtttgttgcatcgaatcgccattttcgagggttgccgtcacttgataaaccccggcttttgtagcggtaaagcttgcgtaaaaattgccgtcgtggttggtagtatatatagcgttattactgggggtcacgccttcacttggtgatactctgagggttacctcctgctggggtacaccgttgccgtaattatccttcacctcaatatacagattggtagtgtcgcctgcggagactgtatcaaaaagtgcctgtagcaaggtgagatgtgccgtagacgcatcagcgttgacattaattgatgtgctaagcgtggagctaccattttccagactggcctcaacggtatccggtctcgctcctgattctatcgaggagcgggtattggtataagtgacggtagccttaccctgttcgttcgttacggcttggccgccattcgtcatttcggcagagtttgttctgctggtgaagttcacagtcacacctttcaccggaaagccattattatcaacgactgtggcggtgatgacgctgccggagctgttctgcggggtaccggcgattatgctgtctgggacaggcgtcaactcgataatttttgccgctgctgtgtcgccaataaaatgcacagttttgttgtcgctggcaccattattagccagtgatgcagtgaccgtctgctcaccaaaggcaacgcctgcgagagtggcctgcgcgatgccagactcattggtattacttactcccgggggcagggtgagtcctgaagaggctgagctgaatgttaccggaagattattcacctcattgtcgaactgatctttaaccgttgcagttagcgttgcgttatcgacgccattacctgtgatctcatcttttgacatctgcaggacaacctgagccgaggttttgtccgccacaaatgttaccggctgcgaatcactggtattgttattacccagcgttgcggtaaccgtatgcgtgcccgcttttttacctttcagcgtgacatgcgcttccccattggcctgagtgatggcaataccgttattttcaagggtaaagtttgccgcaacgtcctgtggcatggtgaagttgaccgttatccccgccaccggatgattcgacggatctttcactgttgctgtcagagttgtctcatccacgccattcccaatgatttccgctttcgatgtttgcagaacgacaaccgctctgtctttatccgccacaaacgtcattggctgtgtatcgctgacattgctgttagccagacgagccgtgatcatatgcgtgcccgctaacgtgccggtcagggaggcgattgcagtcccgttgctatccgtcatgccttttccgctgttgctaatcgagaaccgacttgcgacgtcgtttggcacagagaaggtgatttctttatcttttaatgggttgccatttttatcctgcaaggttgcagtcatatgtagcggagctgtgttggtgacggtgatatcacctgaaggcacactgagggtcagggcagcagtactttgatcaccgataaaaatcacctgttgattagcctgagaaccagagctcacagaggccgtaaccctataatcaccatttttcaaactggtcagcgtagctgtggcgatcccgtcgtggctattcacttcggtttggctcagtttcgctgctgctgaattaacattgaaagtgaccttgacgtcattgagcaggttgccttttgcatcccggactgtcgcggtcattgtggcgctatcattgccgtcagcgaccacttcatttttcgacttctgcagatcaacctgcgcggtactcgagtcgccgacaaaactgacaattaacgtttgtttcacgccattttcaagggtgacttcaaccgtgttgtcttcctgcttactacttttcagatcaaaagtcgccagaccattaacatccgtttttgcggtgttttgattgttaaagcaagttgccgacccgcttaataccgcaaacgtgacggtatgatcattgattgggttgcttccttcatcagcgacattgaccgagacggtgtttgctgcattctcattggcgagcacaccattattgctggcagataatgtcgcaatttttgctgactgcgggttggcgtcgatgataaatccagcggtatgcaaatcttcattccagttttgcattaacagcttcgcagtaagcccactgcctctggtataggcggtataggttgccttatagacgccatctgcggtttctttccagtctgtagtgacaccaggtttcacgttgtcgatgctgactgcgttattcagttgctgtttttgctccttaacaggtttgtcattttcatctctcagttctaccgtcacctcgataggattgccggagagataacggtctttatcaattttaattgacgagtgagttcgggatgacgaaatagaaatgatattcaccacggcgggggctttagccgcatccacaccattcagctgtggcatcagcgtcagcgtgccagacatcgctcctgtggtcaggatctgggtatagcttccgtcaccattatctttccattcagaaagggtgatgtcctgaacaccttcgtgacgcgtcgagagcaccagcccgacaacaggattacctgctgcatcatgcgcaataaaagtcagtgtggcggttgaatgggaatccgcgttcaatgtttgggtacttaacgataccgaggaatctttctggcttagcgtaggtgcctgaacgaccaccatgctttgttcacgattcgacaaattgcctttgacatcttcagcggtgacttcaatcggccaggtgttatcggtttctggcgtactggtgaaccggtaacccggcagggtaaccagaatatctttacccgttgtgaccactttgccaccggcagcttccagtgcggtggcttcgacgttatagcctttcagggcatatttggtttgtagcgacgaaaccagtgatttcacttctcctgacttccctgtcacggggtctgtcagggtcaggcggaccagttcttttttgcgatattccagaacgatgttgttgttgcgatccaccagatcataacggctgcctgcaaggctacgccgtgcagcgacttcattcgggtcaagctgtttctgcattgcgctgccaggttgccaggtaaaatcgacggcaaaacgggtgtcattttcgccctgtttaccctggcgttgctccgcgctgaaggtcattagcgggaagggggtatagttaagtccagcggttatggcatgaggattactttgccgatcgtctttatcgaacagggccacttcatcgccataatactgttcatagaccagtttaccgccaaggtacggccaggcgggtagccagccttctgcgcgtacatcccagccattggccgggcgtgcttcataatcgttgtccagttcaggtgcgctgcgccagttggtcagtcgcaaatagccgttactgcttaattttagatagtcgcgccagtactccgcgccaatgccggcgcgggagtggtaacggctaagatcgtggtcgaaaaagaagttgatgcccgacatccatgtgggagtgaaatgacgccaacctaagccgttgttaatctgtgtacgctcgtcagtacgatggagagtatgctgactgaaaaagagattatcaggcgtttcataccacggatggagaaaatcgaactgggagttcttcaggctaaaatcttcatccacgcccagcgtgattcttgcggtaccgaagcggcttaaccagtctgtcattgcgcctgaagcctgagaagaggcccatccacgcgccatatttgccgcttgctcgctgttcatatcctcggcgagcagagacccgatttgctgtgaagtactggctatctgttgctcaaggttgccgctgctattacccggtggcggggttaaattattttcactaacttgtgccgggacatccagttcatcaccctggcggacattatcaaaacctcgagcaaacgtacgaaactggttgagtttgcgtaactcagccaccgaaataccgaaacgttcggcaacgctttgggccgatttccagcgctccaagggtgtagggcaccgtattggcatttgcaatggcgagttgtgcaggaactggttgttgggttgcggcgtttaccacaccttgtgctgccgcagccatagggaacgcaagttgagttatcaggcagatacccgcagttaagcggcgtagtttaattcccatcccgcataagatttgtcggtcatttatttcttctccacttctcttcttcgtagccatgcttaccttccctgaacgagctaacataaatgcgccctttctagcacagcgaaaaaatgtaaatcctgatagcaatatgattgaaaattaataacttttcgttaggcagttttgggtgtgagttgcaagaggggagactactgaataactcaagttttataatcgaggggaaaatggtgatggcgttcatagcaaaacgccctcaaccataaaggtcgagggcgcttaagatgttaaaaacccgctatccgttaataaacaatgttcaactaaggttagtgacattgcgctaagaagcgaatttttagaatttggctcctctgactggactcgaaccagtgacatacggattaacagtccgccgttctaccgactgaactacagaggaatcgtgtgaacggggcgaatattacttagcggtaccttgtctgtcaacactaaatttcataagtcatttcaattggttaattaatctgcaaagttgttaattaatgaacattcgtcgccgaaaacgagtctgtatcattagtgcgatgcagtctctgcaaaggatcttgttgataaaattggcagaaacgttgccacaatgaagggaaacgaggagcaaaaagttctggggcgctaaagaaatattcagaaagtacggcaaaacattcagcaggatcactggcagcataagcatcaatgctcgccgcattctcgccaactaattcgatttcttcctgaatgttgttcattgcagcatgaagatcgtgttcccagccagcaacctcacgcaacggaataaagggaactccgctggcgcgatcgccgttacgggtgtccagcttatgagcgacttcatgaataatcaggttaaaaccagaagcatcaaaagaatcttgtatatccaaccagttcaaaacgataggcccttgctgccagctctgacctgactgaacaatacgttggttatgcaccagaccgatatcgtcttcccattcatcatcgaccacaaatggcgcaggataaattaagacttcatgaaaaccatccagccattccagtcctaactccagaacgggtaggcaaaatagaagtgctatccggcagcttcttaatgaatccagttcaaagccctgtaaaggaacaagccgcttttgctgtaaaaaacgttcggcaagagtgactaatttgctttgttcctgttccgtcagacacgttaaaagggggatcgatagtgcttcctgccagggaagggcagtttgatgtgctgattcttgtactttccagggccacttaatcatcgttttgctcgcaaactcgtcacttgaacaaaattgcacggacagggactgttaaaatgccaaatttcctggcatcatggcaaccatctgaacggagagatgccggagcggctgaacggaccggtctcgaaaaccggagtaggggcaactctaccgggggttcaaatccccctctctccgccactttatcaatgacttatctcccgacttcccgccttgcttttcctaaacagaacaatcgtagaatattcttgaagggttagatcgtcactgttttctgttcgatactgtgacattcagcacttgattcgctatggatctgacaggaagctttcgagcgaaaatgtgcagttattcagtcgttttcttatcgctcaccattattcttttagacattcatcctatgaaactgccgcaaagttggtggtgggaactgaagttgcgtagagaaggggtcaataattgagtcaaaaaaggaacgcggccgtcagattaaagccgcgggacaaagtccataatttccaagagttgttgaatttcccagcttttttgaaagcctttgtatcatactaacaagtaaaaaaggtttaaataccaaaattaacctgtatttttgataagtcttaccattgtacgatttacacagtttctgctcctccttgttgatagtggaaagggtgcattgtgcacttgcgtaaacatttatgacgcgttgatgtccatggttcacatttccttgtcaggggatcgacttatttgcggcgaggcatcattcgtaacagagtattatctttctgaatgtagtgatgaaagagtgctgcgccagcgtgagctgcgattaaaaagtaacctatatttgcccaggtttcgtgaatattttttatcagtgctttaatttcgctgtttggggtaacaaagggagacacattgaaaccaaggaaactccacgattttccactgtaagccatcaaagcaatccccagcagaggaagtgcaaggaaggttatataaagcatgatgtgcattagcgaagccgctttcatttgccaggcaggtggcggtggcacaatagaaggatcactataacggtgttttataatcaggcgtgaaaacattaacacccaaacgaatatacccgcattgtaatgtgtttctcgcatcagcagataagtactactacctttaggaaaccagccacggagttccatcgcggcataggttattgcaacgaaaagcagcgttatccaatgtaaataaatttgagtttttgagaatcggttcatttttgtagctcctgtaatttttacagtcaagctatcccacgaaccttaaaaaatccttatacagatgtggttttaagaatttgttatttaaaaaattgatagtgcacattgtaaccagccaatataagcaatggcgtgagcacaggtatctttctctgttggccgtattgtgtatggaatccgttattggttaactcaatgcgggttagcttattaatatacagacacgtcatagtgatgagcgtgtctgtagctagcttgcgttcagtggcgtttgtggatggaccagtggcagttatgatgacttactaaagcggcatcgaggcgttatcatgagaatactcaatgagacatcatttcctcgaccacttcttcgctactcaactgatatggataatacgttggccagttttccatttcatttaataaagattgctgtgaatcattacccataaaaatgtgaaaatgagatgattttcgtggtgcaattatatgatcgctaaattgtatatatttaggggctttgctttcaggatctttacattcgaataagtaacgaacgcctttcttgcctgatttataggtgagtattttgtatccatcgtaatcatatttacaggatgttgtttcattatttctatggaattcaacaatgccgtcctcaatgccaatcatctcgatatctgttgcataacctttgtgataataatctttaatttcagcaaatgttttagttttatctgcatccgctttcttctgaaagacggggtcaagtttgccactttgcagtaaaggataaacggattgccagactccatcccagtcactgagcgttcggttttgtacattggcatcatcaaaaacaccattagcagctttttgttcgacctctgttaagggtttgccgtgtgagtgatgaccatgcgaaaaggcaggagcgctaacaataaagacacctaaagcaacagccagtttgtgaagacgaatcgccaaaacagtttcctccagagtcattgtatatgatgtgtaatgttatattgtaacatatgacaaaatgcaataactcttaggagatgagagcatagttttctcaggtatacttatctatcttattgaaataaaatgaattatgttgataatttgaggttgatgacaaacgaaacataacctgatgtgatctgcgtaggccggatagggcgctcgcgccgcatccggcagggataacgcgtactttgtcggtaatatgaagttatacagataatttgttgtgaacctgcttgcgtaaccggttaaaaagggaacgcaacttcttataccgtaaggctaaaagcagtacagccagcccagcgtagatgagcggctgcggtgaaataatcttcactgaccacagataatgtattggggccaggatcgcgacaagatagacgaaattatgcaactgttgccagtgcttgccgagttttcgctgcatcgcctgggttgaagtaaacgctaaagcaagcaaaataacccagctgataattcctaacgttaaataaggccgggtaattaactccttgcctaataacgccagattattcacgcccagctccagcaatgcgtaactggttaaatgcagtgtcgcccaggcaaagcaccataagcctaacaggcggcgagtgcgtatcaataacggctgttttgcgtagcgtgccagaggtgtgattaacaaggtcgccagcaaaaatttcagtgcagtgcgaccggtaaaatgctgaatatctttcaccggatcggcacccagtccaccgtgattgatcgcccagaccagccagagaaacggcaacaatccggcaagatgcaggctaactttcagccatgtcacctgttttgctgtcagacgcattcagaaattctcccgcaaatccaggccacgatacagcgatgccacctggtcggcgtaaccattaaacagtagcgttggctggcgctgaacatcgaggatgccgcctgaaccaataaatcgttcggtagcctgtgaccagcgcgggtgatcaacatgcggattaacgttggcgtaaaaaccgtattcgtcaggcgctgccagattccaggtggttggcggacgctcgcgggtcagcttaatactgactatcgatttaatccctttaaagccatatttccacggcacaatcagtcgtaccggcgcgccattttgtggcggtaacgccttgccataaacacccacggtcatcagtgtgagcggatgcattgcttcgtcgagacgcaatccttcgacataaggatatttcagcccgccgccgataaagcggtcctgctggccaggcatctgttccggtgcataaattgtttcgaaagcgacatacttcgcattgctggtgggttcggcaagcgccagcaatttgtgcagcggaaaaccaatccacggcaccaccatcgaccatgcctccacgcagcgcatacgataaatacgctcttccagcgggaagcgacgggttaaatcatcgtgatcgagggtcaatggttttgccacttcgccgctgattttcagtgtccatggatcggttttcaggctaccagcattagcggcgggatcggctttatccagcccgaattcatagaagttgttataaccggagactttatctactggcgtcagtggcaggttattttgccaggcggcaggcttgctgaactccagcggttttccggcgggggcgggcgggcgatcgttccctttaaaccagctaagcagatcggcatgcgcagcgtgaggcaaagaaagtgcagctgcgctgatgcccagtgcttttaacacctgtcgacgcttcataaagaatatcgactcggccgtaacatctgattcttttaaaaattgattctttttcataagccatcacacttttttgtcgttagccagcaagagccgtttactgttaatctgtcagggagtgtcctccctaacagtagcagagatctgcttttacatatttatgcattaactgccacgataggttgaatacccatattggctaagtaataaaggcacatgataatgctcgttcactttattaatatgaaattcaacggggatctcagggaagaaactttcaagattttgtttcttgaaatagtccccggttttaaatacgacacggtaatcgcccgtagttgcagtttgctcgggccacagtgccttaattcgtccatccttatctgttttggcggtattaagttgtaaccagccgttgtccgctttcttttcaagagtgactgtcacgtcggcagcgggttttccggtttgctggttcaaaatgtgcacgctaagaatgttttgttgtgcggcataaaccaaagaaggtaatgaaaatgctgccgttactacggagagtactaaataacgctttaacatgtttatatccttgtcatgtgaatgagttttgaggatagcgaaaaagcggccagggtaaccttacagcagcattacaattttgtaatgaaccaggctgtttctataacatatgatttatggcatattattttcatgaagattttacttattgaagataatcaaaggacccaggagtgggtaacgcaggggctttccgaagcgggttatgtcattgatgccgtttctgatggcagagatgggctttatcttgcgctgaaggatgattatgcattgatcattctggatattatgcttccgggtatggatggctggcagatcttacaaacgttaagaacagcaaagcaaacccctgttatttgccttactgcaagggattctgtcgatgacagagtcagagggctggacagtggagcaaatgattatctggtaaaacctttttcattttctgagttgctggcaagggttcgggcacaattaaggcaacatcacgctttgaattcaacattagaaatcagtggcttaagaatggactctgtaagtcaaagtgtgagcagggacaatatcagtattacactgacgcgcaaggagtttcagttactttggctactggcctccagagctggcgaaattatacccagaacggttattgcgagtgaaatttggggaatcaactttgatagtgataccaatacggtggatgtcgccattcgcaggctccgcgcaaaagttgatgatccttttcctgaaaagctaatcgccacaatccgggggatgggctattcattcgtagcggtaaaaaaataatgaaaagattatctataaccgtccgtttaaccttgctttttatattgctgctgtctgttgctggcgctggaattgtctggactctctataatggcctggcaagtgagttgaaatggcgcgatgatacaacactcattaaccggacagcacagatcaagcagttgttaattgatggggtaaatccagatacgttacctgtatactttaaccggatgatggatgttagtcaggatgtcttgatcattcatggtgatagcatcaataaaattgttaaccggacaaatgtcagtgatgacatgttaaataacatacctgctagtgagacaatcagcgcagctggcatttacagaagcattattaatgatactgagattgatgctttacgaattaatattgatgaagtttcgccatcattaacggttactgtggctaaattggcttcagccagacataacatgcttgaacagtataaaattaatagcattataatttgcattgtcgccattgtactttgctcagtattaagtccgctgttaatcagaacgggattacgagagatcaaaaagttgagtggtgtaacggaagcgctgaattataacgatagccgggagcctgttgaggttagcgcattaccgagagaactaaaacctcttgggcaggcgttgaataaaatgcatcaagccttagtcaaagattttgaacgcctaagtcaatttgctgacgatctcgctcatgaacttagaacgcccattaatgcattactgggtcagaatcaggttacgctcagtcaaaccagaagtatcgctgaatatcaaaaaacaattgccggtaacattgaagagctggaaaatatttcgcggttaacagagaacatactgtttcttgcccgggcagataaaaacaatgttttggtgaaactggactcgctttctctcaataaggaagtcgaaaatttgttggattatcttgaatacctttcagacgagaaagagatttgctttaaggtcgagtgcaatcagcaaatctttgcggataaaattttactgcaacgaatgttatcgaatcttattgttaatgccattagatattcaccagaaaaatcgcatattcatataaccagttttcttgataccaacggctatcttaatattgatgtcgccagtcctggaacgaaaattcatgagcctgaaaaactcttccgtagattttggcggggagataattcgcgtcattccgtaggtcagggactaggcctttctttagtcaaagcgattgccgaattacatgggggaagtgctacgtatcactatctcaataagcataatgtgttccggattacgttaccgcaaagaaattaacataaggcttcagtacgccataaattaaccgtgaaaaaacgcagccacgtcgtgagtactaacgcggctgcgattgattagcgcttacattcaaacgtaacagggattaacccgcgtaagctgccagcatttcctgcgccgccagtttacccaacgcattcgctgcaaaaggactgtcgccggtgagaactttacggtccttatgtactcgcccggtgatgtcgtcattaataatgttcatgcccattttcttcagctcttcgccgaagtaccaggtgagatgacccggcatatagcctatctctggcgtttgtttgtctgcggcgtctgggaatgcgcaaatggaataaccattcagtgggttatcgccgtggcgaagcgccagaaaagccgccgggccgtggcaaagggagataacaaaacggtcatttttgattgcccactgcaaagcagcagctacgtcctggctttctggtaaaccaataagtgcgccatgaccaccaggaacaaagattgctgcatattcgctgtcagcgttgaggctggcgacaacatccgcgagtttcttcggattgcggaacaacgatttatgttgctcaaagaatggcattactttttcatctttgtgcggcatagcccagtattcaaacttggtcatcagaccggaaatggtcgccacttcgaattcgaaacctgcagcatggagatgatacaacggcagcaacgtttcaatcggatggttaccggtcgagaacagttttccgttatcggttggcaaataacgttcgtccgcggcgatcaccagaattttatgcttaccgcgatacggttttggatagtccacgccatcaagatcagagacgggactggtatattggctaagcgaatattctgaagggaagaatgcattatcttcagcaatatcgacctgcggatttttacttgtttgaacagtcatagtgtattccttattgttgcttagttagggtagtcactatatttgcgactgagctggtcgctatttttaaccagtctggaaaattgagtcaatatatcgaaagcggtagtcggcgggtgtaagtatgtaatgatgatgctgcactggtgttgaatattattcacgccaaattttccttattgagcaacgtcgtcgcaagtggcctcaatgattttagaccattatcaaaggtacggggcggcggggagagatttagtgctgtgaaatattgtggtactgatgaatatttatatcgcggattggtagagaaaagattatttcatgcactatttttgcaaatatttctatatgggaagcgtgtttgttacggggtaattcatcagaatgtgcatttggggtgttggctggaagagtcgctggtagatgttattgtggcaggaggggcagggtaaggtgctgtatcgatatgctttggcaattgcgtgtgccgcagatggagatgaaatgccaataaaaaagcctgaattcgatgagggacgaactcaggctagtgttatgttttacagtaacacgccgcggcgagttggctgattagaactggtagactaagcccacagcaacgatatcatcggtagcgatgccgttagcttcgtagaagtcgtcgtcgttgtccagcaggttgattttgtaatcaacataggtggacatatttttgttgaagtagtaggtcgcaccgacttcaacgtatttaaccagatctttattggtgtaacgcggatcgccattaccgtcatgagcccaaccgcctaaatccttccctttagattgcaggtaagcgatggacgggcgcaggccgaagtcgaactgatactgagcaacaacttcaaagttttgggttttgttagcgatggcattagcatcaccgtaaccagtcatgttacgggtttcagcatacatagctgctaaggaaggtgcgaacaagtccctgatatgagatcatgtttgtcatctggagccatagaacagggttcatcatgagtcatcaacttaccttcgccgacagtgaattcagcagtaagcgccgtcagaccag

SEQ ID NO: 27 - DNA, 104796 bp, Escherichia coli
  source 1..104796: mol_type = genomic DNA
cggcgaagacggtggcagtgtggtgttcccgccggtgctggtgcagatgctcgaccggctggaaagtgaaatcctggctgaccgggtgagtgaggaaagccgccgctggctggcatcgtgcggcctgacggtggagcagatgcaaaaccagatggacccggtgtacacgccggcgcgaaaaatccacctgtaccactgcgaccatcgcggcctgccgctggcgcttgtcagcacggaaggggcaacagaatggtgcgcagaatacgatgaatggggcaacctgctgaatgaagagaacccgcatcagctgcagcagcttatccgcctgccggggcagcagtatgatgaggagtccggcctgtattacaaccgccaccgctattatgacccgctgcaggggcggtatatcactcaggatccgattgggctgaaggggggatggaatttttatcagtatccgctgaatccggttcagtatatagattcaatgggactggcatcaaaatatggacacttaaataatggcggatatggagcgagacccaacaaaccgcctacgcccgatccaagtaaattgccggacatagcgaaacaattaagactgccatatcctattgaccaggccagtagtgcgcctaatgttttcaaaacattcttcagagcattaagcccttacgactacacactgtattgcaggaagtgggtaaaaccaaatctgacttgtacgccacaggatgattcccagtatccagggatggatacaaagacagcaagtgattacctgccacagacaaattggccaacaactcaattaccaccaggatatacttgtgcagaaccctatttattcccagacattaataaacccgatgggccagcaacagcagggatagatgatttgggtgaaattttagctaagatgaaacagagaacatcgagaggaataagaaaatgaaaagagttttgttctttttgctgatgatgtttgttagttttggtgttatagctgattgcgaaatacaagctaaagatcatgattgttttactattttcgctaagggtactattttttccgcgtttcctgtcttaaataataaagccatgtggagatggtatcagaatgaggacatcggtgagtattattggcaaacagaactgggtacatgtaaaaataataaattcacaccaagcggggtgagactcttaattcgcgtcgggtcactacgccttaatgaaaatcatgccatcaaaggaacgttgcaggagttgataaatacagcagaaaaaacggcgtttctcggcgatcggtttagaagttatataagagcgggtatctatcaaaaaaagagcagtgatccagttcagttgttggcagtccttgataattcaatcatggtaaaatattttaaagatgagaaaccaacttatgctcgaatgacagcacatctcccgaacaaaaatgagtcttacgaatgtttaataaagatacagcatgaactaattcgtagtgaagagaaataaaatctcttcctgagaaaacaaattaatcattgtgaaaaattatataactcatggaataggtgtttattttgcgttccatttgcagggaaagatcacgtaacgctacttttttgtactaaataattcgaattttaagttcaacaattgagatactacttattgtctaaagctgtttttcatagcttatacatgatcaaatactccttacataaataaggtgaacaaatggaacttaaaaaattgatggaacatatttctattacacccgattacagacaagcctggaaagtggtgcataaattgtcagatattctactgttgactatttgtgccgttatttctggtgcagaaggttgggaagatatagaggatttcggggaaacacatctcgattttttgaagcaatatggtgattttgaaaatggtattcctgttcacgataccattgccagagttgtatcccagggaaagatcacgtaacgctacttttttgtactaaataattcgcattttatgtttaaaaattgagatattccttattacctaaagctgtttttcatagcttatacatgatcaaatactccttacataaataaggtgaacaaatggaacttaaaaaattgatggaacatatttctattattcccgattacagataagcctggaaagtagagcataaattgtcaggcatcctactattgactatttttgccgttatttctggtgcagaaagttgggaagatatagaggatttcggggaaacacatctcgatttcttgaagcaatatggtgattttgaaaatggtattcctgttcacgatactattgccagagttgtatcctgtatcagtcctgcaaaatttcacgagtgctttattaactggatgcgtgattgccattcatcaaatgataaagacgtcattgcaattgatggaaaaacgctccggcactcttatgacaagagtcgccgcaggggagcgattcatgtcattagtgcgttctcaacaatgcacagtctggtcatcgggcagatcaagacggataagaaatccaatgagatcacagctatcccagaacttcttaacatgctggatattaaaggaaaaatcatcacaaccgatgcgatgggttgccagaaagatattgcagagaagatacaaaaacagggaggtgattatttattcgctgtaaaaggaaaccaggggcggctaaataaagccttcgaggaaaaatttccgctgaaagaattaaataatcccaagcatgacagttacgcaattagtgaaaagagtcacggcagagaagaaacccgtcttcatattgtttgcgatgtccctgatgagcttattgatttcacgtttgaatagaaagggcagctatggttagaaactacctgacgtcagtccttgcggggagcaggctttcgtaaatttgtcctgctacaacaggattaacttcacaaatatcatttctcaacgtctacacttactcctgtaaaccgttcaggagcagtaatgaatcagcaacgatttgatgacagcaccctaatccgtatcttcgcccttcatgagttacatcgactgaaagaacatggcttaacgcgcggggcgcttctcgattatcacagccgctataaactcgtctttctggcgcattctcagccggagtaccgcaaacttggcccgttcgtggctgatattcaccagtggcaaaatctggatgatttttacaaccagtactaccaacgcgtaattgttttgctttctcatcccgccaacccgcgcgatcacaccaacgttttgatgcacgttcagggttattttcgcccgcatattgattccacagaacgccagcagttggcggcgcttatcgacagttatcgccgtggcgagcaaccacttcttgcgccgctgatgcgtatcaaacactatatggcgctttatcctgacgcctggctttcagggcagcgttatttcgaactttggccgcgtgtgattaacttgcgccattcaggagttttatgattacccatctggtctggtttcgccaggatttacgtctgcacgataatctcgcactggctgccgcctgccgcaattcgtctgcacgcgtgctggcgttatatatcgctacaccacgccagtgggcgacgcataacatgtcgccgcgtcaggctgaacttatcaatgctcaactgaatgggctacaaatagcgcttgcggaaaaaggtattcctttattgttccgtgaagtggatgactttgtcgccagtgtcgaaatagttaaacaggtgtgcgcggaaaacagcgttacccacctgttttataactatcagtatgaagtgaatgagcgggcgcgggatgtggaagttgaaagagcgctgcgtaacgtggtgtgtgaaggatttgatgacagcgtgatcctgccgcctggcgcggtgatgaccggtaatcacgagatgtacaaagtctttacgccttttaagaatgcctggctgaaacggctgcgggaagggatgccggagtgtgtcgctgcgccaaaagttcgtagtagcggatcgatagagcccgcgccatccattacgctgaattatcctcgtcagtctttcgatactgcgcatttcccggtggaagaaaaagcggcgattgcgcaattacgccagttttgccagaacggtgccggagaatatgagcaacaacgagattttccggcagtggaaggcaccagtcgtttgtccgccagcctggcaacgggcgggttatcgcctcgccagtgtttgcatcgcttgttggcggaacagccgcaggcgctggacggtggggccggtagtgtctggcttagtgagctgatctggcgcgagttctaccgtcatctgatgacgtattacccctcgttgtgtaaacattgtccgtttattgcctggacggatcgtgtgcagtggcaaagcaatcccgcacatttacaggcctggcagaaaggcaaaacgggatacccgattgttgatgccgctatgcgtcagcttaacagcactggctggatgcataaccggctacggatgattacagccagttttctggtgaaagatttgttgatcgactggcgcgaaggcgagcgatatttcatgtcgcagctgattgatggtgatttggcagctaataacggtggctggcagtgggcggcttctacgggtactgatgctgcgccgtattttcgtattttcaatccgataactcagggcgagaaatttgatcgcgaaggtgagtttatccgccgatggttaccggagctgcgcgatgtaccagggaaagcggtgcatgagccgtggaagtgggcgcagaaagcaggtgtgaagctggattatccgcaaccgatagttgatcacaaagaggcaaggctgcgaacgctggcagcgtacgaagaagcgaggaaaggagcctgataaaacgcagcgagcgttttatcaggtatggtgctggcctattatgactccagcgccagcgcgcggtttctgaatttcagcgcctgatacagccaaatcatcagtaccagtcctacacacgccagtgcgccccaggtaatttgatcaaatacttcaatatatgcattgatggagtagttgatcgccccggaagcatcaaacgaagcctgcgatgtctgatcggcaatcacgcccgccagatagttcgcgatcgcgccagaaagcagcatgtagatgccggttaatacgccggtcacgcccggaatttcaatgcgcgtaatttgcgacatggcaaccgggtcgataaacagttccgcaaagcccatcaccgccaggcctaataccatcagtggcagagaagagtgaccatacattgcggaccagcgggcgcttaaggtcagaatgcagaatccggcgctcatcaggccaaggccaagagcaaatttcccccagatgcgcacggtacgattacccgcgacgctttctttaaccacccacgccaggaacacaccgcacagcataactgcgaaggcattaatcgactggaacatagcagtcggaacggtataaccaaacatatcgcggttaacgaagcggtcgatataaaggctaatcgagctgccgccctgttgtgcgaaggcccagaacaacatactgaagaaggtgagcgtcacaatcagccccagctccttacgctgtttctggttttctgctttgcgataaatttttgccagtacacccaggccaataatagtcgcgacaattaaggcgtataccgaccactctttccagaacagtacggtaatcagcgcaggcgttgccaccagcagaaccagcagccatccccagttaggcaggagaaagtttgttgcacgcagtacttttttattaacgccgcgggtatgtgtgaaatgacgattgccacataagaaaatgaccagacccgcgatcatacccaccgccgccaggccaaagcccatcgcccagctgtactcttcctgggcgtaaccacaggcgataggtgcgataatagaccccacgttacccgctgcatacatcagcgagaaaccgccatcacgacgcggatcggttggctcatacagctcgccgagcaggcaactgacattggatttaaacagaccatagccacaaacgataatcgccagggacagatagaggaatgacggatggatctcactggcacccagcaccacatgaccgatcgccatcaacaacgcccccagcatcaccgccatgcgattgccgagaactttatccgccaaaaagccaccgaggattggcgtgacatacaccagcgaacagtaggcgctaaataactcgtaggcgtgagtatcgttgtattttagttgattggtgagatagagaatcagcagggcacgcatgccgtaaaagctaaaatattcccagatttgcagcgcaacgacatagtaaatagcgcgcggttgtgatgcgtgtttattcataataattccacaattgacggcaacgtcacgtaatagttgcgcggcgtgcttgtgtttccttaaagttaaaactttgatacagatctgattatttatgcaatatgctgtctgattgcataaatatacattagctgaagcgtgatgatataaacaatttgcgtcttttggcgtcgggtttgtttcttaatatgtcaaaagattggctatcgacgaacaggcgaggtaacgctatgttaacggtgtagctatcagaatacggaaggcgcgaagatgaaaaacaccgaactggaacaactgattaacgaaaaactgaacagcgcggcgattagtgattacgcgccgaatggtttgcaggtggaaggcaaagagacggtgcaaaaaattgttaccggtgtcaccgccagccaggctttgctcgatgaggcagtgcgtctgggcgcggatgcggtcattgtgcatcatggctacttctggaaaggagagtctccggtcattcgcggaatgaagcgtaaccgtttaaaaacgttgctggcgaatgatatcaacctgtatggctggcatttgccgcttgacgcacatcctgagctgggcaataacgcacagctggcggcgttactggggatcacggtcatgggcgaaattgagccgttggtgccgtggggagagctgaccatgcctgtgccgggactggaactagcctcctggattgaagcgcgtctgggacgtaagccgttatggtgtggcgataccggacctgaggtggtccagcgcgtcgcctggtgcacgggcggcgggcaaagttttatcgatagcgccgcgcgttttggcgtggatgcttttattactggcgaagtttctgaacagaccattcattcagcccgcgagcagggattgcatttttatgctgcaggtcaccatgccactgaacgtggtggtattcgcgcattgagcgagtggctgaatgaaaataccgatcttgatgtgacctttattgatattcctaatcctgcataacgaataatcagagggatcgaaagtgcaacgagcgcgttgttatctgataggtgaaacggcggtagtgctggaactggaaccgccggtgacgctggctagccagaaacggatctggcgactggcgcagcgtctggtggatatgccgaatgtggttgaagccattcccggcatgaacaatattacggtgattttgcgtaatcctgagtcgctggcgctggatgccatagagcgtttgcaacgctggtgggaggagagcgaggccctggaacctgagtctcgctttattgaaattccggtggtttacggcggtgcaggcggaccggatttggcggtggtcgcggcgcattgcgggttgagcgaaaaacaggttgttgaattgcactcctccgtggaatacgtggtctggtttttaggttttcaaccgggcttcccgtatctcgggagtttgccggaacaactacacacgccacggcgcgctgaaccgcgcttactcgttccggcaggttctgtcgggatcggcgggccgcagactggtgtttatccgctggcaacgccgggtggctggcagttgattggtcatacctcactcagcctgtttgatccggcgcgtgacgaacccatcttattacgtccgggagacagcgtgcgctttgtaccgctgaaggagggagtatgctgaagattattcgtgcgggcatgtataccactgtgcaggatggcggtcgtcacggttttcgccagtcgggtatcagccactgcggcgcactggatatgcctgcgctgcgcattgctaacctgctggtgggtaatgacgccaatgcccccgcgctggagatcacgctcggtcagttaacggttgagttcgaaactgatgggtggtttgctctgacaggggccggttgcgaagcgcggctggatgataatgccgtctggaccggctggcgattgccgatgaaagcaggccagcgtttaacgcttaaacgcccgcagcacgggatgcgcagttatctggcggtcgcgggtggtattgatgttccgccggtaatggggtcatgcagcaccgatctcaacgtggggattggcgggctggaaggccgtttactgaaggatggtgaccgactcccgattggcaaatcgaagcgtgattttatggaagcgcagggcgttaaacagctgctgtggggcaaccgcattcgcgccttgccggggccggaatatcatgagttcgatcgcgcctcgcaggatgcattctggcgttcgccctggcagcttagctcgcaaagtaaccgcatgggctatcgcttacaggggcaaattttaaaacgcaccaccgatcgcgaactgttatctcacggtttgttaccgggcgtggtgcaggtgccacataacgggcagccgattgtgttgatgaacgacgcacagaccaccggtggttacccgcgtattgcctgcatcattgaggctgatatgtaccatcttgcgcaaattccgctcggtcagccgattcattttgtccagtgttcactggaagaggcactgaaagcgcggcaagatcagcaacgttattttgaacaattagcgtggcggctgcacaatgaaaattgacctgaacgccgatctgggcgaaggctgcgccagcgacgcagagctattaacgctggtttcctctgccaatattgcctgtggatttcatgcaggcgatgcgcaaaccatgcaggcttgcgtgcgtgaagcaataaaaaatggtgttgcaattggcgctcacccgagttttcccgacagggaaaattttggtcgcagcgccatgcagttgccgccagaaaccgtttacgcccagacgctgtatcaaattggcgcgctggcaacgattgcccgtgcgcaaggcggcgtaatgcgtcatgtcaaaccgcacggcatgttgtacaaccaggcggcgaaagaagcacaactggcagacgccatcgccagagcggtatacgcttgcgatccagcattggttctcgttgggctggcaggaagcgagctgattcgtgcaggcaagcaatatggcctgacaacgcgcgaggaagtgtttgccgatcgcggttatcaggctgacggctcgctggtgccgcgaagtcagccaggcgcgttgattgaaaacgaagaacaggcgctggcgcaaacgctagagatggtgcaacacggcagagtcaaaagtatcaccggcgaatgggcaacggtcacggcgcaaacagtctgcctgcatggcgacggcgagcacgcactggcgttcgcccgccgactacgctctacatttgccgaaaaggagattgttgtcgcagcataaccccgattaataaagaatgaaaaaaggatatcaccatgcctgaaggcccggagatccgccgtgcagcggataacctggaggcggcgatcaaaggcaaaccactaactgatgtctggtttgccttcccgcagttaaaaacttatcaatcacaacttatcggtcaacacgttacccatgtggaaacgcgtggtaaggcgttgttaactcatttttccaacgacttaacgctctacagccataatcagctttacggcgtctggcgcgtggttgataccggcgaagagccgcagaccacgcgagtattgcgggtaaaactgcaaacggctgacaaaaccattctgctttatagcgcctcggatattgagatgttgaggccggaacaactgaccacgcatccgtttttacaacgcgttggtcccgatgtgctggatccgaatctgacgccggaggtggtaaaggaacggttattgtcaccgcgctttcgtaaccgtcagtttgcaggattactgctcgatcaggcgtttctggctgggcttggcaattatttgcgggtggagatcctctggcaggttgggttgactggaaatcataaagcgaaagatctcaatgcggcgcaactggatgcactcgcacacgcgttactggagattcctcggttttcttacgctacgcgggggcaggtggatgagaataagcatcatggggcgctgtttcgctttaaggtttttcatcgtgatggcgaactgtgcgaacgctgtggcggcatcattgagaaaaccacgctgtcatctcgcccgttttactggtgtccaggctgccagcactaggccgaccgcttcggcgcataggttgaaataaaccgcgcaatggctggccccgtcagcaaaatactgaacaggcgcagggtttgcatcgccataataagcgccatatcggcattgctccctgcggcgatgaccgccacggtatcaagcccgccggggctggtggcgaggtaggcagtcataaaatcaatatgcataaaccgggtcagcccccacgccatacccgcacaaatagccaacagagcaaaaatcgacagcaggatttgcggtagcgggcgtagtgcccgcagtaagatttgtttatcgaaaccaagaccaatccgccagccaattgccatatacgccatcgcaagcagccattccgggagttcgatggtgatgagctgaccagactggagcactgcgcccgccagcatcgggatgagcatcgtgccggaaggaagacgcagcatgcatcccgccgtaccggcaacgactgcgagcaaaatcgtaagcaggagattaatgctcactggcgggaaccagacgatttgctggttaaccgcttcagcgttatcacccagcatcatgcgggtgaccagaacagcggcccccgcgacgaacagcactcgcagatattgcataaacgccaccaggcgaatatctgcgccgtaatcttgcgccatagcgaccattgccgctgcgccgcctggagaagaaccccaggcaccggtatttccaggcagtgagctatagcgcaccaataaccaacccacgatggcgctggaaagcagcgtcaccagtaaaatagcaagcacgatcggccagttggcggccagcgtggtgagaatcgaaccagtgaggttttgcgcaatcatgcagccaagaatggcctgcgcggcgagaaaagcggagcggggaagttgcagagtaattccgcgcatactgaagatgatcccggcgatcatcggcccaagtaatagcgccgccgggagatgtaccgcgaggaaaccaatagaaaggagaagtgatagcacacataacattccccactgcaaaactggcatccttcgctccctcattattttctctttggtgtatcgatacagcataaagaaagccgggccaggaaaaaataacagcaatcaaggaaaaggggaaaatcagcaattttctgaaagagatgccctttccggctgcaaagggcatcatggcaaatcagttatagttaattttaaaaagcaccactgtatcgaagggcccagcctcgatgggggtacctgcaatggacgaaagttcagccgtataggttttttcgtagaccaacatgtcgctggtgaaatcggcgtattcagcatatttattgaaggtataaggcgaggcgttttcatccagcaaacgtagcttcagaccattaccaatcaacaatgctttatcttcttcaaccaacgtttcttcggtataaaaggaggaactgactttaaatccgtcggtgcattggtcattttgtgattttgtcgtcttaatactgaatgttttcgacattgtgtggcgacgaatatccagcaaattaaatttaccaaaatcaatcacctgtgtttccggtgaaatggaaaaattgacgctgcaatccagcacgcgaatgttttccagaccggtaatatgatatttcaggttttgggcagtaggatcttcgttaacgctaccggcaccgtcaaattgcacgacgatatagtcgctaagcgtactttgataatcatgcggcggcatttctcgtattttgacgtataaccgcatgcgagcgagaaaggtacgtgacatgtgaatattagcgggatcacccgagcaaattttgttctgccatcccatcgcgataatctgctcaggggtataaatgtcaatgttcttactgtcaatacactggttagtgtcgatgcggctttttccctggttggcgtcataatcaacgccattgtaagttacgccgagttgataatagcgatcctgcacccccgggtaggggtttacccaggcataaacatgctcactttcaaaattgccgttggtattgttgtcacaatagacgggaattttaatatcgtcagattcccaaatcttatcgccgagtttggcattgcctggtacagcaaaaggttgaatcgcttctgatttttctaccgagccaccggatgaaccaaagtagcagttcagggcaagcgcagacttcaacggcagaaataacagacagatgacgagcaacactcccttgccagcactcatttcttcgcctccacggcttgtaaatggcattgtccgctgcagttgagcgtcgtcatgcgtaacgcgccgtaatcatccatataaccgagataaaactggctgccgctataatttccggtgtttgtgttgaccgtactaaaaggcgcaaccatcacggttttgaagccggggagaacgcctttttcatttcgtcccaggtaggcaatggtcagataatacgcggtaggatttttcagtgtcagttggttgccctgctggctgacctgtaactgcagttcgaccttttctcctgctttcttgcgtaatgcagccggtcgccagaacaccttgatacgactctgaatggcgacttgcagaacggcatggtcgctgtttttttccggggcgggaggaatttcacgcatattgtagaaaaatagcgtttcgcgatcgcccggtaattttgtggtcgaggcttgctttactatccgtacctgcgttgttgctttcggttccagacgttgtatcggcggcagggcgaccagaagatcatcgcttttctcccctttttcattttcgagccaggaataagcgaggtaggggagtttatcgctacgattatccacccgcagactggtagctttatcattagcgttaaacacaatacgagtgcgatcgggttgtagtgcagcgtggctgcacagactggcaaccaacaacaaaaggggtagtcctttcataaatgtcattttcatttccttaattaatgacaaggtaaaatcaggcgatttgcggtgtcttccatatgttcaggaagatggagcgagcaatgctggctatcaccccagaccacggtaaattgttgattttcagcgactccgcttaaccaggcatgtccctcctcgccaaccatccccacgctaatgccgctgccatcctgacggatatccgcaccgaggggagggaactgaccgctggcgttgcgaatgatgacgttaacgtctttaccggaacgggaagccagtgatttgtaacctatcgcgccttcaatccacgtttctttgataacgttttctgcaactgttacgccgtcgggtaagtcattcatgttcaccgccacggtggaaggctggtaactggaaatcaacggcaccaccgcaatgccaaaatggttggtgtagtcgagattgccctgaaccggaatatctgccacgccatcggtgctgaccatcaggcgtggttcattggtagagctgcggcgatgaaacgctgcaccatattgggttgcggtgaaagaaccgctccagctgctgctgacggaactgtaatcattggcggcataggtaccagaaatatcccactcacccgctgaactcaggtgctgatagttaccgctcacctgagctccattgtcaggacggtcggattgcagtccggcagacatgccccagctattacgttcatccagcgtatcgttccacgacatgcggtgtgtggtgctgtggctactgttttgcatgtcataaccaacccgaccaccgttaccgaaggggagcgaaatcgacaggtaaatctggttgtcgcgatctttatcttcgtaatgggtcgtattgaatgacgtcgaaatcgagatatctctccagtcaccaatatcaacattaaaaccggctgtgatgttggctgtcgtggaggcgtctgcattccaccaggtttgatgcagcaggttggcgtaaagattgaggtttagtggggtaatcggttggcccacggataagctgatcgtctgtttttcgtcctgcgcatcgctgtcgttgtatttgtgatccagatagttggcgtagctgtgaaaatgacgatcggagaaacgataagcggcgagcgaaatcgtgctgttggtggcatccacttgtttgctgtaattaaaacggtagcttaagccccgctcgtcctgctgagtatcaaaatggctactggcccaggtgacatcaaacgacagcgcaccaagccacagcatattttgcccgatacccattgcggcagaatggtagtcatcaccagaaagcagcaggccgccgtacagcgaggtgtttgagagcatcccccaggaaacttcattgctaaaaaaggtttcattttcagtttgatgtgacatggagggccgtggctgacccgcggccagtttatagcgaacctgtccctgacgagtcaggaagggcgtcgatgctgccgaaacctggaaattgttcacccgaccatcttcttccgtcactttgacatccagtgtgccctgaacagactgattaaggtcgtcaatgataaatgggcctggtgggacttttttctggtaaatgacgcggcctgattgactgatcgtcaccgtggcattggtctgtgcaataccgctaatttgtggggcgtagccgcgtagttcccatggcaacattcgctcgtcacttgccagtgccgcgccggtataagaaaaaccgtcgaaaatattggaactaaaatccgtttcgccgagggttaatttagagcctaattgcggtaatggacgaaaaagataggtgcgcgatattccgcctgactgttcatggttatcatcgctatcagtctgattcaactgataatcactacgtaagcgccatgccccggcgttaattccggtggtaccgtaggcgttcaggttagtgctgctgctgccgtcctgtgggcggtagctgctggcaaacaagttgtaatccatcaggataccggcgacaccttctttccatgtggagggtggggtccagttttctgagtgccacgccagccaggcttgcggaatactaatattcagttgctgattggcttgatcgaaattgaagagcatttcaggtcgggagctaaaatcgacgcactgatttatcaatggtaacgactgacggacttcaggttttaagccaaatttatcgaccagtaaatcattgatgcacggaatggttttatcgtcatttttgtgccagttaatcttttgcccgttactgatttggttattatttaccgcaacgctaacaaaatactcaccgggagcaatgactcctttttcctttaataatgaaatatcaatgcggtcgcgcattgatttatcgagaacattaaggttgaattcgaccgccaatgcgcaaggcatcgccacgaccaggcaggatacaaaagagagtcgataaatattcacggtgtccatacctgataaatattttatgaaaggcggcgatagcgccgccaaagtaatacttatttataatccagcacgtaggttgcattcgccgtaactgcgcctggcgttacaggtgtagcctgatcaatttgttccatccaggcaaagaaattcagcgtttgttcgctggaggtcggagccaggtcgatatctggagtagcggtgcctaaaacgatattgctttgatctttattcattaaacgtacgccgacgccggtggcttcacccgtgctggtgttgttgagaatcggatctgcgccggtggttttcgctgagctatcaaaggtgactgcaactttagaaatcttgccaccggaaccgttgctggagttttccagatcacagttgactaagcgcaggtcgacagcaacggcatcgctgtgatgtgactgattaatgtggctggtggtcacctgaccgagttcaacctctttatcaatatcatcctgatgtatttcacacggtgcttcaataacttcacctttaaagtgaatttcaccggatccttcatcagccgcataaacaggtgctgtgaacagcagagatacggccagtgcggccaatgttttttgtcctttaaacataacggagtcctttaacagaaaagaaaaaagtatatcggtgcaagaatatcttatttgattgtcgaatgtttttagtttttcttaaaaatattattaattttattaaatgtaaaagtaattaattgatggtatgaattaaatgtttgatgaataacgtattggaaattataggggtgcgctatatttggtggtttattcatgtaactgagaggaagatagatgattaaaaatcatcgatttgtttataatttataccgatatatttttttttagaatatatgaatgtccgatagtggattttatttttacaattttttgtgtttaggcatataaaaattaacccgccatttgaacggcgggttaaaatatttacaacttagcaatcaaccattaacgcttgatatcgcttttaaagtcgcgtttttcatatcctgtatacagctgacgcggacgggcaatcttcataccgtcactgtgcatttcgctccagtgggcgatccagccaacggtacgtgccattgcgaaaatgacggtgaacatggaagacggaatacccatcgctttcaggatgataccagagtagaaatcgacgttcgggtacagtttcttctcgataaagtacgggtcgttcagcgcgatgttttccagctccatagccacttccagcaggtcatctttggtgcccagctctttcagaacttcatggcaggtttcacgcattacggtggcgcgcgggtcgtaatttttgtacacgcggtgaccgaagcccatcaggcggaaagaatcatttttatctttcgcacgacgaacaaattccggaatgtgtttaacggagctaatttcttccagcattttcagcgccgcttcgttagcaccaccgtgcgcaggtccccacagtgaagcaatacctgctgcgatacaggcaaacgggttcgcacccgaagagccagcggtacgcacggtggaggtagaggcgttctgttcatggtcagcgtgcaggatcagaatacggtccatagcacgttccagaatcggattaacttcatacggttcgcacggcgtggagaacatcatattcaggaagttaccggcataggagagatcgttgcgcggataaacaaatggctgaccaatggaatacttgtaacacatcgcggccatggtcggcattttcgacagcaggcggaacgcggcaatttcacgatgacgaggattgttaacatccagcgagtcgtgatagaacgccgccagcgcgccggtaataccacacatgactgccattggatgtgagtcgcgacggaaagcgtggaacagacgggtaatctgctcgtggatcatggtatgacgggtcaccgtagttttaaattcgtcatactgttcctgagtcggtttttcaccattcagcaggatgtaacaaacttccaggtagttagaatcggtcgccagctgatcgatcgggaaaccgcggtgcagcaaaataccttcatcaccatcaataaaagtaattttagattcgcaggatgcggttgaagtgaagcctgggtcaaaggtgaacacaccttttgaaccgagagtacggatatcaataacatcttgacccagcgtgcctttcagcacatccagttcaacagctgtgtccccgttgagggtgagttttgcttttgtatcagccatttaaggtctccttagcgccttattacgtaagactgccggaacttaaatttgccttcgcacatcaacctggctttacccgtttgttatttggctcgccgctctgtgaaagaggggaaaacctgggtacagagctctgggcgcttgcaggtaaaggatccattgatgacgaataaatggcgaatcaagtacttagcaatccgaattattaaacttgtctaccactaataactgtcccgaatgaattggtcaatacttccacactgttacataagttaatcttaggtgaaataccgacttcataacttttacgcattatatgcttttcctggtaatgtttgtaacaactttgttgaatgattgtcaaattagatgattaaaaattaaataaatgttgttatcgtgacctggatcactgttcaggataaaacccgacaaactatatgtaggttaattgtaatgattttgtgaacagcctatactgccgccaggtctccggaacaccctgcaatcccgagccacccagcgttgtaacgtgtcgttttcgcatctggaagcagtgttttgcatgacgcgcagttatagaaaggacgctgtctgacccgcaagcagaccggaggaaggaaatcccgacgtctccaggtaacagaaagttaacctctgtgcccgtagtccccagggaataataagaacagcatgtgggcgttattcatgataagaaatgtgaaaaaacaaagacctgttaatctggacctacagaccatccggttccccatcacggcgatagcgtccattctccatcgcgtttccggtgtgatcacctttgttgcagtgggcatcctgctgtggcttctgggtaccagcctctcttcccctgaaggtttcgagcaagcttccgcgattatgggcagcttcttcgtcaaatttatcatgtggggcatccttaccgctctggcgtatcacgtcgtcgtaggtattcgccacatgatgatggattttggctatctggaagaaacattcgaagcgggtaaacgctccgccaaaatctcctttgttattactgtcgtgctttcacttctcgcaggagtcctcgtatggtaagcaacgcctccgcattaggacgcaatggcgtacatgatttcatcctcgttcgcgctaccgctatcgtcctgacgctctacatcatttatatggtcggttttttcgccaccagtggcgaactgacatatgaagtctggatcggtttcttcgcctctgcgttcaccaaagtgttcaccctgctggcgctgttttctatcttgattcatgcctggatcggcatgtggcaggtgttgaccgactacgttaaaccgctggcattgcgcctgatgctgcaactggtgattgtcgttgcactggtggtttacgtgatttatggattcgttgtggtgtggggtgtgtgatgaaattgccagtcagagaatttgatgcagttgtgattggtgccggtggcgcaggtatgcgcgcggcgctgcaaatttcccagagcggccagacctgtgcgctgctctctaaagtcttcccgacccgttcccataccgtttctgcgcaaggcggcattaccgttgcgctgggtaatacccatgaagataactgggaatggcatatgtacgacaccgtaaaagggtcggactatatcggtgaccaggacgcgattgaatatatgtgtaaaaccgggccggaagcgattctggaactcgaacacatgggcctgccgttctcgcgtcttgatgatggtcgtatctatcaacgtccgtttggcggtcagtcgaaaaacttcggcggcgagcaggcggcacgcactgcggcggcggctgaccgtaccggtcacgcactgttgcacacgctttatcagcagaacctgaaaaaccacaccaccattttctccgagtggtatgcgctggatctggtgaaaaaccaggatggcgcggtggtgggttgtaccgcactgtgcatcgaaaccggtgaagtggtttatttcaaagcccgcgctaccgtgctggcgactggcggggcagggcgtatttatcagtccaccactaacgcccacattaacactggcgacggcgtcggcatggctatccgcgcaggcgtaccggtgcaggatatggaaatgtggcagttccacccgaccggtattgccggtgcgggcgtactggtcaccgaaggttgccgtggtgaaggcggttatctgctgaacaaacatggcgaacgctttatggagcgttatgcgccgaacgccaaagacctggcgggccgtgacgtggtggcgcgttccatcatgattgaaatccgtgaaggtcgcggctgtgatggtccgtgggggccacatgcgaaactgaaactcgaccacctgggtaaagaagttctcgaatcccgtctgccgggtattctggaactctcccgtaccttcgctcacgttgatccggtgaaagagccgattccggttatcccaacctgtcactacatgatgggtggtattccgaccaaagtgaccggtcaggcgctgacggtgaacgagaaaggcgaagatgtggttgttccggggctgtttgccgttggtgaaatcgcttgtgtatcggtacacggcgctaaccgtctgggcggcaactcgctgctggacctggtggtctttggtcgcgcagcgggtctgcatctgcaagagtctatcgccgagcagggcgcattgcgcgatgccagcgagtctgatgttgaagcatctctggatcgtctgaaccgctggaacaataatcgtaacggtgaagatccggtggcgattcgtaaagcgctgcaagaatgtatgcagcataacttctcggtcttccgtgaaggtgatgcgatggcgaaagggcttgagcagttgaaagttatccgcgagcgtctgaaaaatgcccgtctggatgacacttccagcgagttcaacacccagcgcgttgagtgcctggaactggataacctgatggaaacggcgtatgcaacggctgtttctgccaacttccgtaccgaaagccgtggcgcacatagccgcttcgacttcccggatcgtgatgatgaaaactggctgtgccactccctgtatctgccagagtcggaatccatgacgcgccgaagcgtcaacatggaaccgaaactgcgcccggcattcccgccgaagattcgtacttactaatgcggagacaggaaaatgagactcgagttttcaatttatcgctataacccggatgttgatgatgctccgcgtatgcaggattacaccctggaagcggaagaaggtcgcgacatgatgctgctggatgcgcttatccagctgaaagagaaagatcccagcctgtcgttccgccgctcctgccgtgaaggtgtgtgcggttccgacggtctgaacatgaacggcaagaatggtctggcctgtattaccccgatttcggcactcaaccagccgggcaagaagattgtgattcgcccgctgccaggtttaccggtgatccgcgatttggtggtagacatgggacaattctatgcgcaatatgagaaaattaagccttacctgttgaataatggacaaaatccgccagctcgcgagcatttacagatgccagagcagcgcgaaaaactcgacgggctgtatgaatgtattctctgcgcatgttgttcaacctcttgtccgtctttctggtggaatcccgataagtttatcggcccggcaggcttgttagcggcatatcgtttcctgatcgatagccgtgataccgagactgacagccgcctcgacggtttgagcgatgcattcagtgtattccgctgtcacagcatcatgaactgcgtcagtgtatgtccgaaggggctgaacccgacgcgcgccatcggccatatcaagtcgatgttgttgcaacgtaatgcgtaattaaatgttgatgccggggaaatcccccggctattcaggaaatctttaaaaactgcccctgacactaagacagtttttaaaggttccttcgcgagccactacgtagacaagagctcgcaagtgaaccccggcacgcacataactgtgcgtggtagtatccacggcgaagtaagcataaaaaagatgcttaagggatcacgatgcagaacagcgctttgaaagcctggttggactcttcttacctctctggcgcaaaccagagctggatagaacagctctatgaagacttcttaaccgatcctgactcggttgacgctaactggcgttcgacgttccagcagttacctggtacgggagtcaaaccggatcaattccactctcaaacgcgtgaatatttccgccgcctggcgaaagacgcttcacgttactcttcaacgatctccgaccctgacaccaatgtaaagcaggttaaagtcctgcagctcattaacgcataccgcttccgtggtcaccagcatgcgaatctcgatccgctgggactgtggcagcaagataaagtggccgatctggatccgtctttccacgatctgaccgaagcagacttccaggagaccttcaacgtcggttcatttgccagcggcaaagaaaccatgaaactcggcgagctgctggaagccctcaagcaaacctactgcggcccgattggtgccgagtatatgcacattaccagcaccgaagaaaaacgctggatccaacagcgtatcgagtctggtcgcgcgactttcaatagcgaagagaaaaaacgcttcttaagcgaactgaccgccgctgaaggccttgaacgttacctcggcgcaaaattccctggcgcaaaacgcttctcgctggaaggcggtgacgcgttaatcccgatgcttaaagagatgatccgccacgctggcaacagcggcacccgggaagtggttctcgggatggcgcaccgtggtcgtctgaacgtgttggtgaacgtgctgggtaaaaaaccgcaagacttgttcgacgagtttgccggtaaacataaagaacacctcggcacgggtgacgtgaaataccacatgggcttctcgtctgacttccagaccgatggcggcctggtgcacctggcgctggcgtttaacccgtctcaccttgagattgtaagcccggtcgttatcggctctgttcgtgcccgtctggacagacttgatgagccgagcagcaacaaagtgctgccaattaccatccacggtgacgccgcagtgaccggacagggcgtggttcaggaaaccctgaacatgtcgaaagcgcgtggttatgaagttggcggtacggtacgtatcgttatcaacaaccaggttggtttcaccacctctaatccgctggatgcccgttctacgccgtactgtactgatatcggcaagatggttcaggcaccgattttccacgttaacgcggacgatccggaagccgttgcctttgtgacccgtctggcgctcgatttccgtaacacctttaaacgtgatgtcttcatcgacctggtatgctaccgccgtcacggccacaacgaagccgacgagccgagcgcaacccagccgctgatgtatcagaaaatcaaaaaacatccgacaccgcgcaaaatctacgctgacaagctggagcaggaaaaagtggcgacgctggaagatgccaccgagatggttaacctgtaccgcgatgcgctggatgctggcgattgcgtggtagcagagtggcgtccgatgaacatgcactctttcacctggtcgccgtacctcaaccacgaatgggacgaagagtacccgaacaaagttgagatgaagcgcctgcaggaactggctaaacgcatcagcacggtgccggaagcggttgaaatgcagtctcgcgttgccaagatttatggcgatcgccaggcgatggctgccggtgagaaactgttcgactggggcggcgcggaaaacctcgcttacgccacgctggttgacgaaggcattccggttcgcctgtcgggtgaagactccggtcgcggtaccttcttccaccgccacgcggtgatccacaaccagtctaacggttccacttacacgccgctgcaacacatccataacggccagggcgcgttccgtgtttgggactccgtactgtctgaagaagcagtgctggcgtttgaatacggttatgccaccgcagaaccacgcaccctgaccatctgggaagcgcagttcggtgacttcgccaacggtgcgcaggtggttatcgaccagttcatctcctctggcgagcagaaatggggccggatgtgtggtctggtgatgttgctgccgcacggttacgaagggcaggggccggagcactcctccgcgcgtctggaacgttatctgcaactttgtgctgagcaaaacatgcaggtttgcgtaccgtctaccccggcacaggtttaccacatgctgcgtcgtcaggcgctgcgcgggatgcgtcgtccgctggtcgtgatgtcgccgaaatccctgctgcgtcatccgctggcggtttccagcctcgaagaactggcgaacggcaccttcctgccagccatcggtgaaatcgacgagcttgatccgaagggcgtgaagcgcgtagtaatgtgttctggtaaggtttattacgacctgctggaacagcgtcgtaagaacaatcaacacgatgtcgccattgtgcgtatcgagcaactctacccgttcccgcataaagcgatgcaggaagtgttgcagcagtttgctcacgtcaaggattttgtctggtgccaggaagagccgctcaaccagggcgcatggtactgcagccagcatcatttccgtgaagtgattccgtttggggcttctctgcgttatgcaggccgcccggcctccgcctctccggcggtagggtatatgtccgttcaccagaaacagcagcaagatctggttaatgacgcgctgaacgtcgaataaataaaggatacacaatgagtagcgtagatattctggtccctgacctgcctgaatccgtagccgatgccaccgtcgcaacctggcataaaaaacccggcgacgcagtcgtacgtgatgaagtgctggtagaaatcgaaactgacaaagtggtactggaagtaccggcatcagcagacggcattctggatgcggttctggaagatgaaggtacaacggtaacgtctcgtcagatccttggtcgcctgcgtgaaggcaacagcgccggtaaagaaaccagcgccaaatctgaagagaaagcgtccactccggcgcaacgccagcaggcgtctctggaagagcaaaacaacgatgcgttaagcccggcgatccgtcgcctgctggctgaacacaatctcgacgccagcgccattaaaggcaccggtgtgggtggtcgtctgactcgtgaagatgtggaaaaacatctggcgaaagccccggcgaaagagtctgctccggcagcggctgctccggcggcgcaaccggctctggctgcacgtagtgaaaaacgtgtcccgatgactcgcctgcgtaagcgtgtggcagagcgtctgctggaagcgaaaaactccaccgccatgctgaccacgttcaacgaagtcaacatgaagccgattatggatctgcgtaagcagtacggtgaagcgtttgaaaaacgccacggcatccgtctgggctttatgtccttctacgtgaaagcggtggttgaagccctgaaacgttacccggaagtgaacgcgtctatcgacggcgatgacgtggtttaccacaactatttcgacgtcagcatggcggtttctacgccgcgcggcctggtgacaccggtactgcgtgatgtcgataccctcggcatggcagacatcgagaagaaaatcaaagagctggcagtcaaaggccgtgacggcaagctgaccgttgaagatctgaccggtggcaacttcaccatcaccaacggtggtgtgttcggttccctgatgtctacgccgatcatcaacccgccgcagagcgcaattctgggtatgcacgctatcaaagatcgtccgatggcggtgaatggtcaggttgagatcctgccgatgatgtacctggcgctgtcctacgatcaccgtctgatcgatggtcgcgaatccgtgggcttcctggtaacgatcaaagagttgctggaagatccgacgcgtctgctgctggacgtgtagtagtttaagcttcacctgcactgtagaccgacgtggatagggtgtcggtctacggtttaaaagataacgattactgaaggatggacagaacacatgaacttacatgaatatcaggcaaaacaactttttgcccgctatggcttaccagcaccggtgggttatgcctgtactactccgcgcgaagcagaagaagccgcttcaaaaatcggtgccggcccgtgggtagtgaaatgtcaggttcacgctggtggccgcggtaaagcgggcggtgtgaaagttgtaaacagcaaagaagacatccgtgcttttgcagaaaactggctcggcaagcgtctggtaacgtatcaaacagatgccaatggccaaccggttaaccagattctggttgaagcagcgaccgatatcgctaaagagctgtatctcggtgccgttgtagaccgtagttcccgtcgcgtggtctttatggcctccaccgaaggcggcgtggaaatcgaaaaagtggcggaagaaactccgcacctgatccataaagttgcgcttgatccgctgacaggcccgatgccgtatcagggacgcgagctggcgttcaaactgggtctggaaggtaaactggttcagcagttcaccaaaatcttcatgggcctggcgaccattttcctggagcgcgacctggcgttgatcgaaatcaacccgctggtcatcaccaaacagggcgatctgatttgcctcgacggcaaactgggcgctgacggcaacgcactgttccgccagcctgatctgcgcgaaatgcgtgaccagtcgcaggaagatccgcgtgaagcacaggctgcacagtgggaactgaactacgttgcgctggacggtaacatcggttgtatggttaacggcgcaggtctggcgatgggtacgatggacatcgttaaactgcacggcggcgaaccggctaacttccttgacgttggcggcggcgcaaccaaagaacgtgtaaccgaagcgttcaaaatcatcctctctgacgacaaagtgaaagccgttctggttaacatcttcggcggtatcgttcgttgcgacctgatcgctgacggtatcatcggcgcggtagcagaagtgggtgttaacgtaccggtcgtggtacgtctggaaggtaacaacgccgaactcggcgcgaagaaactggctgacagcggcctgaatattattgcagcaaaaggtctgacggatgcagctcagcaggttgttgccgcagtggaggggaaataatgtccattttaattgataaaaacaccaaggttatctgccagggctttactggtagccaggggactttccactcagaacaggccattgcatacggcactaaaatggttggcggcgtaaccccaggtaaaggcggtactacccacctcggcctgccggtgttcaacaccgtgcgtgaagctgttgctgctactggcgctaccgcttctgttatctacgtaccagcaccgttctgcaaagactccattctggaagctattgatgcaggcatcaaactgattatcaccatcactgaaggcatcccgacgctggatatgctgactgtgaaagtgaaactggacgaagccggcgttcgtatgatcggcccgaactgcccgggcgttatcactccgggtgaatgcaaaatcggtatccagccgggtcacattcacaaaccgggtaaagtgggtatcgtttcccgttccggtacactgacctatgaagcggttaaacagaccacggattacggtttcggtcagtcgacctgtgttggtatcggcggtgacccgatccctggctctaactttatcgacattctcgaaatgttcgaaaaagatccgcagaccgaagcgatcgtaatgatcggtgagatcggcggtagcgctgaagaagaagcggcagcgtacatcaaagagcatgttaccaagccagttgtgggttacatcgctggtgtgactgcgccgaaaggcaaacgtatgggccacgcgggtgccatcattgccggtgggaaagggactgcggatgagaaatttgctgctctggaagccgcaggcgtgaaaaccgttcgcagcctggcggatatcggtgaagcactgaaaactgttctgaaataaatatctgtaataagaaatagccctcgccgcttccctctacaggaatggcgaagggctgtcggtttcgacatggttggccatcgtatgatggccttttttgtgcttatcgcgatgattttcgttgcgctatcagggtaaatttatagtcatcggtattaaaagcgttgcggctatattcaaacacccgaccatcaactaaatatccacgcgatactttttcaagaatcggctttgtctggctgatattaagcagacggctcatctcttcggttggcatcagaggaatgatttcctgttcgctacgatcgataaccattttcttcacttcttcaataaagtgatattttgaattttccatgacctgccaggtgagatccgggaacaacgcaagcggcatccaggtttcttccagcgccattggcttttgcttgcgatagcgcacgcgcttcacatgccacacacgatcctgcgcggtgatttgtagctgttgctgaagaaaatcgtcagccggaatcacttcaaatatcaggacttcactgtgtgtatcgacgtgacggtccgacagtttttcatcaaaactggttaactgaaaaatatcgtaattgacccgctcttctttgacgtaagtcccgctgccctgaatgctttcgaggatctgttgctcgactaactggcgcaaagcctgacgcaccgtaacccggctgacgccaaactctgtttgtaatgccgattcggtaggtaacgcatcgccaggtttaagctcgccacgcgcaatttgttcacgaatgcgatcggcaatctgccggtataagggcttgtgtcccatttttagtatctcattaatacgaatttagccattatgcccgataaattcatcctgtaaataatacaaatacaatacaaataatttcaatcaagtgaaattgatcacataatggtattgttttatcgggcacactggcgcgactataaaaacgatcaagtgaggatcatgatgaatctgacgactctgacccaccgcgatgcgttgtgtctgaatgcgcgctttaccagccgtgaagaggccatccacgcgttgactcaacgtcttgctgctctggggaaaatttccagtactgagcaatttctggaagaagtgtatcgccgtgaaagccttggcccgaccgccttaggtgaagggttggctgtgccgcatggcaaaactgctgcggtaaaagaagcggcgtttgcggtcgccacactcagcgagccgcttcagtgggaaggcgttgatggcccggaagcggttgatttagtggtgctgctggcgattccccccaatgaagcgggtactacgcatatgcaactgctgacagcgctgaccacgcgcctggcggatgatgagattcgggcgcgtatacagtcggcgacgacgcctgatgagttgctctcggcgctggatgacaagggaggcacgcaaccttctgcctctttttccaacgcgccaactatcgtctgcgtaacggcctgtccggcgggtattgctcacacctatatggctgcggaatatctggaaaaagccggacgcaaactcggcgtaaatgtttacgttgaaaaacaaggcgctaacggcattgaagggcgtttaacggcggatcaactcaatagtgcaaccgcctgtatttttgcggctgaagtcgccatcaaggagagtgagcgttttaatggcattcccgcgctttcagtgcctgttgccgagccgattcgccatgcagaagcgttgatccaacaagcgcttaccctcaagcgtagcgatgagacgcgtaccgtacagcaagatacgcaaccggtgaaaagtgtcaaaacggagctgaaacaggcactgttgagcggaatctcttttgccgtaccgttgattgtcgcggggggcacggtgctggcggtcgcggtattactgtcgcaaatcttcgggctacaagatctgtttaatgaagaaaactcctggctgtggatgtaccgcaagctgggcggcgggctgctcggaattttgatggtaccggtgctcgcggcctataccgcctattctctggcagataaaccggcgttagcgccaggctttgcggctggacttgccgccaacatgatcggctccgggtttctcggcgcggtcgttggcggattgatagccggttacttgatgcgctgggtgaaaaatcacttgcgtcttagcagtaaattcaatggattcctgactttttatctctacccggtgctcggtacgttgggagcgggcagtctgatgctgtttgtggtgggagaacctgtcgcctggatcaataactcgcttaccgcctggctgaacggtctgtcaggaagtaacgcgctgttgctgggtgccattctcggttttatgtgttcctttgaccttggagggccagtgaacaaagccgcttatgcattctgcctgggcgcaatggcgaacggcgtttacggcccgtatgccattttcgcctccgtcaaaatggtttcggcatttaccgtaaccgcttccacgatgctcgcaccgcgcctgtttaaagagtttgaaattgagaccgggaaatccacctggctgttagggctggcaggtattaccgaaggggcgatcccgatggcgattgaagatccgctgcgggttattggttcgtttgtgctgggctctatggtaacgggcgctattgtcggtgcgatgaatatcggcctttcgacacccggtgccggcattttctcgctctttttacttcatgataatggcgcgggcggtgttatggcggcaattggctggtttggtgcggcattggtgggggctgcaatctcgactgcaattctcctgatctggcggcgtcacgcggttaagcatggcaactatctgactgatggcgtaatgccataaacaaaaaggaaacgacgatgaaagcggtatctcgcgttcacatcaccccgcatatgcattgggatcgggagtggtatttcaccaccgaagagtcacgcattctgctggtcaataatatggaagagatcctgtgccgactggaacaggacaacgaatacaaatattacgtactcgacgggcaaacggcgatcctcgaagattatttcgcggtgaaaccggaaaacaaagaccgcgtgaagaaacaggtagaagccggcaagttgattatcggcccctggtatacccagaccgataccacgattgtttctgcggaatccatcgtccgtaatctgatgtacggaatgcgtgactgcctcgcgtttggcgagccgatgaaaataggttatttaccagattcctttggcatgtccgggcaactgccgcatatctacaatggatttggcattacccgcaccatgttctggcgcggatgttcggagcgccacggtactgataaaaccgagtttttgtggcaaagcagtgacggtagcgaagtgacggcgcaggtgctgccgctgggctacgccatcggtaagtacttacctgccgacgaaaacggattacgtaaacgcctcgacagttattttgacgtgctggaaaaagcgtctgtaaccaaagagattttgctgccgaatgggcatgaccagatgccattgcagcaaaatatcttcgaagtgatggataagctacgtgagatctaccctcaacgtaagtttgtgatgagccgctttgaagaggtatttgagaagatcgaagcgcagcgtgaaagtctggccaccctgaaaggtgaatttatcgatggcaaatatatgcgcgtacatcgcaccatcggttccacgcgcatggatatcaaaattgcccacgcacgtattgaaaataagattgttaatctgctggaaccgctggcaacgctggcctggacgttgggttttgaataccaccacggcttgctggagaaaatgtggaaagagatcttaaaaaatcatgcccacgacagtatcggttgttgttgcagtgacaaagttcatcgcgaaattgtcgcccgcttcgaactggctgaagacatggcggataatctgctgcgtttctacatgcgcaaaattgccgataacatgccacagagtgatgccgacaaactcgtgctgtttaacctgatgccctggccgcgggaagaagttattaacaccactgtgcggctgcgcgctagccagtttaatctacgagacgatcgcggtcagcctgtaccgtattttattcgccatgcccgtgagatcgatccaggcctaatcgatcggcaaatagttcattacggtaattacgatccctttatggagtttgatatacagatcaaccagattgtcccttctatgggctatcgcacgctttatatcgaagcgaatcagcctggcaacgtgattgcggcaaaaagtgacgctgaagggatactggaaaatgctttctggcaaattgcgctcaatgaggatggaacgctacaactggtagataaagatagcggtgtgcgctatgaccgggtgttgcaaattgaagaaagctctgatgatggtgatgaatatgactattcacccgcaaaagaagagtgggtaatgacttctgcaacagcgaaaccgcaatgcgagattactcatgaggcctggcagagcagggctgttatccgctatgacatggcggtgccgctcaatttgttggaacgaagcgtccggcaatccacgggcagagtaggggtggagatggttgtcactctgagtcataacagcagacgtattgatgtggatatcaaccttgataaccaggctgacgatcatcgccttcgcgtcctgatccctacatcttttaacaccgatagtgttctggcagatacccagtttggttcgctaacgcgccccgtgaacgacagtgcaatgaacaactggcagcaagaaggctggaaagaagcgccggttccggtatggaatatgctcaactatgcagccttacaggaagggcgtaacggcatggctgtctttagcgaagggctacgtgaatttgaagtcatcggtgaagagaagaaaacctttgccattacgttgctgcgtggcgtgggcttactgggcaaagaagatctgtttttaaggcctgggcggccttcgggaattaaaatgccagtcccggactcacaactacgtggtctgctttcttgtcgcctaagtttattgagttataccggtacgccaaccgccgctggtgtagctcagcaggcgcgagcatggctgactccagtacagtgttacaacaaaatcccatgggatgcgatgaagctcaacaaagccggattcaacgtgccggaaagttatagtttgttgaaaatgcccccagtgggatgcctgataagcgcacttaagaaagctgaagaccgacaagaagtgattttacggctgtttaatccggctgaatcagcaacctgtgatgcgactgttgctttcagtcgcgaggtgatttcttgctcagaaacgatgatggatgaacacattaccaccgaggaaaatcaaggttcaaatctatcggggccttttttacccggccagtcacggacgttcagttaccggcttgcctgaatagcaatcaaaccgaagccacatatgcgcggccagattgttgacaaagggcgctttgttcatgccggatacggcatgaacgctttattcggtctacaaaagcaggcaaattcaatatattgcagagatgatgtagacactggcaagcgtagcgcatcaggtaattttgcgtttatcttcactctcaagccacgtatatgtggctttatttttaacaaaataataaccctgggtgagttaattataatataattataagttaattaaatgttaatatcagcggggtggatttatgcctttattagtaatcctgaaactctgcgtcgtattagccagtgaccaaaaaaagaattaaggtcaaccgtgctgtttttgcttcgtctctttttatctttaattgccaaccgaaactaatttcagccttataactcacacattttaaacataaatgtcactaaagttaccttattgaaacatgattaacataatttgtaggaattgatatttatcaatgtataagtcttggaaatgggcatcaaaaagagataaattgttctcgatcaaattggctgaaaggcggtaatttagctataaattgatcaccgtcgaaaaatgcaaatttgcttcaacaaaaacctgtttattgtaaggattttgcggcgtaatatatacgtgggatcaatttgagtttttattaacatgtttgcaacctttctttacgccgtttttgtgtgcattcacatggtatgatgaaagtgttcaaacaaatttctattggggcatgcgtgtgaccctttctaacggggttcactctcggagtcttcatgcgatgagcaaggagtcatgatgttagatatagtcgaactgtcgcgcttacagtttgccttgaccgcgatgtaccacttcctttttgtgccactgacgctcggtatggcgttcctgctggccattatggaaacggtctacgtcctctccggcaaacagatttataaagatatgaccaagttctggggcaagttgtttggtatcaacttcgctctgggtgtggctaccggtctgaccatggagttccagttcgggactaactggtcttactattcccactatgtaggggatatcttcggtgcgccgctggcaatcgaaggtctgatggccttcttcctcgaatccacctttgtaggtctgttcttcttcggttgggatcgtctgggtaaagttcagcatatgtgtgtcacctggctggtggcgctcggttcaaacctgtccgcactgtggattctggttgcgaacggctggatgcaaaacccaatcgcgtccgatttcaactttgaaactatgcgtatggagatggtgagcttctccgagctggtgcttaacccggttgctcaggtgaaattcgttcacactgtagcgtctggttatgtgactggcgcgatgttcatcctcggtatcagcgcatggtatatgctgaaaggtcgtgacttcgccttcgctaaacgctcctttgctatcgctgccagcttcggtatggctgctgttctgtctgttattgttctgggtgatgaatccggctacgaaatgggcgacgtgcagaaaaccaaactggctgctattgaagccgagtgggaaacgcaacctgcgcctgctgcctttactctgttcggcattcctgatcaggaagaggagacgaacaaatttgcgattcagatcccttacgcactgggcatcattgcaacgcgttccgtggataccccggttatcggcctgaaagagctgatggtgcagcatgaagaacgcattcgtaacgggatgaaggcgtactctctgctcgaacaactgcgttctggttctaccgaccaggcggttcgtgaccagttcaatagcatgaagaaagacctcggttacggtctgctgctgaaacgctatacgccaaacgtggctgatgcgactgaagcgcagattcaacaggcaaccaaagactccatcccgcgtgtagcgccgctgtactttgcgttccgtatcatggtggcgtgtggcttcctgctgctggcaatcatcgcgctctctttctggagtgtcatccgcaaccgcattggcgagaaaaaatggcttctgcgcgccgcgctgtacggtattccgctgccgtggattgctgtagaagcgggctggttcgtggctgaatatggccgccaaccgtgggctatcggtgaagtgctgccgacagctgtggcgaactcgtcactgaccgcaggcgatctcatcttctcaatggtgctgatttgcggcctgtataccctgttcctggtggcagaattgttcttaatgttcaaatttgcacgcctcggcccaagcagcctgaaaaccggtcgctatcactttgagcagtcttccacgactactcagccggcacgctaagacaggagtcgtcaaatgatcgattatgaagtattgcgttttatctggtggctgctggttggcgttctgctgattggttttgcagtcactgacggtttcgacatgggggtgggcatgctcacccgtttcctcggtcgtaacgacaccgagcgtcgaattatgattaactccattgcaccacactgggacggtaaccaggtttggctgatcaccgcgggcggcgcactctttgctgcctggccgatggtctatgccgctgcgttctccggcttctatgtggcgatgatcctcgtgctggcgtctttgttcttccgtccggtcggttttgactaccgctccaagattgaagaaacccgctggcgtaacatgtgggactggggcatcttcattggtagcttcgttccgccgctggtaattggtgtagcgttcggtaacctgttgcagggcgtaccgttcaacgttgatgaatatctgcgtctgtactacaccggtaacttcttccagttgcttaacccgttcggcctgctggcaggcgtggtgagcgtagggatgatcattactcagggcgcaacctatctgcaaatgcgtaccgtgggcgaactgcacctgcgtacccgtgcaacggctcaggtggctgcgctggtgacactggtctgtttcgcactggctggcgtatgggtgatgtacggtatcgatggttatgtcgtgaaatcgacaatggaccattacgcagcctctaacccactgaataaagaagtggttcgtgaagctggcgcatggctggttaacttcaacaacacgccaattctgtgggctattccggcactgggtgtggttctgccgctgctgaccatcctgactgcacgtatggataaagccgcgtgggcgtttgtgttctcctccctgacgctggcctgcatcatcctgacagccggtatcgcaatgttcccgtttgtgatgccgtccagcaccatgatgaacgcaagtctgacaatgtgggatgcaacttccagccagctgacgcttaacgtcatgacctgggttgcggtggttctggtaccgatcattctgctctacaccgcctggtgttactggaaaatgttcggtcgtatcaccaaagaagatattgaacgtaacacccactctctgtactaagtaaggagctaaaaatgtggtatttcgcatggattctgggaacgcttcttgcctgttcgtttggggtaatcaccgcgctggcgcttgaacacgtcgaatcaggcaaagccggtcaagaagacatctgatgagtaagattatcgcgactttgtatgcggtaatggacaagcgccccctgcgggcgctttccttcgtgatggcgcttctgttagcaggatgtatgttttgggacccatctcgttttgccgcgaagaccagtgaactggaaatctggcatggtttattgctgatgtgggccgtctgtgctggtgtgattcacggcgtgggctttcgtccgcagaaggttctttggcaagggattttttgcccattgcttgccgatattgttctcattgtcgggctgattttcttcttcttttaaatcagaattctctttaaaaaattatgggccgctccaggcccataaatttttacgctcccttaacttgccctcattcccaaacctcaatcgcgcgcgtatagtagcagcgtttaaaagctctaacttttgttgcattaccgggatgtaaagtgaatacaacgctgtttcgatggccggttcgcgtctactatgaagataccgatgccggtggtgtggtgtaccacgccagttacgtcgctttttatgaaagagcacgcacagagatgctgcgtcatcatcacttcagtcagcaggcgctgatggctgaacgcgttgcctttgtggtacgtaaaatgacggtggaatattacgcacctgcgcggctcgacgatatgttcgaaatacagactgaaataacatcaatgcgtggcacctctttggttttcacgcaacgtattgtcaacgccgagaatactttgctgaatgaagcagaggttctggttgtttgcgttgacccactcaaaatgaagcctcgtgcgcttcccaagtctattgtcgcggagtttaagcagtgactgacatgaatatccttgatttgttcctgaaggctagccttctggttaaacttatcatgttgattttgattggtttttcaatcgcatcttgggccattattatccagcggacccgtattcttaacgcagcggcgcgcgaagccgaagcgtttgaagataaattctggtctggaatcgaactctctcgcctctatcaagagagccaggggaaacgggataatctgactggttcggaacaaatcttttacagcgggttcaaagagtttgtgcgcctgcatcgtgccaatagccatgcgccggaagccgtagtggaaggggcgtcgcgtgctatgcgtatctccatgaaccgtgaacttgaaaatctggaaacgcacattccgttcctcggtacggttggctccatcagcccgtatattggtctgtttggtacggtctgggggatcatgcacgcctttatcgccctcggggcggtaaaacaagcaacactgcaaatggttgcgcccggtatcgcagaagcgttgattgcgactgcaattggtctgttcgccgcaattccggcggtaatggcttataaccgcctcaaccagcgcgtaaacaaactggaactgaattacgacaactttatggaagagtttaccgcgattctgcaccgccaggcgtttaccgttagcgagagcaacaaggggtaagccatggccagagcgcgtggacgaggtcgtcgcgatctcaagtccgaaatcaacattgtaccgttgctggacgtactgctggtgctgttgctgatctttatggcgacagcgcccatcatcacccagagcgtggaggtcgatctgccagacgctactgaatcacaggcggtgagcagtaacgataatccgccagtgattgttgaagtgtctggtattggtcagtacaccgtggtggttgagaaagatcgcctggagcgtttaccaccagagcaggtggtggcggaagtgtccagccgtttcaaggccaacccgaaaacggtctttctgatcggtggcgcaaaagatgtgccttacgatgaaataattaaagcactgaacttgttacatagtgcgggtgtgaaatcggttggtttaatgacgcagcctatctaaacatctgcgtttcccttgcttgaaagagagcgggtaacaggcgaacagtttttggaaaccgagagtgtcaaaggcaaccgaacaaaacgacaagctcaagcgggcgataattatttcagcagtgctgcatgtcatcttatttgcggcgctgatctggagttcgttcgatgagaatatagaagcttcagccggaggcggcggtggttcgtccatcgacgctgtcatggttgattcaggtgcggtagttgagcagtacaaacgcatgcaaagccaggaatcaagcgcgaagcgttctgatgaacagcgcaagatgaaggaacagcaggctgctgaagaactgcgtgagaaacaagcggctgaacaggaacgcctgaagcaacttgagaaagagcggttagcggctcaggagcagaaaaagcaggctgaagaagccgcaaaacaggccgagttaaagcagaagcaagctgaagaggcggcagcgaaagcggcggcagatgctaaagcgaaggccgaagcagatgctaaagctgcggaagaagcagcgaagaaagcggctgcagacgcaaagaaaaaagcagaagcagaagccgccaaagccgcagccgaagcgcagaaaaaagccgaggcagccgctgcggcactgaagaagaaagcggaagcggcagaagcagctgcagctgaagcaagaaagaaagcggcaactgaagctgctgaaaaagccaaagcagaagctgagaagaaagcggctgctgaaaaggctgcagctgagaagaaagcggcagcagagaaagctgcagccgacaaaaaagcagcagaaaaagcggctgctgaaaaggcagcagctgataagaaagcagcggcagaaaaagccgccgcagacaaaaaagcggcagcggcaaaagctgcagctgaaaaagccgctgcagcaaaagcggccgcagaggcagatgatattttcggtgagctaagctctggtaagaatgcaccgaaaacggggggaggggcgaaagggaacaatgcttcgcctgccgggagtggtaatactaaaaacaatggcgcatcaggggccgatatcaataactatgccgggcagattaaatctgctatcgaaagtaagttctatgacgcatcgtcttatgcaggcaaaacctgtacgctgcgcataaaactggcacccgatggtatgttactggatatcaaacctgaaggtggcgatcccgcactttgtcaggctgcgttggcagcagctaaacttgcgaagatcccgaaaccaccaagccaggcagtatatgaagtgttcaaaaacgcgccattggacttcaaaccgtaatcgcgatgttgactgttcggacggtcaacatcaggcaccggttgccacggggttctggtagttttgtgtattttagtttgttaacattctgctaaattatcgtgggccatcggtccagataagggagatatgatgaagcaggcattacgagtagcatttggttttctcatactgtgggcatcagttctgcatgctgaagtccgcattgtgatcgacagcggtgtagattccggtcgtcctattggtgttgttcctttccagtgggcggggcctggtgcggcacctgaagatattggcggcatcgttgctgctgacttgcgtaacagcggtaaatttaatccgttagatcgcgctcgtctgccacagcagccgggtagtgcgcaggaagtacaaccagctgcatggtccgcactgggcattgacgctgtagttgtcggtcaggtcactccgaatccggatggttcttacaatgttgcttatcaacttgttgacactggcggcgcaccgggtactgtacttgctcagaactcgtacaaagtgaacaagcagtggctgcgttatgctggtcataccgccagtgatgaagtgtttgaaaaactgaccggcattaaaggtgcgttccgtactcgtattgcctacgttgttcagaccaacggcggtcagttcccgtatgaactgcgcgtatctgactatgacggttacaaccagtttgtcgttcaccgttcaccgcagccgctgatgtctccggcgtggtcaccagacggttctaaactggcttatgtgaccttcgaaagcggtcgttccgcgctggttattcagacgctggcaaatggcgctgtacgtcaggtggcttcattcccgcgtcacaacggtgcacctgcattctcgccagacggcagcaaactggcattcgccttgtcgaaaaccggtagtctgaacctgtacgtaatggatttggcttctggtcagatccgccaggtgactgatggtcgcagtaacaataccgaaccgacctggttcccggatagccagaacctggcatttacttctgaccaggccggtcgtccgcaggtttataaagtgaatatcaacggcggtgcgccacaacgtattacctgggaaggttcgcagaaccaggatgcggatgtcagcagcgacggtaaatttatggtaatggtcagctccaatggtgggcagcagcacattgccaaacaagatctggcaacgggaggcgtacaagttctgtcgtccacgttcctggatgaaacgccaagtctggcacctaacggcactatggtaatctacagctcttctcaggggatgggatccgtgctgaatttggtttctacagatgggcgtttcaaagcgcgtcttccggcaactgatggacaggtcaaattccctgcctggtcgccgtatctgtgataataattaattgaatagtaaaggaatcattgaaatgcaactgaacaaagtgctgaaagggctgatgattgctctgcctgttatggcaattgcggcatgttcttccaacaagaacgccagcaatgacggcagcgaaggcatgctgggtgccggcactggtatggatgcgaacggcggcaacggcaacatgtcttccgaagagcaggctcgtctgcaaatgcaacagctgcagcagaacaacatcgtttacttcgatctggacaagtacgatatccgttctgacttcgctcaaatgctggatgcacatgcaaacttcctgcgtagcaacccgtcttacaaagtcaccgtagaaggtcacgcggacgaacgtggtactccggaatacaacatctccctgggtgaacgtcgtgcgaacgccgttaagatgtacctgcagggtaaaggcgtttctgcagaccagatctccatcgtttcttacggtaaagaaaaacctgcagtactgggtcatgacgaagcggcatactccaaaaaccgtcgtgcggtactggtttactaagagaattgcatgagcagtaacttcagacatcaactattgagtctgtcgttactggttggtatagcggccccctgggccgcttttgctcaggcaccaatcagtagtgtcggctcaggctcggtcgaagaccgcgtcactcaacttgagcgtatttctaatgctcacagccagcttttaacccaactccagcaacaactttctgataatcaatccgatattgattccctgcgtggtcagattcaggaaaatcagtatcaactgaatcaggtcgtggagcggcaaaagcagatcctgttgcagatcgacagcctcagcagcggtggtgcagcggcgcaatcaaccagcagcgatcaaagcggtgcggcggcatcaacgacgccgacagctgatgctggtactgcgaatgctggcgcgccggtgaaaagcggcgatgcaaacacggattacaatgcagctattgcgctggtgcaggataaatcccgccaggatgacgcaatggtggcatttcagaatttcatcaaaaattaccctgattcaacttacctgccaaacgccaattattggctgggtcagttaaactacaacaagggtaaaaaagatgatgcggcgtactattttgcttcggtagtgaaaaactatccgaagtcaccaaaggctgctgatgcgatgtttaaagtcggcgtcatcatgcaggacaaaggtgacaccgcaaaagcgaaagccgtataccagcaggttatcagtaaataccctggtactgatggcgctaaacaggcacaaaaacgtctgaacgcgatgtaatgcataacacacgaccagaagtcgcattatttctggtcgtgtcgtgcgaatcataagcagttgagtgatctgcatcgaaatttttgttgcgctcaagtctgaaatcagtaatatatgccgccgttgccacgggatatcaaacaaaccgaaagcaacgaaaaagtgggtcgttagctcagttggtagagcagttgacttttaatcaattggtcgcaggttcgaatcctgcacgacccaccaatcgctaaggtggaagcggtagtaaaacgtgaaggataacgttgcatcagcaacggcccgaagggcgagacgaagtcgagtcatcctgcacgacccaccactaacatagttagttgtagtatccagcgtagtattgggtgattagctcagctgggagagcacctcccttacaaggagggggtcggcggttcgatcccgtcatcacccaccaccgggtcgttagctcagttggtagagcagttgacttttaatcaattggtcgcaggttcgaatcctgcacgacccaccactaattacggtgggttcggtggaagtagtttgtagtatccagcgcagtatcgggtgattagctcagctgggagagcacctcccttacaaggagggggtcggcggttcgatcccgtcatcacccaccactcgggtcgttagctcagttggtagagcagttgacttttaatcaattggtcgcaggttcgaatcctgcacgacccaccaattttaacatcaaactcagatgttaagcgtgaaggataacgttgcgccagcaacggcccgtagggcaagcgaagcgagtcatcctgcacgacccaccaatcttaaagattggccccgagtagaaatctttcaggtaacacccgtatgggtcgttagctcagttggtagagcagttgacttttaatcaattggtcgcaggttcgaatcctgcacgacccaccatcctgaatgattaaagcagcataatcccgcaaggggtcgttagctcagttggtagagcagttgacttttaatcaattggtcgcaggttcgaatcctgcacgacccaccaatgtaaaaaagcgccctaaaggcgcttttttgctatctgcgatactcaaagattcgaacctgcagcaggtttgagttgagcgcagcgaaacaacggagccgctcgcggcgacggcccgaagggcgagcgaagcgagtcatcctgcacgacccaccaatgtaaaaaagcgccctaaaggcgcttttttgctattcaggcatcctcaatttcactttgtaaacctgatgacatcgtcagagcttactgtgcaagcaactctacgtcggtggaattaggcgtaattcgagtgacttttccccaccattcgactatcttgtttagcatataaaacaaattacaccgataacagcgaatattacgctaatgtcggttttaacgttaagcctgtaaaacgagatggtaagatgagcgtaatgtttgatccagacacggcgatttatcctttccccccgaagccgacgccgttaagcattgatgaaaaagcgtattaccgcgagaagataaaacgtctgctaaaagaacgtaatgcggtgatggttgcccactactataccgatcccgaaattcaacaactggcagaagaaaccggtggctgtatttctgattctctggaaatggcgcgcttcggtgcaaagcatcccgcttctactttgttagtcgctggggtgagatttatgggagaaaccgccaaaattctcagtccggaaaaaacaattctgatgccgacacttcaggctgaatgttcactggatctcggctgccctgttgaagaatttaacgcattttgcgatgcccatcccgatcgtactgtcgtcgtctacgccaacacttctgctgcggtaaaagcgcgcgcagattgggtggtaacttcaagcattgccgtcgaacttattgatcatcttgatagtttgggtgaaaaaatcatctgggcacccgacaaacatctggggcgttacgtgcaaaaacagacgggtggagacattctatgctggcagggtgcctgtattgtgcatgatgaatttaagactcaggcgttaacccgcttgcaagaagaatacccggatgctgccatactggtgcatccagaatcaccacaagctattgtcgatatggcggatgcggtcggttccaccagtcaactgatcgctgctgcgaaaacattgccacatcagcggcttatcgtggcaaccgatcggggcattttctacaaaatgcagcaggcagtgccagataaagagttactggaagcaccaaccgcaggtgagggtgcaacctgccgcagctgcgcgcattgtccgtggatggccatgaatggccttcagtccatcgcagaggcattagaacaggaaggaagcaatcacgaggttcatgttgatgaaaggctgcgagagagggcgctggtgccgctcaatcgtatgctggattttgcggctacactacgtggataacgaataataaggcgtaacgttacgctttgggggaaagatggatttttttagtgtgcagaatatcctggtacatataccaataggggcaggcggttatgatctctcatggatcgaagcggtaggcacgatcgccgggttgctgtgtattggccttgccagtctggagaagatcagcaactacttctttggcctgatcaacgtcaccttgtttggcattattttctttcagattcagctgtatgccagcctgctattacaggtgtttttctttgccgcgaatatttacggttggtatgcgtggtcgcgacaaaccagtcagaacgaggcggagttgaaaattcgctggttgccattgccgaaggcactcagctggttggcggtttgcgttgtttcgattggtctgatgacggtatttatcaatccggtgtttgcatttttgacccgcgtggcagtcatgatcatgcaagcattaggattacaggttgtgatgcctgaactgcaaccggacgctttcccgttctgggattcatgcatgatggtgttatctatcgtggcaatgattctgatgacgcgtaagtatgtggaaaactggctgttgtgggtgattattaacgtgattagcgtcgttatttttgcacttcagggcgtttacgccatgtctctggagtacatcatcctgacctttattgcgctcaacggcagccggatgtggatcaacagcgcacgtgaaagaggctcacgcgcgctgtcccattaatggtgatgatgtgaatggccagacaccccttcattcaggtggcagtctggcccatgacaaggttgatattccatctgaatggtggcgtgctcaatctgatagtgatccatcaggtagtgttggatctgatccaacaaggcatcgtgatcgtgtggcgggatcacctgcacatgcaacgtcatcaccggcttctcgcctaccatccatacatgtacatggtgcacattgcggacttccgggatttcccggcacatacgacgcttcagttcagcgatatccagcgataccggtgcaccttcaagtaattcattcacgctatctttcaacagtcgccacgcgctacgcagaaccagaagcgacaccagtatcgagagaatggggtcagcaggtgtccagccagtccagataataatcaacgcggcaataatagccccaaccgaacccagcaggtccccgagcacatgcagtgccgctgctcgtacgttgaggtttttctcttcgctgccgtgatgaagtaaccagaaagaaagtatatttgccagcaacccagccacggcaattgccatcatcatgccgccctcgaccggacgcggcgtgcggaagcgttctatcgcctcccagacaatcaaaatggtaattaccacgagggctatggcattcacaaacgccgcgagcgtggtcagtcttagccaaccgaaagtgtggcgaatggtgggaggacgacgtgaaaattgcacggcgagtagggcgaaaagcagggcggcagtatcggtcaacatatgacccgcatcggccagcaatgccagagaaccagaaagaaaaccaccaacgacttctaccagcataaacccggcagtcacgccgaaagcatacaacaagcgacgagcattattatcttctggcaggtgtgaggacgtgtgtgagtgtgagtgcgccatgacgagtcatcccttaattattctcacttaactttatgacatcatactgcttttagaagtgaaaaattaaaagggagagactccgctctcccattattggctattttgcagggttactgcgtggtaccgtcggttttggtatcgacatcattattgatgccatcaccggtttgtacctttttattgatatccggacagcgaccatctttgcacatggtgttcttgtgctcttcatctttggtcattccgtcattgttcattgaagaaccatccgaatgcagcattgtgccaccagaaccggtatttaccccgttattgtcgacgttatttggcgcgacattttcacgggcgtcaggggctacctggcccgcatcagctgcggcgtttgcctggccgttattagtttgcgctccgctatcggcagccagtgcggcaccgctggcaaggcttagagtggcagtcagaaataatgtggccagttttgtcattttcataggatgctcctgttatggtcgttatgtcggataacctcttccaacagtgcatttgcaggtgaatataaggcattggtttaagatttcagccaggttatgaaacgcagcagagaatcttgaaataattaacaaacaaaggagttacagttagaaattgtaggagagatctcgtttttcgcgacaatctggcgtttttcttgctaattccaggattaatccgttcatagtgtaaaaccccgtttacacattctgacggaagatatagattggaagtattgcattcactaagataagtatggcaacactggaacagacatgaattatcagaacgacgatttacgcatcaaagaaatcaaagagttacttcctcctgtcgcattgctggaaaaattccccgctactgaaaatgccgcgaatacggttgcccatgcccgaaaagcgatccataagatcctgaaaggtaatgatgatcgcctgttggtggtgattggcccatgctcaattcatgatcctgtcgcagcaaaagagtatgccactcgcttgctggcgctgcgtgaagagctgaaagatgagctggaaatcgtaatgcgcgtctattttgaaaagccgcgtaccacggtgggctggaaagggctgattaacgatccgcatatggataacagcttccagatcaacgacggtctgcgtatagcccgtaaattgctgcttgatattaacgacagcggtctgccagcggcgggtgagtttctcgatatgatcaccccacaatatctcgctgacctgatgagctggggcgcaattggtgcacgtaccaccgaatcgcaggtgcaccgcgaactggcgtctggtctttcttgtccggtaggttttaaaaatggcacagacggtacgattaaagtggctatcgatgccattaatgccgccggtgcgccgcactgcttcctgtccgtaacgaaatgggggcattcggcgattgtgaataccagcggtaacggtgattgccatatcattctgcgcggcggtaaagagcctaactacagcgcgaagcacgttgctgaagtgaaagaagggctgaacaaagcaggcctgccagcacaggtgatgatcgatttcagccatgctaactcgtccaaacaattcaaaaagcagatggatgtgtgtgctgacgtttgccagcagattgccggtggcgaaacagccattattggcgtgatggtggaaagctatctggtggaaggcaatcagagcctcgagagcggggagccgctggcctacggtaagagcatcaccgatgcctgcatcggctgggaagataccgatgctctgttacgtcaactggcgaatgcagtaaaagcgcgtcgcgggtaaggtttaattgtcggatgcgccgtcagagtggcgtatccgatgaatcaccacaggcctgataagtcgcgcagcgtcgcatcaggcaatgtgctccattgttagcaacaaaaatgccgactcacttgcagtcggctttctcattttaaacgaatgacatttacttcgctttaccctggtttgcaaccgccgctgctttcgctgcgatctcgtcagcattacccagataatagcgtttcagcggtttgaaattctcgtcgaactcatacaccagcggcacgccagtcgggatattaagctcaagaatctcttcttcgctcatgttatcaagatatttcaccagcgcacgtaaagagttaccgtgtgcagcgatgatcacgcgctcaccgctcttcatacgcggcagaatagtttcattccagtaagggatcacgcggtcaatggtcagcgccaggctttccgtcagcggcagttctttttcgctcagtttcgcgtaacgcggatcgtgacccggataacgctcatcatctttagtcagttccggcggagtcactgcaaaaccacgacgccactgtttcacctgctcgtcgccatacttttcagcagtttccgctttgttcagaccctgcaacgcaccgtagtgacgttcgttcagtttccaggatttctcaacgggcagccatgcctgatccagttcgtccagcacattccacagggtatggatagcgcgtttcagcacagaggtgtaagcaaagtcaaagctgtaaccttcctctttcagcagcttacctgctgcttttgcttcgcttacgcctttctcagacagatccacgtcgtaccaaccggtgaaacggttttctttgttccactgactttcgccatgacgaaccagaaccagcttagttacagccatatacttactcctcaaatcattttttaatgataataattctcattatattgccgtgacgaagcaacagcaatgcttacgcataaccatagcgaaaatagtgtcgcagtgtaaggttgttgtgaatattgagttgcaaatatgtcggtgtttgctggtgatttgagcaatataaggataaagccctcattacgagggcttcaggtgctactcagcaataaactgatattccgtcaggctggaatactcttcgccaggacgcaggaagcagtccggttgcggccattcagggtggtttgggctgtccggcagaaactcgctttccagtgccaggccttgccagtcggcgtaaggttcagttcctcttgatggcgtgccgccgaggaagttgccggagtagaattgcagagccggagcggtggtgtagaccttcagctgcaatttttcatctgctgaccagacatgcgccgccactttcttgccatcgcctttggcctgtaacaagaatgcgtgatcgtaacctttcactttgcgctgatcgtcgtcggcaagaaactcactggcgatgattttggcgctacggaaatcaaaagacgttccggcgacagatttcaggccgtcgtgcggaatgccgccttcatcaaccggcagatattcgtccgccagaatctgcaacttgtgattgcgcacgtcagactgctcgccgtcaagattgaaatagacgtgattagtcatattcaccgggcaaggtttatcaactgtggcgcgataagtaatggagatacggttatcgtcggtcagacgatattgcaccgttgcgccgagattacccgggaagccctgatcgccatcatctgaactcagggcaaacagcacctgacgatcgttctggttcacaatctgccagcgacgtttgtcgaacccttccgggccgccgtgcagctggttaacgccctgacttggcgaaagggtcacggtttcaccgtcaaaggtataacggctattggcgatgcggttggcataacgaccaatagaggcccccagaaacgcggcctgatcctgatagcattccgggctggcacagccgagcagcgcctcgcggacgctgccatcggaaagcggaatacgggctgaaagtaaagtcgcaccccagtccatcagcgtgactaccatccctgcgttgttacgcaaagttaacagtcggtacggctgaccatcgggtgccagtgcgggagtttcgttcagcactgtcctgctccttgtgatggtttacaaacgtaaaaagtctctttaatacctgtttttgcttcatattgttcagcgacagcttgctgtacggcaggcaccagctcttccgggatcaacgcgacgatacagccgccaaatccgccgccggtcatgcgtacgccacctttgtcgccaatcacagctttgacgatttctaccagagtgtcaatttgcggcacggtgatttcgaaatcatcgcgcatagaggcatgagactccgccatcaactcgcccatacgtttcaggtcgccctgctccagcgcgctggcagcttcaacggtgcgggcgttttcagtcaggatatgccgcacgcgtttcgccacgattgggtccagctcatgtgcaacagcgttgaactcttcaatggtgacatcgcgcagggctggctgctggaagaaacgcgcaccggtttcgcactgttcacgacgggtgttgtattcgctgccaaccagggtacgtttgaagttactgttgatgatgacgacagccacacctttcggcatggaaactgctttggtccccagtgaacggcagtcaatcagcaaggcatgatctttcttgccgagtgcggaaattagctgatccatgatcccgcagttacagccaacaaactggttttctgcttcctgaccgttaagcgcgatttgtgcgccgtccagcggcagatgataaagctgctgcaatacggttccgaccgcgacttccagtgaagcggaagaacttaacccggcaccctgcggcacattgccgctgatcaccatgtccacaccgccgaagctgttgttacgcagttgcagatgtttcaccacgccacgaacgtagttcgcccattgatagttttcatgcgcgacaatgggcgcattgagggaaaactcgtcgagctgattttcataatcggctgccatcacgcgaactttacggtcatcgcgtggtgcacagctgatcacggtttgataatcaatcgcgcagggcagaacgaaaccgtcgttgtagtccgtgtgttcaccaatcaaattcacgcggccaggcgcctgaatggtgtgagtggcagggtagccaaatgcgttggcaaacagagattgtgttttttctttcagactcatttcttacactccggattcgcgaaaatggatatcgctgactgcgcgcaaacgctctgctgcctgttctgcggtcaggtctcgctgggtctctgccagcatttcataaccaaccataaatttacgtacggtggcggagcgcaacagaggcggataaaagtgcgcgtgcagctgccagtgttgattctcttcgccattaaatggtgcgccgtgccagcccatagagtaggggaaggagcactggaagaggttgtcataacgactggtcagctttttcaacgccagcgccaaatcgctgcgctgggcgtcggtcaaatcggtgatccgcaaaacgtgggctttgggcagcagtagcgtttcgaacggccaggcagcccagtaaggcacaacggctaaccagtgttcggtttcgacaacggtacggctaccgtctgccagctcgcgctgaacataatccaccagcattggtgatttctgttcggcaaaatattctttttgcaggcggtcttcgcgctcagcttcgttaggcaggaagctatttgcccaaatctgtccgtgcggatgcgggttagagcagcccatcgccgcacctttgttttcaaagacctgcacccacgggtacgtttttcccagctctgcggtttgctcctgccaggttttgacgatttccgtcaatgccgcaacgctcagttctggcaacgttttactgtgatccggtgaaaagcagatcacccggctggtaccgcgcgcgctctggcaacgcatcaaaggatcgttgctttctggcgcatctggcgtgtcagacatcaaggccgcaaagtcattagtgaaaacgtaagtcccggtgtaatcggggtttttatcgcctgtcacccgcacattacctgcgcagaggaagcaatctggatcgtgcgcaggtaacacctgtttggctggcgtttcctgcgccccctgccaggggcgcttagcgcggtgcggtgaaaccagaatccattgcccggtgagcgggttgtagcggcgatgtggatgatcaacgggattaaattgcgtcatggtcgttccttaatcgggatatccctgtggatggcgtgactgccagtgccaggtgtcctgcgccatttcatcgagtgtgcgcgttacgcgccagttcagttcacggtcggctttgctggcgtccgcccagtaggccggaaggtcgccttcgcgacgcggtgcaaaatgatagttaaccggtttgccgcaggctttgctgaaggcattaaccacgtccagcacgctgctgcctacgccagcaccgaggttgtagatgtgtacgcctggcttgttcgccagtttttccatcgccacgacgtgaccgtccgccagatccattacgtggatgtaatcgcgtacgccagtaccatcttcggtcggataatcgttaccaaaaatcgccagcgagtcgcgacggcctacagcaacctgggcgatgtatggcatcaggttattcggaatgccttgcggatcttcgcccatatcgcccgacggatgcgcgccaaccgggttgaagtagcgcagcagggcaatgctccagtccggctgggctttttgcaggtcggtgaggatctgttccaccatcaatttgcttttgccataagggctttgcggtgtgccggtcgggaagctttcaacgtatggaattttgggctgatcgccataaacggtagcggaggagctaaaaataaagtttttgacgttagcggcgcgcatggcgctaatcaggcgcagagtgccgttgacattgttgtcgtaatattccagcggtttttgtaccgattcgccgacggctttcagcccggcgaagtggatcacggtgtcgatagcgtgatcgtgcagtatctcggtcatcaacgcttcgttacgaatatcgccttcaacaaacgttggatgtttgccgcctaaacgctcgataacaggcagtacgctgcgcttactgttacagaggttatcaagaatgatgacatcatgaccgttttgcagtaattgcacgcaggtatgacttccaatgtaaccgctaccaccggtaaccagaactctcataattcgctccattaggcttatggtatgaaataaccatagcataacaaagatgcgaaaagtgtgacatggaataaattagtggaatcgtttacacaagaatttagccgttttttatgcgcgattaagtgattataaaacagagggtttatgaatgattgcgctttttatctgaaaaaagaagcggtttcatgcctgcatgcgtcgaaccgttggccggagagggcgcttaggccgcctccggcaaggtcagcactaccgactcaatatatttttgtcagcacatagcgatagagtccaccgtccggcacgaactcaaggcgatgggtaatacaggcaggcgcatcttcagcgtggtgcgaaacaaacaacaattgcgtttcaccttcgctaatcagcacatcaacaaaacggcggataagctggcgattgagcggatcaagcccctgtagtggttcatcgagaataagcaacgtcggatgtttcaccagtgcgcggacgatcagcgccagacgctgctgtccccaggaaagactatggaacggagcgtcagccgtacgtttatcaatgccgagaatatccagccactgctgcaccagtttttgctggcgatccgaaacggcttgataaatgccaatcgaatcgaaatagccagaaagaatcacattacgcacggtagtgctgacccggtaatccagatgcaaactactgctgacgtaaccgatatgctttttgatatcccagatggtttcgccgctgccgcgacgtcgtccgaaaagcgtcaaatcgttgctgtaaccttgcggatgatcgccagtaaccaggcttaataacgtcgattttcctgcaccatttggcccgacaatttgccagtgttcacctggattcacctgccagctaaggttattaagaatggggcgatcgttataagaaaccacgccattgttcagcacaatgcgcggttcgttggcgggtaaggcgtgacgtgctgaaggttcatccggctccggcagttgcacaccttcaagctgttcactatgcgccagttgcgcgacgagtgcttgttggagcagttcctctttagcgccagtttccgctaacgtgcaatccgccagcacgccagcaaactggacaaactccgggatctcatcgaagcgattgagcaccagtaccagagtaataccggactgatgtaacgaggcgagtcgctcagccagctgctgacgtgaggcaacatccaggccatcgaacggctcatcaagaatcaacaagtcaggctccgacatcagcgcctgacacagcagggtttttcgcgtctcgccagtggaaaggtatttaaagcgtcggtcgaggagggcggtaataccgaactgctgcgccagttgcatgcaacgcggtgcatcctttacttcatcctgaatgatctcagccgtagtgcgtccggtgtcatcttcgccagggccgagcatatcggtgttattccgctgccattcgtcgctgacgagtttttgcaattgctcgaaggagagacgagtgatgtgggaaaactggctttgccgttcacctttcaaaagcggaagttcccccgccagcgcgcgggccagggccgatttcccgcttccattcgaaccgacaaacgcccaactatcacccgcgtttaacgttagctgaggcaattgcagcgtttttgtgtcgctaagacgaaacgtgccttgcaaaatttgcaacgatgacattttatatcccattttgtgcagcgattactgacagggatacgtgtttcataacaaattgtcaacacgcttagcacagcgtggcgataatcacgctgccggcattaaagtaggccgtgacattctgcccttgctgaagagaagtcgcttcatttaccggcactgtggcgcacagtgtttgcccgtcgggtagcgccattaatacttcgcactgctctgcgccgcgctcaatatgactaataatacccggtaattggttgtcagcgttttgcgcgaccgcctcgtcctgagtaatacctacccacggcgcttttagcaatatcaacacttctttgccttcatccagccccagacgcgcgccgctttgtgcggtaattgcgactttcaggcgtgtttttccgtcagccagtaagacatcaacatgctgttgaacgtcatcatgatcgcgggcggtgatggtgccgaaccactggttacgggcgctggtttgcagtgaaaaacgtgagatcgcggccagcaggctgttcagcggcagggcgtcatcgtcacttaacacatcaaaggctttttgctggatttgcgccagtaagtcatagagctgaatcagtcgctgaccatagcgggtcagtactgcgccgccgccacctttaccgcctgttgcgcgctcgaccagaatatgctcacttaactgattcatctcgttaatggcatcccaggcgcttttatagctgataccggcatctttcgctccctggctaatggaaccggaaagcgcaatgtgttttagtagcgaaatccggcgcgggtcggcgaataatttttgttggagcttaagggtgagaaggatttcggcctgcataacaatgtcctggcaaaagtcttattgtgacggaaaacgaacgccacgcaaagctgaccgcacaaaaggggagtgcttttctgtgcttagcggttagaatagtctcatgactatatctggagttgaccatgttagagttattaaaaagtctggtattcgccgtaatcatggtacctgtcgtgatggccatcatcctgggtctgatttacggtcttggtgaagtattcaacatcttttctggtgttggtaaaaaagaccagcccggacaaaatcattgattccctgaatgcccgcttagtcgggcattttctttttctcaacttcctgcttttcctgccgatattttttcttatctacctcacaaaggttagcaataactgctgggaaaattccgagttagtcgttatattgtcgcctacataacgttacattaaggggttaccaatggctcgtaaatggttgaacttgtttgccggggcggcactctctttcgctgttgctggcaatgcactggcagatgaagggaaaatcacggtgttcgccgccgcatcactgactaacgcaatgcaggacattgctacgcagtataaaaaagagaaaggcgtggatgtggtttcttctttcgcttcgtcatctactctcgcccgtcagattgaagcgggtgcccctgcggatctgtttatttctgccgatcagaaatggatggattatgcggttgataaaaaagcgatcgatacagctacgcgtcagacactgctcggcaatagcctggtcgttgtagcaccgaaagccagcgagcagaaagatttcaccatcgacagcaaaaccaactggacttcgctgctgaatggcggtcgtctggcggttggcgatccggaacatgttcccgctggcatttatgcaaaagaagcactgcaaaaactgggcgcatgggatacgctctctccgaaactggctccggcggaagatgttcgtggcgcgctggcgttggtcgaacgcaatgaagcgccgctgggcatagtttacggttctgacgcagttgccagcaaaggggtaaaagtggtcgccaccttcccggaagattcgcataaaaaagtggaatacccggttgctgttgtggaagggcataacaatgcgacagtgaaagcattttatgattatttgaaagggccgcaggctgcggaaatctttaaacgttacggatttacaaccaagtaatgatactgaccgatccagaatggcaggcagttttattaagcctgaaagtttcttccctggctgtgctgtttagcctgccgtttgggatcttttttgcctggttactggtgcgttgcacgtttccgggcaaagctctgctcgacagcgtactgcatctaccgctggtgttaccgcccgtggtcgtcggttacttattattagtttcgatgggacggcgcggatttatcggtgaacgtctgtatgactggtttggtattaccttcgcctttagctggcgcggcgcggttctcgctgccgccgtcatgtcgtttccgctgatggtgcgggcaattcgtctggcgctggaaggggttgatgtcaaactcgaacaggccgcaagaacactgggggccgggcgctggcgcgttttctttactatcacgttaccgctgaccttaccgggaattattgttggtacggtactggcttttgctcgttctctcggtgagtttggtgcaaccatcacctttgtgtcgaacattcctggtgaaacgcgaaccattccttctgccatgtataccctgatccagacccccggcggggaaagtggcgcggcgagactgtgcattatttctattgcgctggcgatgatctccctgttgatttcagaatggctggccagaatcagccgtgaacgggcggggcgctaatcatgctggaactgaatttttcccagaccttgggcaaccattgcctgaccattaatgaaacgctgcccgccaatggcatcactgctatctttggcgtctccggtgccggaaaaacttcgctgattaacgccatcagtggactgacgcgcccgcaaaaagggaggattgtcctcaatggtcgggtactaaatgatgccgaaaaaggtatctgcctgacgccagaaaagcgtcgcgttggctatgtttttcaggatgcgcggctgtttccgcattacaaagtgcgtggcaatctgcgctacggcatggcgaaaagcatggtcgatcagttcgataagctggtggcgcttttaggcattgaaccgttgcttgaccgtttaccaggcagcctgtccggaggcgaaaaacagcgcgtagcgattgggcgggctttgctgacggcaccagaattgctgttgctggatgaaccgctggcgtcactggatattccgcgtaaacgcgaactgttgccttatctgcaacgtctgacgcgggaaatcaacatcccgatgttgtatgtcagccattcgctggatgagatcctccatctggcagacagagtgatggtactggaaaacggtcaggtgaaagcctttggcgcactggaagaagtctggggtagtagcgtgatgaatccgtggctgccgaaagagcaacaaagtagcattctgaaagtgacggtacttgagcatcatccgcattacgcgatgactgcgctggcgctgggcgatcagcatttgtgggtcaataagctggacgaaccgctgcaagctgcgctacgtatccgcattcaggcttccgatgtttctctggttttacaaccgccgcagcaaaccagcattcgtaacgtattgcgggcaaaagttgttaatagttatgacgacaacggccaggtggaagtggaactggaagtcggaggtaaaacgctgtgggcgcgtatcagcccgtgggccagggatgaactggtgatcaaacctggcctgtggctgtacgcgcaaattaaaagtgtgtcgataaccgcctgattaaatcaggtggctataaatgaactgggcaatgctgtcggtggtgttatcaccaatcacaatgttggcgcgcgcttttaccgcgtcatcggcgttgcccatcgccacgcctgtaccagcggcctccagcatactgatatcattaaagttatcgccgaacgccacgacgttttccatcgaccagccttgcgcctcaacccatttcgtcaaacgtttacctttgctgttgccgccgcgtgcaatatcaacctgatcgtgccaggaccattcacactccagtcccagttcatgttcgacatgcttaccaaaatgctgcaattgcggcaggtcatcgtgcgtcagggcgaacttccatacggcgttaacttgttgcgccgtttcagccagagaagcgacttgtgtgaaagtcggacgctgttccggcggcagggtttgcgcccagttagacgtgcgaatgacatgcccggtcgggtgctcatagaccattgcatcatccacatacatcagaccgtgaatgtggtgttcattcagcatctcaatgagttgcagggctttattaacgggcattgggtccgcttccagcacggtttttgcatgataatcatacaaataggtgccattacagcaaatagcaggtgtatccagcgccagcgcctgataaaaaggatgaatagcgacgtgatggcgacctgtgacgatgattaattgatagcctgcttcgcgagcgcgggccagggcttctatcgatgaaggaagcagggtctttttcggggtcaataaggtgccgtctaagtcgagagcaatcacgcgtgtggtcatggcgtattccagattaaggttaagaattttcgtctgcgcgaatggtacaccgataccactatcggacaaaattctgcgttttaattcagcattcaccgccaaaagcgactaattttagctgttacagtcagttgctaaatgcaaaggagcattcatgaagcaaacagtttatatcgccagccctgagagccagcaaattcacgtctggaacctgaatcatgaaggcgcactgacgctgacacaggttgtcgatgtgccggggcaggtgcagccgatggtggtcagcccggacaaacgttatctctatgttggtgttcgccctgagtttcgcgtcctggcgtatcgtatcgccccggacgatggcgcactgacctttgccgcagagtctgcgctgccgggtagtccgacgcatatttccaccgatcaccaggggcagtttgtctttgtaggttcttacaatgcgggtaacgtgagcgtaacgcgtctggaagatggcctgccagtgggcgtcgtcgatgtggtcgaggggctggacggttgccattccgccaatatctcaccggacaaccgtacgctgtgggttccggcattaaagcaggatcgcatttgcctgtttacggtcagcgatgatggtcatctcgtggcgcaggaccctgcggaagtgaccaccgttgaaggggccggcccgcgtcatatggtattccatccaaacgaacaatatgcgtattgcgtcaatgagttaaacagctcagtggatgtctgggaactgaaagatccgcacggtaatatcgaatgtgtccagacgctggatatgatgccggaaaacttctccgacacccgttgggcggctgatattcatatcaccccggatggtcgccatttatacgcctgcgaccgtaccgccagcctgattaccgttttcagcgtttcggaagatggcagcgtgttgagtaaagaaggcttccagccaacggaaacccagccgcgcggcttcaatgttgatcacagcggcaagtatctgattgccgccgggcaaaaatctcaccacatctcggtatacgaaattgttggcgagcagggactactgcatgaaaaaggccgttatgcggtcgggcagggaccaatgtgggtggtggttaacgcacactaaccgctgatttaaccggcgcagtctctcctgcgccggtgtattaacctatctcctgtaacgcatgtctctggcgttcgacgatattggtccacaaattgtctttatcgtcagtccacaaattaatcagcaaggcaaaaaagcgttcagctgccggagaaagcacggcatctttgcggcgaataatccccaatgtccgacgtataacgggttccaccagtgggataccaataatcgaagaatagggcgcatggggcattgccagaccaggaagcgccgaaatccccagtcctgcctccactagtcctaatgacgtcgaaagatgacgcacttcgtaaaaccagtccagcttccagggcttgtcggctagctgttgttctatcaacaatcggttgccgctggaggaacgtacgccaatcattttgtaacccactaactcctgccattctacaagctgctttttggccaatggatggtcacgccgacaggccagcacgaatggctcgttgaccagtggggtaaaatcaatggatgaatttgtgacgttgttcatgtttatgccaaagtctgattcgttacacagcaccgattccatgcaattattcgtgccttgttccagaatccgcactttaatattgggatacagctcattaaatttaccgattgccagcggtaaaaaataaaatactgcggtcggaatacacgctaacgtcaccataccacgatgataagcattcatatcacgaatattaaaaagcgtttcatcgaatttctttattaattcccgcgcctccgggagcaacctttttcctgcttttgttaacgtaaccttgcgagttgtacgctcaaatagttgaatatgtaaatcttcctccatcttttttattcttcgcgttaatgcaggttgcgtaatattgagtaatttagcggcattgttaaatgaactggactctgccagtatgacaaatgccttcatacttgataattcatgcttcattattactccggaaaatggaagcgacgattttgggtggctggtcgttaaaaattttaactgcatttagccaacttaaattaatgaaaaaatgttattaatcgttgagctaaagtcattagagatgctttgtccttaatgtaaccatatcgcaataagttatgtttttaaattgagggcattattatgaaaaaaataccctgcgtgatgatgcgaggtggaacctcgaggggcgcgttcttgttagcggaacatttacccgaagatcaaacgcagcgcgataaaatattgatggcaattatgggttccggtaacgatctggaaattgacggtattggcggcggtaatccgctgaccagtaaagtcgccattattagccgttccagcgatccgcgtgctgatgtcgattatctgtttgctcaagttattgtccatgagcaacgtgtcgataccacgcctaattgtggcaatatgctgtctggtgttggggcattcgccattgaaaatggtttgattgcagcgacatcaccggtcacccgtgtgcgtatccgcaacgtcaatacgggtacgttcatcgaagctgatgtgcaaacgccaaatggtgttgtcgagtacgagggtagcgccagaattgacggcgtaccgggtactgccgcaccggttgcgctcactttcctgaatgccgccggaaccaaaaccggaaaagtcttcccgactgataatcagattgattattttgacgatgtcccggtgacctgtatcgatatggcgatgccagtcgtcattattccggctgaatatctgggaaaaacaggttatgaattaccggcggaactggatgccgacaaagcattattagcccgcattgaatctatccgtctacaagcgggtaaagcaatgggcttaggtgatgtcagtaatatggttatccctaaacctgtgcttatttctccagcgcagaaaggcggggcaattaatgtgcgttattttatgccgcattcttgccatcgcgcgctggcgataaccggtgctattgctatttccagtagttgtgcattggaaggcaccgtcacccgacaaatcgtcccttctgtaggatacggcaatatcaatattgaacaccccagtggtgcgctcgacgttcatttaagtaatgaaggtcaggatgccacgacgttacgcgcatctgttattcggacaaccagaaaaatattttccggtgaagtttatcttccctgaaaaaattcgttgtcaggataaggacaatcaataaaggacttctgtatgagtcatacagaaagaacaggattttaaatgaataagaaatcgttatggaagctaattctgatattagcgatcccatgtattattggctttatgccagctccggcaggattaagcgaactggcctgggtgctttttggtatttacctggcggccattgtggggctggttatcaagcctttcccggaacctgtcgtactgttaattgccgttgctgcctcgatggtggtggtcggtaacttatccgacggtgcgtttaagaccaccgccgtattaagcggttactcttcaggtaccacctggctggtgttctcggcgtttaccttaagcgccgcatttgtgaccaccggcttaggtaaacgtattgcctatttgctgattggtaaaattggtagcactaccctgggtctgggttacgttacggtatttctcgatctggtactggctccggcaacaccgtctaacaccgcgcgtgcgggcggcattgtgttaccgatcatcaacagcgtggcggtggctttggggtccgaaccggaaaaaagtccgcgtcgtgtcggacattacctgatgatgtccatttacatggtcaccaaaaccaccagctatatgttctttaccgcaatggcggggaacattctggcgctgaaaatgatcaacgacattctgcacctgcaaattagctggggtggatgggcgctggccgccggattgccgggcatcattatgctgctggtcaccccgctggtgatttacaccatgtatccgccagaaattaagaaggtggataacaaaaccatcgccaaagcgggccttgccgaactgggaccgatgaaaatccgcgaaaaaatgctgctcggtgtctttgtgctggcgctactgggctggattttcagtaagtctctgggggttgatgaatccaccgtggcaatcgttgttatggcgaccatgctgctgctgggtatcgttacctgggaagacgtggttaaaaataaaggcggctggaataccttaatctggtacggcggtattatcggcttaagctccttattatcgaaagttaaattcttcgaatggttagctgaagtctttaaaaataacctggcatttgatggtcacggtaacgttgctttcttcgttattattttcctcagcattatcgtgcgttatttcttcgcttccggtagtgcctatatcgttgctatgttaccggtatttgccatgctggcgaacgtctccggcgcaccgttaatgttaactgcgctggcactgttgttctccaactcctatggcggcatggttactcactatggcggcgcggcaggtccggtcatctttggcgtgggttataacgatattaaatcctggtggttggtcggtgcggtactgacgatattaaccttcctggtgcatatcaccctcggcgtgtggtggtggaatatgctgatcggctggaacatgctgtaaatatactcgtcatacttcaagttgcatgtgctgcgtctgcgttcgctcaccccagtcacttacttatgtaagctcctggggattcactcgcttgtcgccttcctgctactcgaattatttagagtatatccatttattatctttctgcgcacttcacggtgcgcagatatcgggagcatttgatgatcaagttatctgaaaaaggcgtgtttctcgccagtaataacgaaataattgccgaagaacatttcaccggcgaaattaaaaaagaagaagccaaaaaaggcactattgcctggtctattctctcttcgcataatacgtccggaaatatggataaacttaaaattaagtttgattcattagcctctcacgatattacctttgttggtattgtacagaccgctaaagcgtccggaatggaacgtttcccgctgccgtatgtgctgaccaactgccataactcactctgcgccgtcggcggcaccattaacggtgatgaccatgtttttggtttatcggcggcccagcgttatggcggtatttttgtgcctccgcacattgcggtcatccatcaatatatgcgtgagatgatggcaggcggcggcaaaatgatcctcgggtcagacagccacacccgttacggtgcattagggacaatggcagtcggtgagggtggcggtgagttggtaaaacagctgcttaatgacacctgggatatcgactatccgggcgtggttgcggtgcatctgaccggaaaacctgcgccgtatgtggggccacaggatgtggcgctggctatcattggcgcggtgttcaaaaacggttacgtcaaaaacaaagtcatggagttcgttggaccgggcgttagcgcgctctctaccgatttccgtaacagcgttgacgtgatgaccacggaaaccacctgtttaagctccgtctggcaaactgatgaagaagtgcataactggctggcgctgcacggtcgcggccaggattactgccagcttaaccctcaaccgatggcgtactacgatggctgcatcagcgttgatttaagcgccatcaaaccaatgattgcgctgccgttccacccgagcaacgtgtatgaaatcgacacactgaaccagaacctgaccgacattctgcgtgagattgaaattgagtccgaacgcgtggcgcacggtaaagccaaactctcgctgctggataaagtggaaaatggtcgcctgaaagtgcagcaggggattatcgcgggctgttctggcggtaactacgaaaacgtcatcgcggcggcgaatgcactgcgcggtcaatcctgtggcaatgacaccttctcgctggcagtttacccgtcatcacagccggtgtttatggatctcgccaaaaaaggtgtggtagcagatttgattggcgcaggcgcaatcatcagaaccgcgttctgcggcccatgctttggcgcgggcgatacgccaatcaacaacggtttgagtattcgccacaccacgcgtaacttcccgaaccgcgaaggctctaagccagctaatgggcagatgtcagcggtggcgttgatggacgctcgttctatcgctgcgactgcggcaaacggtggctatttaacctctgccagcgaacttgattgctgggacaacgtgccggagtacgccttcgatgtaacgccgtataaaaaccgtgtttatcagggctttgtgaaaggggcaactcagcaaccgctgatttacggaccgaacattaaagactggccggaattgggtgcgctgactgacaatatcgtcctgaaagtgtgctcgaagatcctcgacgaagtgaccaccaccgacgaactgattccttccggtgaaacctcttcttatcgttcaaatccgattggtctggcggagtttaccctgtcacgccgcgatcccggttatgttggcagaagtaaagcgactgctgagctggaaaatcagcgtctggcggggaatgtcagcgagctgacagaggtgtttgcgcgcattaagcagattgctggtcaggagcatattgatccgctgcaaactgaaattggcagcatggtatatgcggtgaaaccaggcgatggttctgcgcgtgaacaggcggcgagctgccagcgtgtgattggcggtctggcgaatattgccgaagagtacgcgactaaacgctaccgttctaacgtcatcaactgggggatgttaccgctgcagatggcggaagtgccaacctttgaagtgggggattacatttacatccctggcattaaagcggcgctggataatccgggtacgacgtttaaaggttatgtgatccatgaagatgcgccggtaacggaaattacgctctatatggaaagtctgactgctgaagagcgcgagattatcaaggcgggtagtttgattaacttcaataaaaaccgtcagatgtaaaaagcgccatgtgaatgtaggtcgcattcggcacttattgtcggatgcgatgcttgcgcatcttatccgacctacgaatcgcatcgaatctgtaggccagataaggcattttcgcagcatccggcacttattgtcggatgcgatgcttgcgcatcttatccgacctacaaatcgcatcgaaccgtaggccggataaggcgtttacgccgcatccggcaaatagttaattgctcttacttcttcgcctctgcaaccactttactacccacgccgcggttattgtattcccacatgcggttgtagttagtgtcattcagattgcgctgtatttcgtcgttatcatctacgctgccggtattacccgcaaacggacgattagagatcaccgcatcggcccacggtttagccgtgttaaaaccttcgttgatggcgctatcacggatcaccacctgaccgttggtattggcatcaacatccagcgagcggcccagttgcgccacaccatcaccgaaagcattgaaacggctgtttacggcgaggaaaccgtagtaaatgttggacagcgtagccggtgcaaacacatacgcttcttgctgagtacgtgagttcaccacgcggaattcggtgttatcgaacaccactgcgccgcgaccagaaacgatatccacatccccttcaatgtagctgttggtcaccagcgtacgcggctgacggttggtttccagacggttctgcacaccgctgttggtgacaaagaaggtgttctgacgaccgagaatgttaacgttgttaatctgtacctggtcaccatcagtacgcagtgccaccgccggatggttacctgcatctacgctatcgcccagcgtgttttcgatggtcagattttgcagttgcaggccattgttttgtgaccagaagaccgcagagcagagaacaccgatactgtcgctgcgtttgctctggcagctatcgtacatataccacgctggtttacctggcatatatttgccgcgcgggttgacgtcgtgacgccagtcggcagggctcatgccaccatcaagggaaagcccaatcttcacatcaatcggtttttcacctgtaccgtacagagtaattccacccggagcggcagggacatataccgttccctgatactcaccaggcatcacggcaatatactggcgcttgttggtacgcttgataattgccgcatctaccgccgcctgaatcgtggtatgcgttacaccttgagtgcccgccgggccgacaacaaagtcaggttgcgcaggcagggtaatcggggaaggattccacgctgcagcacctggtgtcagggatgcaaaatagtgttgagcatcgaaattctgcgcttcttttgccgacagaatcgggcgagaagaggtaccaggcgcggtttgatcagaaggacgttgatcgggcggggttgagctacaggcggtcagcgtcacgccaaaagccaatgccagcgccagacgggaaactgaaaatgtgttcacaggttgctccgggctatgaaatagaaaaatgaatccgttgaagcctgcttttttatactaacttgagcgaaacgggaaggtaaaaagacaaaaagttgtttttaatacctttaagtgataccagatggcattgcgccatctggcagagtgattaactaaacatcgcagtaatcgaggcgcttgccagagagtggaaatgaacgttaaacccgaccatcgcgccgctggcaccttcatcgacatcaatacgttctatatccagcgcgtgaacggtaaaaatgtagcgatgagtttcgcctttcggcggtgctgcgccatcgtacccggttttaccaaagtcggtacgcgtctgcaaaacgccgtctggcattgctaccagaccagagccaaacccttgcggtaatacgcgggtatcagcgggtaagttaacaactacccagtgccaccagccggagccggttggcgcatccgggtcatagcaggtgacgacaaaacttttcgttcccgcaggaacatcatcccacgccagatgcggtgaaatattatcgccatcgtaacccatgccgttaaagacatgacgatgcggcaacttatcgccatcgcgcagatcattactgatgagtttcatgaaccctcctttctagtttgcagaaagtgtagccagaaacccacacgctgacttcccgttattggcaaaaaaatgtttcatcctgcaccgcacggttaaccgctgcggtcagacgctgcaactgttgcgggagaataatatagggcggcatcaggtaaatcagtttgccaaaaggccggatccagacaccctgttcgacaaagaatttttgcagcgccgccatattcaccggacgagttgtttcgactacgccgattgcccccagcacgcgcacatcggcaaccatttcggcattacgggcgggggcaagttgctcgcgcagctgtacttcaatatccgccacctgttgctgccagtcgccagattcgagaatcgccaggctggcgtttgcagccgcgcaggccagcggattgcccataaaagttggcccgtgcataaagcagccggcttcgccgttactgatggtttctgcaacctcgcgcgtggtgagtgtggcggaaagggtcattgtgccgccggttaaggctttaccgaggcacaaaatgtccggcgcgatttctgcatattcacaggcaaacagtttgccggtacgaccaaatccggtggcgatctcgtcggcaatcagcaagataccttcgcgatcgcacattttgcggattcgttttaaccattccggatggtacatgcgcatcccgcctgcgccctggacaatcggctcaatgatcaccgccgcgatttcatgacgatgcgccgccatcaggcgggcaaagcccaccatatcgcgctcatcccattcgccatccatgcggctttgcggggcgggagcaaacaggttttctggcaggtagcctttccacagactgtgcattgagttatccggatcgcacaccgacatcgcgccaaaggtatcgccatgataaccattgcggaaggtcagaaaacgctggcgcgcttcgcctttggcttgccagtactgcaacgccattttcatcgccacttccaccgctacggaaccggagtccgcaagaaaaacgcactccagcggttgcggcgtcatcgccaccagtttgcggcacagctcaatggctggcgtatgggtgataccgccaaacatcacatgcgacatggcatcaatttgcgacttcatcgccgcattaagctgtgggtgattgtagccgtggatcgccgcccaccaggacgacataccgtcaaccaggcgtctgccgtcagacaaaattagctcgcaaccttcggcgctcgccaccggataaaccggtagaggggaggtcatggatgtgtatgggtgccagatatggcgttggtcaaaggcaagatcgtccgttgtcataatcgacttgtaaaccaaattgaaaagatttaggtttacaagtctacaccgaattaacaacaaaaaacacgttttggagaagccccatggctcaccgcccacgctggacattgtcgcaagtcacagaattatttgaaaaaccgttgctggatctgctgtttgaagcgcagcaggtgcatcgtcagcatttcgatcctcgtcaggtacaggtcagcacgttgctgtcgattaaaaccggagcttgtccggaagattgcaaatactgcccgcaaagctcgcgctacaaaaccgggctggaagccgagcggttgatggaagttgaacaggtgctggagtcggcgcgcaaagcgaaagcggcaggatcgacgcgcttctgtatgggcgcggcgtggaagaatccccacgaacgcgatatgccgtacctggaacaaatggtgcagggggtaaaagcgatggggctggaggcgtgtatgacgctgggcacgttgagtgaatctcaggcgcagcgcctcgcgaacgccgggctggattactacaaccacaacctggacacctcgccggagttttacggcaatatcatcaccacccgcacttatcaggaacgcctcgatacgctggaaaaagtgcgcgatgccgggatcaaagtctgttctggcggcattgtgggcttaggcgaaacggtaaaagatcgcgccggattattgctgcaactggcaaacctgccgacgccgccggaaagcgtgccaatcaacatgctggtgaaggtgaaaggcacgccgcttgccgataacgatgacgttgatgcctttgattttattcgcaccattgcggtcgcgcggatcatgatgccgacctcttacgtgcgcctttctgccggacgcgagcagatgaacgaacagactcaggcgatgtgctttatggcaggcgcaaactcgattttctacggttgcaaactgctgaccacgccgaatccggaagaagataaagacctgcaactgttccgcaaactggggctaaatccgcagcaaactgccgtgctggcaggggataacgaacaacagcagcgtctggagcaggcgctgatgaccccggacactgacgaatattacaacgcggcagcactatgagctggcaggagaaaatcaacgcggcgctcgatgcgcggcgtactaccgatgccctgcgtcgccgttatccggtaacacaaggagccggacgctggctggtggcggacgatcgccagtatctgaacttttccagtaacgattacttaggcttaagccatcatccgcacatcatccgcgcctggcagcagggggcggaacaatttggcgtcggtagcggcggctccgggcatgtcagcggttatagcgtggcgcatcaggcgctggaagaagaactggccgagtggctgggctattcgcgggcattgctgtttatctccggttttgccgctaatcaggcggtcatcaccgcgatgatggcaaaagaggaccgtattgttgccgaccggcttagccacgcctccttgctggaggctgccagtttaagcccggcgcagcttcgccgttttgctcataacgatgttactcatctggcgcgcctgcttgctgcctcctgtccggggcagcaactggtggtgacagaaggcgtgttcagcatggacggcgatagtgcaccactggcggaaatccagcaggtaacgcaacagcacaatggctggttgatggtcgatgatgcccacggcacgggcgttatcggggagcaggggcgcggcagctgctggctgcaaaaggtaaaaccagaattgctggtagtgacttttggcaaaggatttggcgtcagtggggctgcggtgctttgctcaagtacggtggcggattatctgctgcaattcgcccgccaccttatctatagcaccagtatgccgcccgctcaggcgcaggcattacgtgcgtcactggcggtcattcgccgtgatgagggggatgcacggcgcgaaaaactggtgtcactcattgcgcgttttcgtgccggagtacaggatttgccgtttacgctggctgattcatgcagcgccatccagccattgatcgtcggtgataacagccgtgcgttacaactggcagaaaaactgcgccagcaaggctgctgggtcacggcgattcgcccgccaaccgtacccgctggtactgcgcgactgcgcttaacgctaaccgcagcgcatgaaatgcaggatatcgaccgtctgctggaggtgctgcatggcaacggttaataaacaagccattgcagcggcatttggtcgggcagccgcactctatgagcaacacgcagatctacagcgccagagtgctgacgtcttactggcaatgctcccacagcgtaaatacacccacgtactggacgcgggttgtggacctggctggatgagccgccactggcgggaacgtcacgcgcaggtgacggccttagatctctcgccgccaatgcttgttcaggcacgccagaaggatgccgcagaccattatctggcgggagatatcgaatccctgccgttagcgactgcgacgttcgatcttgcatggagcaatctcgcagtgcagtggtgcggtaatttatccacggcactccgcgagctgtatcgggtggtgcgccccggaggcgtggtggcgtttaccacgctggtgcagggatcgttacccgaactgcatcaggcgtggcaggcggtggacgagcgtccgcatgctaatcgctttttaccgccagatgaaatcgaacagtcgctgaacggcgtgcattatcaacatcatattcagcccatcacactatggtttgatgatgcgctcagtgccatgcgttcgctgaaaggcatcggtgctacgcatcttcatgaagggcgcgacccgcgaatattaacgcgttcgcaattgcagcgattgcaactggcctggccgcaacaacaggggcgatatcctctgacgtatcatctttttttgggagtgattgctcgtgagtaaacgttattttgtcaccggaacggataccgaagtggggaaaaccgtcgccagttgtgcacttttacaagccgcgaaggcagtaggttatcggacggcaggttataaaccggtcgcctctggcagcgaaaagaccccggaaggcttacgtaatagtgacgcgctggcgttacagcacaacagcagcctgcagctggattacgcaacggtaaatccttacaccttcgcagaacccacctcgccgcacatcatcagcgcgcaagagggcaggccgatagaatcattggtaatgagcgccggattacgcgcgcttgaacaacaggctgactgggtgttagtggaaggtgctggcggctggtttacgccgctttctgacactttcacttttgcagattgggtaacacaggaacaactgccggtgatactggtagttggtgtgaaactcggctgtattaatcacgcgatgttgactgcgcaggcaatacaacacgccggactgactctggcgggttgggtggcgaacgatgttacgcctccgggaaaacgtcacgctgaatatatgaccacgctcacccgcatgattcccgcgccgctgctgggagagatcccctggcttgcagaaaatccagaaaatgcggcaaccggaaagtacataaaccttgccttgttgtagctatcctgtatttggttaaattgcgagcgagatcgcgtcttcgattgactgcaatttaaccaattaaattctaaaataatcacgaaaaaaattttacttccgcctcatgcggcgaatgtgggaattgcccaggcagcgggggataggggctggagacagttatccactattcctgtggataaccatgtgtattagagttagaaaacacgaggcaagcgagagaatacgcggcttgcacgcgaattggcgttaaagacggctcaaagaaatatcttttattttttaactggttagataaatgcaatggcagtcactgaacaggcatctcttgccataaaactgtcatcactcatcttgacaaatgttaaaaaagccgttgctttggggataacccggtaaggccggagttttatctcgccacagagtaaattttgctcatgattgacagcggagtttacgctgtaacagaaatattatggtgatgaactgtttttttatccagtataatttgttggcataattaagtacgacgagtaaaattacatacctgcccgcccaactccttcaggtagcgactcatgagtaaaccgttcaaactgaattccgcttttaaaccttctggcgatcagccagaggcgattcgacgtctcgaagaggggctggaagatggcctggcgcaccagacgttacttggcgtgactggctccgggaaaaccttcaccattgccaatgtcattgctgaccttcagcgcccaaccatggtacttgcgcccaacaaaacgctggcggcccagctgtatggcgaaatgaaagagttcttcccggaaaacgcggtggagtatttcgtctcctactacgactactatcagccggaagcctatgtaccgagttccgacaccttcattgagaaagatgcctcggttaacgaacatattgagcagatgcgtttatccgccaccaaagcgatgctggagcgacgtgatgtggttgtagtggcgtctgtttccgcgatttatggtctgggcgatcctgatttatatctcaagatgatgctccatctcacggtcggtatgattatcgatcagcgcgcgattctgcgccgactggcggagctgcaatacgctcgtaatgatcaagcattccagcgtggtactttccgcgttcgtggcgaggtgattgatatcttcccggcagaatcggatgacattgcacttcgcgtggaactgtttgacgaggaagtggaacgattgtcgttatttgacccgctaaccgggcagattgtttccaccattccacgttttaccatctacccgaaaacgcactacgtcacaccgcgcgagcgcatcgtacaggcgatggaggagatcaaagaagagctggccgccagacgcaaagtgctgttggaaaacaacaaactgctggaagagcagcggctgacccagcgtacccagtttgatctggagatgatgaacgagctgggctactgttcggggattgaaaactactcgcgcttcctctccggtcgtggaccgggtgagccaccgccgacgctgtttgattacctccctgctgatgggctgctggtggtcgatgaatctcacgtcaccattccacaaattggcggcatgtatcgcggtgaccgggcgcgtaaagagacactggtggagtacggcttccgcctgccatcagcgctggataaccgtccgcttaagtttgaagagttcgaagcattagcgccgcaaaccatctatgtttcggcgacgccgggtaattacgagctggaaaaatccggcggcgatgtggtggatcaggtggtgcgtccaaccggattgcttgacccgattatcgaagtgcggccggtggcgacacaggttgatgatcttctttcggagattcgtcagcgagcggcaattaacgaacgcgtactggtcaccacactgaccaagcgaatggcggaagatcttaccgaatatctcgaagaacacggtgagcgcgtgcgttatcttcactcagatatcgacaccgtcgagcgtatggagattatccgcgacttgcgtctgggtgagttcgacgtattggtagggatcaacttactgcgtgaaggtctggatatgccggaagtttcgctggtggcgatcctcgacgctgacaaagaaggcttcctgcgttccgaacgttcgttgatccagaccattggtcgtgcggcacgtaacgttaacggtaaagcgattctctacggcgataagatcaccccatcaatggcgaaagcgattggcgaaaccgaacgtcgccgcgagaaacagcagaagtacaacgaggaacacggcattacgccgcaaggcttgaacaagaaagtggtcgatatcctggcgttggggcagaacattgctaaaaccaaagcgaagggcagaggaaaatcgcgaccgattgttgagccggataatgtgccgatggatatgtcgcctaaagcgttgcagcagaaaatccatgagctggaagggttgatgatgcaacacgcgcagaatctggagttcgaagaagcggcgcaaattcgtgaccagttgcatcagctgcgtgagctgtttatcgcggcatcgtaacaggatagcgaagaagactgatgacaaacggaaaacagcctgatgcgctacgcttatcaggcctacattttctccgcaatatattgaatttgcgcggtttgtaggccggataaggcgttcacgccgcatccggcataaacaacgcgcactttgtcttcaataggaagccggaattttccttcggatttccgttaacctaaagcctgtaacgccttttccagcgcgttatgtaacaactggcggtcatgacgatacggaatatcgctggcctccagtacctcctggatcacaatccgctctttcaccgccgagacatccacttttggcccgacgatgaccgcatcaatgacctttttaccaacatactgctccataattgccagcttgctttccagcttcaaattagcagcaggtaaactcaactcacgccccagattgccgatataaaccatcggcgctggcgtgcggcgtaatgcctgggcgatttccttcagcagcagaattggcatcaggctggtataaaaactgccaggcccaataatgatgagatccgcttcattgatagcgtgaaccgcctcacgcgttgcgggtacattaggcgttaacaataactcttgaatcggcgtagttaactggtcgatattgacctcgccgtaaacttcatgcccctgatcgtcaatcgccatcagatcgacgggatgctctgacattggaatcaaatgcgtatccactttcagcagattacgaattaaattgatggcttccagaggccgcacgctaaggtgatccagcgcctttaacatcaagtttccgagattatgaccggaaagttcgccattgccgccaaaacggtattcaaacatcgcggaggcgacgctcggttccgttatcagctggttgaggcagttgcgcatatcgccccaggcaatgccgccttctgaacggcgaatacgccccgtcgagccaccattatcggtggtggtgacgatacccgttaaacgagaacccaaagacgaaagtgatgagagaacgcgtcccagtccatgccctccgccgagagcaacgacacgatcaagatcagccagcgtacgattgcgcatatagtttcctggagtcagattatccgcgctacagtagcgcaaattgcggggaaacagcaattaacctgccaatattgaggatacaaactattttcttctacctctaaaggacgatgcacgctatgcctccctgatgatgtatatcaaagtaaaaccgccattttcctttattctgtagcgaaatagcacgatcatgacgctatatacatgattacatagcgaaagtgtggatggtaaaaatctcatttacacgctagtatcggcataaccactaaacactctagcctctgcacctgggtcaactgatacggtgctttggccgtgacaatgctcgtaaagattgccaccagggcgaaggaagaaatgacttcgcctcccgtatctggaaaggtgtacatggcttcacaactgactgatgcatttgcgcgtaagttttactacttgcgcctgtcgattaccgatgtgtgtaactttcgttgcacctactgcctgccggatggctacaaaccgagcggcgtcaccaataaaggctttcttaccgtcgatgaaattcgccgggttacgcgcgccttcgccagtctgggcaccgaaaaagtgcgcctgacaggcggtgagccgtctttacgccgcgactttaccgatatcatcgccgctgtgcgggaaaacgacgctatccgccagattgcggtcaccaccaatggttaccgtctggaacgcgatgtggcgaactggcgcgatgcgggacttactggcattaacgtcagtgtcgacagtctggacgcccgccagtttcacgctattaccgggcaggataaattcaaccaggtcatggcggggattgatgctgcatttgaggccggttttgagaaggtcaaagtcaataccgtgctgatgcgtgatgttaatcatcaccagctcgacacctttctgaactggatccagcatcgccctatccagctgcgtttcatcgaactgatggaaacgggcgagggcagcgagctcttccgtaagcatcacatctctggtcaggttctgcgtgacgagctactgcgtcgcggctggatccaccaattacgtcaacgcagcgacggtcccgcgcaagtcttttgccatccagattacgccggagagattggccttatcatgccgtatgaaaaagacttctgcgccacttgcaaccgcctgcgcgtttcctccattggtaaactccatctctgcctgtttggtgaaggcggcgttaacctgcgcgatctgctggaagacgatacccagcaacaggcgctggaagcgcgtatttcagcggcgctgcgggagaagaaacagacccatttcctgcatcaaaacaacaccggtattacgcaaaacttatcgtacattggcggctaaaacgtcaaaaggagagatcagatgagtcaggtaagcactgaatttatcccgacccgtattgctattcttacggtttctaatcgtcgcggtgaagaagacgatacctccggtcactatctgcgcgattcggcgcaagaagcgggccatcacgttgtcgataaagccattgtgaaagaaaaccgctacgctattcgcgctcaggtatctgcgtggatcgccagcgacgatgtacaagtggtattgattacgggtggtactggcctgacggaaggtgatcaggctcccgaagcattgctgccgttgttcgaccgtgaagttgaaggttttggtgaagtgttccggatgttgtcttttgaagagattggcacttccacgttgcaatctcgtgcggtagcgggcgtcgccaacaaaacgctgattttcgccatgccgggttcgaccaaagcgtgccgtaccgcatgggaaaatatcatcgcgccgcagctggatgcccgtacgcgtccgtgtaatttccatccacatttgaagaaataagtatgtcgcaactgacccatatcaacgccgctggcgaagcgcacatggtggatgtctccgccaaagcggaaaccgtgcgtgaagcgcgggcggaagcctttgtcaccatgcgcagcgagacgctggcgatgattattgatggtcgccaccacaaaggcgacgtatttgccactgcgcgtattgccggtattcaggcggcaaaacgcacctgggatctgatcccgctgtgtcacccgctgatgctcagcaaagttgaagtcaatttacaggccgagccggagcacaatcgggtgcgtatagaaaccttatgccgcctgaccgggaaaaccggtgtcgaaatggaagcgttaaccgcggcctccgtggcggcgctgaccatttatgacatgtgcaaagcggtgcaaaaagatatggtgattggtccggtacgtttgctggcgaagagcggcggcaagtcgggtgactttaaggtggaagcggatgattaaagttctttttttcgcccaggtgcgcgagttggtgggaacagatgcaaccgaagtggctgcggatttcccaaccgttgaagcgttacgccagcacctggctgcgcagagcgatcgctgggcgttggcgctggaggatggcaaattgctggctgccgttaaccagacgctggtgagttttgaccattcgctgactgacggcgacgaagtagctttcttcccgccggtaaccggaggttaagatggcagaaaccaaaattgttgtcggcccgcagccgttcagcgtaggagaagagtacccgtggctggcggagcgtgacgaagacggtgcggtagtcacctttaccggtaaggtgcgcaaccataacctgggcgacagcgtcaaagcattaaccctcgaacactatccggggatgactgaaaaagcactggcagaaattgttgatgaagcgcgtaaccgctggccgctggggcgcgtcacggtgattcaccgcatcggggaattatggccgggcgatgaaatcgtttttgtcggtgtcaccagtgcgcatcgcagcagtgcgtttgaagccgggcagtttattatggattatctcaaaacccgcgcaccgttctggaagcgcgaagccacgccggaaggcgaccgctgggttgaagcccgggagagcgatcagcaggcggcaaaacgctggtagttttttgttagccggataaggcaccgctgcgtccggcaatttcaccgctcagtacatgcgtttacgctgcgtcgatgcacagcctcatcattttgcagtatccttaagatattccttatatcttcaggagatcgtcatggacagattcccacgttctgattcaatcgtacaaccccgggctggcttgcaaacttatatggcgcaagtctatggctggatgaccgttggcttgttgctgaccgcatttgttgcctggtatgcggctaattccgcggccgtgatggagctgttgtttactaaccgtgtctttttaatcggtctgatcatcgcgcaattagcattggttattgtgttatcagcgatgattcaaaagctgagcgcaggtgtaacgacgatgctctttatgctttattcggcgctgacgggtcttacgctttccagtatattcattgtctataccgctgcttctatcgccagtactttcgtcgttactgccgggatgttcggcgcaatgagcctgtacggttacaccacgaagcgcgatttaagtggctttggcaatatgctgtttatggcgttaatcggcattgtgctggcatcgctggtcaacttctggttgaaaagcgaagcattgatgtgggcagttacctacatcggcgtgattgtctttgtcggattgacggcgtatgacacgcagaaactgaaaaatatgggtgagcagattgatacccgcgacacgtcgaacctgcgcaaatattccattcttggcgcgttaaccttgtatctggacttcatcaacctgttcctgatgttgctgcgaatttttggcaaccgccgttaattctttttcaccatcaatatcccggccatgtgtcgggattttttttcttactaaaaacgacacttaacaagtaccaggtataaaatacgccttatggcgagcggaagcgttttccgtatccataaatacaaaagtattttgtatgcgtggttttaaatttattgatggtgaatattaatattttttctaaggacaactaaaagaatggaatcatactcacaaaacagcaataaattagattttcagcacgagaccaggatattaaacggtatatggctcattaccgctttaggtttggtgacaaccgcaggactggcctgggtagcgaagtatctcgaaattacggcaacaaaatatgattcaccgcaaatgtatgtcgccataggattattattactttgtatgtatggcttaagtaaggatatcaacaagataaatgccatcatcgcaggcgtaatatatctgtttttactctctttggtggcgattgtcgttgcaagtttagctcctgtacctgccattatcgtcgtgttcagcactgcgggcgcgatgtttttaatcagtatgctggccggtttattatttaatgttgatcctggttctcaccgttttatcattatgatgacgttgacaggtttggccctggtgatcatcatgaatgccgcattaatgagtgaacgacccgtttgggtaataagttgcttaatgattgtgttatggtcaggcattatctcgcatggacgaaataagctccttgaattggcggggaaatgccatagtgaagagttgtggagtccggttcgttgcgctgttacaggtgcattaacactctattactattttatcggcttctttgggatacttgccgcgatagctataacgcttgtctggcaaaggcatacgcgtttttttcattagtcgtaaatgcagatactaaagaacttaactaaacttcacatcgccgcttcatttttcgcccgtagcttcttcgcctggctttccagtagcaggtaacagatcagcgccagcagcagcgggataaagtaatacaggacgcgataagcgagtagggcggcgataattgtgcctttggatgtatgctccccagccagtagcgcgataaacaccgcttccagcacaccgatccccgccggaatatgcacgatgacgccagcaatactactaaccagtaacacgcccagtacaaagaaatagttcacgctttgaccaagtaacagccagataatcgcccccattaccatccagttaacgctggaaatcagcatctgagcgagggcgaatttccatgaaggcagcaccagcttttgccctttgatggtcatatggcggtgcttcgcgaaagcgcaaaaccacaaataaaccgcgataatcatcagtaagccaatgccgagaatacgcagcgtagtttgatcgacataccagtgatccggcaactccaccacgcctgcggtaaagataatccctgccagtaaaatatagcccagccagttggtggtaatactgagcgagaaaatccgcgtaatagtgctgcccggtaaccctagtcgggagtacaaacgatagcgcataccaatgccgccgacccaggtactgagcgtcaggttgaaggcgtagcagataaacgacaccagcatcacctggcgcttcgccagtttgtgaccgcagtaaaagcgggcgagcaggtcatagcagccgtaaatcagatagctgacgaccaccagcccgaccgcactaagcagcgcaacgcgattgtagtcgcggatgaccttccagacctcttcccagtccacatttttggcgtagaccaccagcaacacaatcaccgcgataaaaaacagccaggtgaggatcttctttgctaagcgccagcgcgggtgtgatttactcatcagggttttacccccgtgttttcagtttctacccgatcctgcgtttccattgtcggttgtgcgggcggatcaacctgcgccagacgtggtgtgtgtgccggaagccagccaaccagcgccgggaagtggcgtaaaaagtggaacgccagcacgcttttggtcaggttccaccaggtgcgtttcggcagcatggtctcatcgacctgctgacaatctgcggcaataatgccgttcagattatcgcgcagcgtctggttaaaatgacgatcgtggatgatgacatttgcttcgagattcagtgacaaactgagcggatcgagattactggaccctactgtcgcccagtgatcgtccatcaatgccactttgccgtggagcgggcggcggcggtactcaaatacctgaacgccgcctttaaccagatagttatacagcaagcgcgcaccgactctgacaatcggcatatccggttcgccctgaatgatcagtttgatccgcaccccgcgccgtgccgctttacgcaaggcgtgtaaaaatcgatagccggggaagaagtaggcgttggcgataatgacttctcgccgcgcctgagtgagcattttcagatagtgacgttcaatatcatcgcgatgttcttcgttatcgcgccagaccagcaatacctgcgcttctcccggctggcggttctcttccgctttgtgatgacgtcgccaccagcgtcgtgccgcgctctgtccaggcaggttttccagctcaaactggagaatatcttcgacaatcggcccttcaaggcgtaccgcgtaatcctgtttagcctctggaccgtagctggacatatgctcggcggagtaattcagcccgccaataaaggcgatacgcgcgtcgatcaccacaattttgcgatgcatccggcgaaacacattggtgcgcataccaaaaaggcgagggcggggatcgtagtagcgaaataccacgccagctgccgtcagttcattgacaaactcatcgctgagatccggcgaaccgtagccatccagcaagacttccgctttaaccccgcgttgcgctgctgccagtagtgccgcatgcagctgtttgccgacgtcatcctcaaaccagataaacgtttcaagaatgatgcgttcttgtgcctcgccaatcgccttaaacaccgcgggataatattgctcgccgttttccagcaactggatcttattgccttcgcgccagctacatttcataaatgaatctccgcacttaaaggggcatgatcagaaaggtgtcgccatgtccgcagcggcaacgcggttggcgcgctggcgctggcatttttgacgtagatcctgtccagtcgtagtagaggaaattgcaccggaaacgtgcgcgccgggcgtccgtggacgcgggtaaaaatctcatccagtccggcctgcacttttaacggatgattagctttttgccgccagtcattgaaatcacccgccaccaataccggttcgccgtccggtagctcattcacccattcggcgagcatcgcaagctgcgcctgacggtgcgcctcacgcaggcccagatgtacgcacatcacatgaatcgcttttccggtcatcggtggcacaatgcggcagtagagcacgccgcgcttttccgcaccatcgaccgaaacatcgcgattctcataatgttcaatgggataacgcgacagtacggcgttgccgtgatgcccttccgggtatacggcattgcgaccgtaggcaaaatcgctccacatcgtgtcggcgagaaactcgtagtgcgaggtatcgggccagttttccacatgcagcggatgaacttcgtgcgcgcccatcacttcctgcaggcaaacaatatcggcgctgacggtacgcaccgcgtcgcgaagttccggcaaaatgaagcgtcggttaaacgcggtaaaacctttgtgaatgttgatggtgagcaccttgaacgaaaattgttgtgtttgatcgggcataattttcctgtctttgcctcttatctcattgaaatagtgtagtcggcgtcacaaaaaggtgcggtcttacggaattttccgtaaagttcggtactctgagtaagtagagataaattcttcaggagagaagccatgaagtggcaacaacgtgttcgtgtcgcaactggtctaagttgctggcagattatgttgcatttactggtagtggcgctgctggtggtgggctggatgagtaagactctggttcacgtcggcgtgggattatgcgcactgtattgtgtcacggtagtgatgatgttggtgtttcagcgccaccccgagcaacgctggcgtgaggtggcagacgtgctggaagagctgaccacgacctggtattttggcgcagcgctgattgtgctgtggctgttgtcccgtgtactggaaaacaactttttgctggcaattgcagggctggcaatccttgccggcccggcggtagtgtctttgctggcgaaagataagaagttacatcaccttacgtctaaacatcgcgtacgccgctgaccctgtcgtggccgttatcaccagtagcggccacaaactattccacacaatatccagactcgcatccttcaaataaatctgcttggtaatgtccgtaaagtggcgaatagggttaatccacgtcaggttttgcagccatactggcatgttttccaccggagaaacgtaaccggaaaggagaatggcgggcatcataaaaacaaacacgccgataaacgcctgctgttgtgtcgagcagagtgatgaaatcaacagaccgaatcccaccagcgataaaccgtaaatcaccatcgtaaagtagaacagcgccagcgatccggcgaaggggatttgatacgcccagataccaatcgccagcacaatggtggcctggaaggtggcgacaattaacgccggtacggctttgccgatgaagatctgccaggtggtgagcggcgaaaccagtagctgatcgagcgtaccttgttcacgttcgcgggcgacggaaagtgaagtgacgatcattacgccgatagtggtgatcatggcgatcagcgacggcaccacaaaccatttgtagtcaagattcgggttataccagttgcgtaccaccagctcgctgttgttaggtttcggttttccttccagcagctcctgctgataatttttgacgatctgttgcaggtagttggcggcaatttgcgcactgttggagttacgcccgtcgaggatcaactgcaacggcgcggtctggaaggtatccagtttgcgcgagaagtcagccgggaaacgcaccagtagtaacgccttttgtgtgtcgatggttgggcggatctcctgtgggcttttcagcagcagcacatgagtaaaggcgctggcgcgggcaaaacgttgggtcagctccaccgaatgctcgccgttatcttcatcgtagatggcgatggtggcgttagtcacttccagcgtggcggcgaacgggaacagaatcacctgaataagcacaggtaaaatcagaatcgcgcgggtttgcggttcgcgcagcagcgactgcaactctttgcggattaacgtccataagcgatgaaacatgctcttctccctaatccagccgacgtttggttttcagccacgtcaggccgataaacatcaccgccgaagcgatcaaaaacagcacgtttaccaccagcaccactggaatattcccggcgaggaacaggctttgcagggtgctgacgaaataacgagcgggaataatgtacgtcaccgcgcggatcaccgcgggcatactgtcgatctgaaaaataaagccagagagcataatcgacggcaggaacgcggcgttcagggcgacctgagcggcattgaactggttgcgggtaatcgtggaaatcagcagccccatccccagggtactgagtaaaaacaggctggagataaaaaacagaatcagcagcgacccgcgatacggcacgccgagaataaacaccgacaccagcatacacagcagcatcgccagcatcccgagaaagtaataggggatcagcttacacagcagcagctccgtgcgggtaatctccgtagagagcagagcctccatggtgccgcgttcccattctcgcgccaccaccagcgaggtgagaatcgcgccgatgaccgtcatgatgatggtcaccgcaccggggataataaagtgctggctaatcgccgccgggttaaaccagtagcgggtttgtacatcaataagcggctcaaaggtctgcccgttgtcctccgcccgctgcatttgccagatctgccagatcccttcgacatacccctgcacaaagttagcggtattcggctcactgccgtcggtgatcacctgaatcggtgcggtggcgttggcgcgctccatctgttcggcgaaatccacgggaataaccaccagaccgcgaattttccccgcctgcattttggcgatcagttcctgacggttatcgctgatggtggcgtcgatgtagggcgaaccggtcatggtgtgggtgaaatccagcgccgcttcgctacgctgttccagcaaaatcccgacccgcagcttgctggagtcgaggttaatgccgtaaccaaaaataaacagcagtagcagtgggatcactaccgcaatcagccagctactcggatcgcgaacgatctgccgcgtctctttgacgcacagcgcccgcacgcgacgccaggaaaggatcgggttactcattgctatgctccttatcccagtcgtggatcaactgaataaaggcttgctccatggtgggatcgggttgctcatcgttagccgactgtgctttcaaatcgtccggcgtaccgctggcgattaatttcccacggtacaccaggccgatgcggtcgcaatattccgcttcatccataaagtgggtggtgaccatcaccgtgacgcctttctctaccatgctgttgatgtgcagccaaaattcacggcgggtgaggggatcaacgccggacgtcggttcgtcgagaaacagaatgtccggttcatgcatcagcgagcaggccagtgccagccgctgtttaaaacctaatggcagttcatcggtggcgtgggaggcgatacttttcaggccgaacgcctcgctcatacgggagattttttcgttctgcgcccgaccgcgtaagccatacacaccagagaaaaagcgtaaattctgttcgaccgtcaggttgccatagagcgaaaacttttgcgccatatagccgagatgctggcgcgctttaccggaactctctttcagatccatccccagcaccagcgcctgaccggaggtcggcaccagcaagccgcacatcatcttaaaggtggtcgatttccccgcgccgtttggcccgagcagaccaaaaatctcccctcgtttaacggcaaagttgacgtgatcggtggcggcaaaatcaccaaatttcttggttagttctttcgcttcgatcaccgtctcgccgggtgtgccttctaccgtatgcaatattgcacccagcggcgattccgaggttccggcaccgcccagcaaatcaataaacgcatcttcaaaacgcggcgtagtttcgttgatgttgatttccggcatcccttcggcatggcgaatatcgtctggtgtggcctcttttttgaggatcagacgtaccgatttcccctgaatcatgccgtcgctgacctgcggcagtttcaaggcgcgttgcaacagtttgcggttgccctcgtgtggactggtcatcagaaagctgcgtccggccatggtttgtgtcagggcttttggttctccctgatacagcaactcgccttcgttcatcagtaacacgtcacggcactgctcggcttcgtcgagatacgaggtactccagaggattaacatcccttcgcccgccagctcatgcaccatctgccacagttcgcgccgtgagatagggtcaacgccgacgccgggttcatcgagcagcaacactttcggttcgcccaccagggtacaggccagaccgagtttttgtttcatcccaccggagagcttgcccgccaggcgtccggtaaacggcccaagagacgtaaactccagcaggcgagcaaaagtttgcttacgtgcctcgccggtgacgctgcgcaaatccgcgtacagattgaggttctccatcaccgtgagatcttcatacagaccaaatttctgcggcatatagccgagcacggcgtgcagcgcgccgtcgtttttgattggatcaaagccaatcaccgtggcattgccgctgtcgggtttcagtaatcccgccagcatccgcattagcgtggttttacctgcaccgtccggccccaccagccccgtcacataaccggcgtgaatggtacaatcgagcggcgcgacggcgggcttgtccatgcccggaaagcgtttttccaggccgttcagcgtgataacggcatcattcatgtcctgcctcgttaccgaattgcaccgtcaccggcattccctggcgtaacgcatcatcggcgtcggtcaccacaatacgcaggcgatagacgaggtcggtacgcagatccggtgtttcgacggttttcggggtaaattcagcagtcggcgaaacgaaaccaatctgtccgtgatagggcttgtccgggcgaccatcggtataaagcagcactttgcgccccggctgggcctggtcaagattccgttcatcaacataggcacgtacccacaccggacgcgttagtgaaacggtaaacaccgtgccaccttcattgagaaccgtgcctggctccaccgcgcgcgttaacagcgtgccatcagacggtgctatcaacgttgagtcctgtaaattcagctccgcctgcgccagttgcgcctgcgcctgttcgaggctggctttcgcctgagcgatgtcctgttcacggttaccggaacggtactgacgcaatttatcctgtgctgatttcagcgttgcctgtgcctggtcgcgcgaggagcgggcattttccaggtcatttgccgaaatggtgcggcttttccacagtccttgctggcggttatagaagttctgcgcatagtcataggcggcttgagcctgtttcaccgctgcggcggcctgagcgatttcttcatcgcgatacccggcaagcatcagatcatactgcgcctgtgccaccgagacgcccgctttcgcctgcatcagggcaatctcatacggcttgtgatccagttcgcccagcacctggcccgctttgatcgcatcaccttcgtccaccgccagcgattcaacgcgccccccaacacggaaactaagatttaccgtacgaatatccacgttgccatacagcgtcaggccgttatcctggcggctttgataccaccagtagcctccggcaaccacggcggcaagtaccactaccgccaatccgatcacgacaggttttttcatcactacaaactcctttgcgataatccttgcaaaatcaggtcgatatgacaggtcaccgtctggttgatcagttcggtcttttcttcatcgaacgcggtccagccggtacgtaacagaattgtttctttgccaagacggaacgccagaatctcaccaatcaacgcatgagtatggaggatcatgcgggtatcgttggcgtcgcagccggtccaggcggcaatcaggcgtgtcaggtggctgtgtagcgggctaatcacctgttcgtgcaccaggtgataggctgccgtgggagagagctgctcacgggagataaacttgctgaggttgacggtgtcatcctgggtgagcagcttaatcatgttcctgcaggcgcgaaggatcagttcacggatggctgcgcgatcaggctgtggttgtgcgaacaagcgttcggcctcttcggcgtgcggacggaactgctcgccaataaaatcggcaatccactgggcgcaggcgaggtacaaatcttctttcgaaccgaagtagtaggtgatggcagcgatattctgcccggcctgggcggctatctcgcgggtggtggcgttcattccatattcaccaaactgcgccagtgcggcagcaatcagctgttttttcgcctgttcacccttgattgtcatggcaggattattcatcgcacagtccattcttaatcaaatgattgattaagattatgactccataggggagttgtccagtatggctaagaattttagctacgccagtcacagggataatttatgcgctgcgtcacaaaaactgctacactccgctccctcatgacattgtggtttttgtcattttccttttcagtatctccctgaaaactacaccggtaacggtcggggcggttcggagtagttatgtctttcgattctttgggtttaagccctgatatcctgcgcgccgttgccgagcagggttaccgtgaacccacccctattcagcagcaggcgatccctgcggtgctggaaggccgcgacctgatggctagcgcccagaccggtaccggtaaaacagcgggctttacgctgccgctgttgcaacacctgatcactcgccagccgcacgccaaagggcgtcgtccggtacgtgcgctcattcttaccccgacccgtgaactggctgcgcagattggcgaaaacgtccgtgattacagcaaatatttgaacattcgttcgctggtggtgtttggcggtgtcagcattaacccgcaaatgatgaagctgcgcggcggcgttgatgttctggtggcaacaccgggacgtttgctggacctggaacatcaaaatgcagtgaagctggatcaggttgaaatcctcgtcctcgatgaagctgaccgcatgctcgacatgggctttatccacgatatccgtcgcgtgttaacaaaactgccagcgaaacgccagaacctgctgttctctgcgaccttctctgacgatattaaagccctggcggaaaaactgttgcacaacccgctggaaatcgaagtggcacgccgcaataccgcgtctgatcaggtgacccagcacgttcactttgtcgataagaaacgcaaacgcgaattgctgtcgcacatgattggtaaagggaactggcagcaggtgctggtgtttacccgtaccaaacacggcgctaaccatctggctgagcagctcaataaagatggcatccgtagtgcggcgatccacgggaataaatcgcaaggtgcgcgtacccgtgcgctggctgattttaaatcgggtgacattcgcgtactggtggcgaccgatatcgctgcgcgcggtctggatatcgaagagttgccgcacgtcgtcaactatgaactgccaaacgtaccggaagattatgtccaccgtatcgggcgtaccggtcgtgcggctgctaccggtgaagcgttgtcgctggtgtgtgttgatgaacacaaactgctgcgtgatatcgaaaaactgctgaaaaaagagatcccgcgcattgcgattccgggctatgagccggacccgtcaatcaaagccgaaccgatccagaacggtcgccagcaacgtggcggcggcggtcgtgggcaaggtggtggtcgcggtcaacagcaaccacgccgtggggaaggtggcgcaaaatctgcaagcgcgaaacctgcagaaaaaccgtctcgccgcctcggcgatgccaaaccggcaggcgaacaacaacgtcgccgccgtccgcgtaaacctgccgctgcgcagtaatcttttatgccgggctatgcccggcatcaggctgatgaacaaacgcaaaactgcctgatgcgctacgcttatcaggcctacgtgaactctgcaatatattgaatttgcatgcttttgtaggccggataaggcgtttacgccgcatccggcatttcacaacaagcacttgtcagcaatttgagaacacgggaaaaaatttatctgttttaccgcccataagccaccgagacgttacttctctatagccaattgttcgcgcaactccattaaaaggtagcccagtcgattcttgcccttaccattaccaccgtctccccagtaagcatcgttttccgtatgctcaaccagttttgcgggcgcggttgccagcaagagcgcacgcagttctggatgctgttcgaatttagcgcgaagtgcttttcgcatcacctgttctttgaccgactcccagtttttacgcagaggcttagaacgatcgcgccccatgcgtgcggcgaccataggggaagaaacccgacggatctcttcgcggtatttttcatcaaggaatttttgtgcctgaaaatagtgttctgaggtgggccaggttttcccgtcaaccttgatgggccaggcggcaaagttagaaaaatcaccgtagtcatcgctggtgctgtagaaatttatgatggtgtcttgcatgacgtgttggatcctttgtgctcgaacgggcattaaaccgcattatgttggtggttattgcgagccgctttccagaaacagaaaaaccattacccctgaaaaccgaaaaatgccacaatattggctgtttatacagtatttcaggttttctcatggcattaaccgccgcgcttaaagcgcaaattgccgcctggtataaggcgcttcaggaacagatccccgactttattccccgtgcgccgcagcggcagatgattgcggacgtcgccaaaacgctggccggagaagaagggcggcatctggcgattgaagcccccaccggcgttgggaaaacgctctcctatttgatccccggcatcgccattgcccgcgaagagcaaaaaacgctggtggtgagtaccgccaacgtggcgttgcaggatcagatttacagcaaagatttaccgctgctgaaaaagatcattcccgatcttaaattcactgccgcttttgggcgtgggcgctacgtttgcccgcttaatctgacggcgctcgccagcactgagcccacgcaacaggatctgctggcgtttcttgacgacgaactgacgccaaataatcaggaagagcaaaaacgttgtgcgaagctgaagggcgatctcgacacttataaatgggatggtctgcgcgatcatactgatatcgctatagatgacgatctctggcgtcgtttaagtaccgacaaagccagctgcctcaaccgcaactgttactactatcgtgaatgcccgttttttgttgctcgtcgggagattcaggaagcggaagtggtggtggcaaaccatgcgctggtgatggcggcgatggaaagcgaagccgtactacctgacccgaaaaatctgctgctggtgctggacgaaggtcatcacctgccagatgtggcccgggatgcgctggagatgagtgccgaaatcaccgcgccctggtatcgactacagctggacttgttcacgaaactggtcgctacctgcatggagcagtttcgcccgaagaccatcccaccgctggcgatccctgaacgtttgaatgcgcattgtgaagagttgtatgagcttatcgcctcgttaaacaacattctcaatctctacatgcctgccgggcaggaggcagagcaccgttttgcgatgggcgaactgccagatgaagtgctggagatctgccagcggctggcaaaactcaccgagatgctgcgtggcctggcggagttatttcttaacgatttaagtgagaaaaccggcagccatgacattgtacgtctgcatcggttgattttgcagatgaaccgcgcgttggggatgttcgaggcgcaaagcaaactctggcggctggcttcgctggcgcaatcttccggtgcaccggtgaccaaatgggcgacgcgggaagagcgcgaagggcagctacacctctggtttcactgcgtgggaatacgtgtcagcgatcagctggaaaggctgctgtggcgcagtattccgcacattattgtcacctccgcaaccttgcgttcgctgaacagtttttcgcgtttgcaggagatgagtggtctgaaagagaaagcgggcgaccgttttgtggcgctggattccccctttaaccactgcgaacagggcaaaattgttattccccggatgcgcgttgagccttccatcgacaacgaagagcagcatattgccgaaatggcggcctttttccgtaagcaggtggagagcaaaaaacatctcggtatgttggtactgtttgccagcggacgggcgatgcagcgctttctcgactatgtgacggatttacgtctgatgctgctggtgcagggcgatcagccgcgttatcgcttagttgaactgcaccgcaaacgcgttgccaacggtgagcatagtgtgctggtgggcttacagtcatttgccgaagggcttgatttgaaaggtgatctgctcagccaggtgcatatccacaaaatcgcttttccgcccatcgacagcccggtggtgatcaccgaaggggaatggctgaaaagcctcaaccgctatccgtttgaggtgcaaagcctgccgagcgcctcgtttaacctgattcagcaggttgggcgactgattcgaagccacggttgctggggcgaagtggttatctacgacaaacgcttgctgaccaaaaattatggcaagcgactactggatgcattaccggtatttccgatagagcaaccggaagtccctgaaggtatagttaaaaagaaagaaaaaacgaaatccccacgccgtcggcggcgttaatgatgtgagtcaggtaaggagtcgtaaatggactatcgcaaaatcattaaagagatcgggcgcgggaaaaaccacgcgcgcgatttagaccgggatactgcgcgcggtctgtatgcccatatgctcaatggtgaagtccctgaccttgagttgggcggcgtattgattgcgctacgtatcaaaggggaaggggaagcagagatgctcggcttttacgaagccatgcaaaatcacaccatcaagctgacgccgcctgcaggcaagccgatgccgattgtcatccccagttacaacggcgcgcgtaaacaggccaacctgacgccgttgttggcgattctcctgcacaaactcggttttcctgtggtggttcacggggttagcgaagatccaacccgcgtgctgactgaaaccatttttgaattgatgggtattacgccaacgttgcacggcgggcaggcgcaggcgaagctcgacgaacatcaaccggtgtttatgccagtcggcgcgttttgcccgccgctggaaaaacaactggcgatgcgctggcggatgggcgtgcgtaacagtgcacataccctggcgaaactggcgacgccatttgccgaaggtgaggcgctgcgtctttccagcgtttcgcatccggaatacattggacgcgtcgcgaagttctttagcgatatcggcgggcgggcgctactaatgcatggtactgaaggtgaagtgtatgctaatccgcagcgctgcccgcagatcaatctcattgaccgtgaagggatgcgggtgctgtatgaaaaacaggacactgctggtagcgagttactgccacaagcaaaagatccggaaaccacggcgcagtggattgagcgttgccttgctggcagcgaaccgattcccgaatcgctgaaaatccagatggcttgctgcctggtggctacgggtgaagcggcaactatcagcgacggcctggcgcgcgttaatcaggcattttaattcttttctcagccggatgagccatgtcatccggcttttaccccaccgcaatatgaaattcctgcatctttattgaccttcccacgcccggcgtgcagcataaaaaaacaacaaacacataacataaacaggagttaaccatggaaagtggtcatcgctttgatgctcagacgctgcacagttttattcaggctgtatttcgtcagatgggtagcgaggaacaagaagcgaaattagtggccgatcatttaatcgcggcaaacctggcagggcatgattctcatggtattggcatgatcccaagctatgtgcgttcctggagtcaggggcatctgcaaattaaccatcatgccaaaatcgttaaagaggcgggggcggcagtcacgctcgatggcgatcgcgcattcggtcaggtcgcggcacacgaagcgatggcgctggggattgagaaagcgcatcagcacggtattgctgccgtggcgctacataactcgcatcatatcggccgtatcggttactgggcggagcagtgtgcagcggcggggtttgtctctatccactttgttagcgtggtcggtattccaatggtcgcaccgttccacggtcgcgacagccgctttggcaccaatccgttctgtgtggttttccctcgtaaagataatttcccgctgttgcttgattacgccaccagcgccatcgcatttggtaaaactcgcgtcgcctggcataaaggcgtccccgtgccgccaggttgcctgattgacgttaacggcgtgccgacgaccaatccggcggtaatgcaggagtcgccgttgggggcgctgttgacctttgccgaacataaaggctacgcccttgcagcgatgtgtgaaattcttggcggggcgctttctggcggtaaaacgacgcatcaggaaacgttacaaaccagtcccgatgccattcttaactgcatgaccactatcatcatcaacccggaactcttcggcgcgccggattgtaacgcgcagaccgaagcctttgccgagtgggtgaaagcctcgccgcatgatgatgataagccgattttgctaccgggcgagtgggaagtgaacacgcgtcgcgaacggcagaagcaggggattccactggatgcgggaagctggcaggccatttgtgatacagcgcggcagattggtatgccggaagagacgttgcaggctttctgtcaggagttagccagctaaaaaaaagcccgtccagtggcggacgggcaaacaagggtaacataggatcaatgagggttagagcatatgcgtctgtcggcaaacagacagggaaatacttgtgctggacgtagcgtaaacgcctgatccgtccaacggttcggattttgtaggcctgataagacgcggtagcgtcgcatcaggcatctgttgccggatgcggcgtaaacgccttatccgtcctacgaattacttataaattaccgcagtaccgcttaatttattgttgttggtggcggaagtgatgctgtatccactggcaccggctgccgcggctttctcagccagtttcgcttccagggcatcgagggtggatgcgccattggcagaaaccacgccgattttattcatgttctgtgcctgggatgccgttaccggttccgcggcaaacacgccaaatgacagagttgaaagagccatagcagcaacaacagtattgatagttttcataattaatctctcgcaggtgatttttgtataagtgacgttgtttcgtcgatgtgatgagtatcacgtttttttacgagagataaaatcgaagagaattgaccgccttgttcaaataaattgattgatatctaacatactgataaaccatttatttgttgtacttatggacttgttttatgccgcgtggcagtcacagcagcgttaaaggcacggaatgccacgcaaaatacaaattatactcgctatgcatctcgccagttgtagttaacgtaactggctgtctttcgaacctctgcgattatatcctgtatacgctggtttttgtaaatctttctcctgctgacaatgaatgcataagcgcacgccaggaatggcttcccgacgggcttgcgggatgggggcaccgcactcttcacattcatccaggctttcgccacgcggaatttcaccccgagcgcgggcaatcgcatcttcaattgtactgttgatctgttcgttgacggcgtcatcgttagcccaaccggatgccatatcgtcctccccatatcaatgcttgtacagttaagtgtagctaatccagggacgaacctgggcagttcaagcatcagatctccgaccattcccgcagcagattatgataaagattaagcagcgacaggatctcttcactttcgccgtagcggcttttcagcgactgaatattgttgtccagttcaaacagcatggcgcgctttttatcatcacggatcatcgactggatccacataaatgatgccactcgtacgccgcgggttacgggtgtcacgcaatgcaggctgctggagggatacaacacgagatcgcctgccgggagttttacccgatgttgtccgaaggtgtcattaacgaccagttcgccgccgtcgtagctttgtggatcgcttaaaaacagcgtggcagaaaggtcagtacgcatccagccgttttgtggatggctgcgtactgcgccatccacatggaaaccataggtttcattgttctgatagcgattaaacagcggcgtggaaagggtacgcggcaaggccgcggcaaagaacaaagcatgttggttaaccgcgttcagcacctcattttgcagggcggcgtataacgtgctgcgggtgtcgacctgttgattgttcttaacttgcgcaccttgtgcgccggtggtgatgcgtccatccacccattcggcttgttccagttgttcgcgaaaccgggcgacgtcctgtggcgataacacgccgggaatgtggtacatcatacaagttctccaaaaagtggggcctgcgccccacatctgaatcagaaatgcatattggctgtgagcaagaaggttcttggctcgcccgggtgataacggtagccgctcttgttgattgaggcgacgtaatcggtatcaaacaggttgtaaacgtttagctggaagtcgagattgcgattaacccgataccccagtttggcatcggcgacccagtaaccttcggtaaacgctggcgttcccaccgcgccgtctgaacctttatgcatactgccgatatagcgtgcgcccgcgccaacagagatatcatctgttgcctgatactggctccataaggtgaaggcgtgctccggggtatacggcagcgatgaggaaccatcctgggcaacatctttgccgtttttgatggttgctttttgctgggtatagccgccaatcacctgccacgcgggagtgatattcccggccacggatatctcatagccttcgacacgtttcttaccgtattgcgagtaagttccgtcatcattttgctcaacttcattttcgatatcagtacggaacagcgcggcggtgagcaacaggcgtttatccagaacctgccatttggtgccaatctcgctggtgttggctttttgcggtttaaaatcggtgcggttggcactgttaccgctgccagactgcgcaagggcgaagttgttgccgcccggaggctgctgggaaacggcatagttaatatagacattaccgttttccgtcaggtgatacagcgccccggctttccagttcaccagattgcccgacttggcggtgtcgacggtggtgaccggagaaccttttgccacaccagctgggcaggtgatggcaccgcgtccgctgccgccgcaggcggtggcactgtcatattcagtatgataattatccagacggatcccgccgttcagctcaaaatcacgggtgatttgcagcgtatcgaaggcgtaaattgcgaaggtatccgtctgaccattggcgtttgcgccgttgcgcgtcaggccgccgggatgaatgctgctgtcgggatgataaatatttaccgcgggtaacgtcaccggattaacgccgtagttagtctgcgtttcacgggtaaattccacgccggtactgacatcatgaccgatagaaccggtatagaacgtcgaggtcaggttggtctggttggtgagaattttattactcacatctttggtattcgccgtgcgtgaccaggtccagctattcacatcgctggtgggctgagtaatattcgacgccccgcccataatcgccgtcatcaggtaatcctgctttacgcgcgaccaacgggtagtattgcgaatggtggtgttatcgttgatgtcgtgctcaaaacgcatggtggcggtgtcggtggtcgaatcgtcgtaatcggaatccgtgccgtaaaagttatgagtatcaacttttccggaatgattcagagccgctgttcccgcagatggggcagaataacccggcaaaccgatggtcggaatgccgccgtctggcgtgttgtgctgggtgacatgcagataattaagatacaaacgattcgctgtaccaaggccaaaagcgatagaaggggcgacgccgtaacgctcatttttgactttgtcgcgtccggcatcgtgcgttttttcgcccatcacattcaggcgcaccgcagtggtatcaccaatgacctgattgacgtccagcgtgccgcggcggaaccaggtgctgccaatactggcggaggcgtcaatgccggaatcattgcgcggctgcttgctgatcatattgatcgagcccgtcggcgcgctgcgcccgtagtcggtgccggaaggccctttaatcacttcgacctgctcagtattgaaggtgtcgcgcgagacgctgccgatatcgcgaatgccatcaatataaatactgttagaggtatcagcaccgcgcatataaatggcgtcgccagtggtggagttaccgttctcacccgcaaaaaacgcacccacgccggggtaatgccgatcagttaaggatcagttgaccgatccagtggctgtgtaagaatccggaaacgctcactcgtttccggatttttttatgcacattggacaggcccttgatttggtatcccgttacgatt

SEQ ID NO: 28 - DNA, 102564 bp, Escherichia coli
  source 1..102564: mol_type = genomic DNA
aaatatcgagttcgcacatcttgttgtctgattattgatttttcgcgaaaccatttgatcatatgacaagatgtgtatccaccttaacttaatgatttttaccaaaatcattaggggattcatcagtactctgcaaccggaccgttgtgaaatccgcggtgaaaactttcactggcaaggtgacgccctggtcattggtattggtaacgggcgtcaggccggtggcggtcagcaattgtgtccgaacgcgttaattaacgatggcttgctgcaactgcgcatttttaccggcgatgaaattcttccggctctcgtatcaaccttaaaatctgacgaagataacccgaatattatcgaaggcgcttcgtcgtggtttgatatacaagccccacacgaaatcacttttaatcttgatggcgaaccgttgagcggacaaaactttcatattgaaatacttccggcggcgttgcgttgtcgattaccaccagattgtccattattgcgttaatcaaactattctctcttgaaccagggagaatccgaaatgccggatgcagtgtaaataccttatccggcatacagaacaatactacaccgtaattaattttacccgtgtcttctgcaatgccagtttatccacctcagacacagcatcatcggtaataataatgtcaattttttcgattggcagtacctgattaaaaccgcgacggttaaatttcgatgaatcgagaacggcaatcactttattagcggcggtgaccatcgccccgctaatcgaataaccttcattaaaggtcgtaataccattaaccgcatcaataccatcagcaccgacaaacattaaatcggcattaatatcctgcaatgaacgctcggcaatggaaccatgcatcgagcgcgttttatggcggaccgtgccaccgcagacgaccagagtaatgtctttattttcggaaagggcaaacgctgccgggagactgttggtaatcaccgtgatatttttggcggtcattaatccttcggcgataagcatcgtcgtacttccgctgtcgagaataacggtcatcccttcgtggatcattttgactgccgcctgcgctattctgttttttggcgcgctggcgagctgaaatcgctctttaaacccgacttcctgggtctcggtttcactattaccggacattattttcgccgcaccgccatgaaagcgcgtaaccacgcctttttgttcgagaaagcgcaaatcggcacggattgtcgcttccgaggcagcaaatactcccgccagatcctgaacaagcacggttccctgttcattcactaattggatgatcttattccttcgctcgaatgaattcatcgtcatttacccatattcaattgtggctagtgtaaacgaagggggaccattggtgaatgatctgttttgcacaataccgggccagcatcacgctggcccgcggtttcatggaatgagcaacactttgcccggcatggcattacgagcgatgtcacgcaccgcctgggtgaagctttcaaagcttccacggtgagcgattaatggctccaggcttaacttacgttctgtcagcaaccggctcgccgtttcccactcctgccccggccaagggctggaatagttcatccaactgccgataaccgtcagctctttacgcaatattttgccaaacgttgccgatgttaaatgcagatcctgatgcaacgtgcccaccagcgccagttgggcatgaggaccggcaatctctaccgccagttcgacagtttgcggtacgccagccgtctcgaggataagctgattaaaacgcagttcgcgtaaaacgctctgcatttgcggcgcgctcatttcgctactgttaaatgtttgcatcgcaccgaaagattttgccagtgccagtttttctgagctaatgtcgatagccgtcacactctttgctcccagcgcgacagcgcactgaatagccagcaggccaatggttccggcaccaataataataacgtttttattctcacaaccttgcgctaaatgaaaagcatgcagaccaacggtaatcggctcaataaaagccccatcctcaataggcatatccgtgggtagagcaaagacattttttcgcttaacgacaatatattcagcaaatccaccatcacgccgcgagccaataaaatcatattttgcgcactgggaataaaaccctttcagacactctggacaagtaaaacagggtaataacggcacacaggcaaccgcatcgtcagggtgtaaatcatcaacaccggatcccaccgcatcaatatagccgctaaattcatggcctaacgttattggataataatgtgcaccatttttaaatatcctgggtaaatcggaaccacataagcccgagctggcaatttttacccgcacctcatcctgatgtttaatttcaggaatgacgctttctgcaacgcgcacgataccatcagtatcattcaccactgatttcataaaaactcctgattgttaagggggataacctccccctcaggtaaaaattattctgcgagaacgactttctcttgtttaataaagccacgcgctctacgccaggtcatgaaaataccggtaagataaattgcgccgataataatgaatccgggaatattttgcggggagaaaacctgaatcagtaaccaggtaatgggagaaccgccctgatccattgaagccaccatacccccggcttttaacgccccagcattagccgccagttgggtgtgcaaaccaatagtttgcgtcgcgatccacagagtgatgctcatgatgatgacacccgagattaaggtgcggaacagatttccacgatgcacggcgactgccatcgccacaaagaagccgatggtggcaagatcgccaaacggcagcacctgattacccggaacacaaacagcaattaaaatggtgagagggataaaaatcaggcttgccgataccaccgccgtatgccccagcagtaatgcgggatccaggccaatcaggaactcctgaccgccgaacttcgcctgtaaacgactacgggcctgcttagcgatgggcgttaaaccatccatgatgggtttaatcacccgtggcattagcagcatcactgccgccgtttttaccgccagctgcaatacacctttgacatcgtaacccgcgaggatgccgataatcagccccatcacaaaacccacggtgacaggctcgccaaatggaccaaatttgcgctgaatatcatcggcgctaaatttaattcggttaacgcctgggattttctcgatgatagcatcgaccagcaccgcaatcggccccatatacgccgacgtaccgtgcggaatagcaataccttccagctcaaagaaatttcgggtatcgcgggcaaaccagtcgccgagcttataaacaaacgccgcgtgaattaccacacctgccatccctatcatccatgaaccggttgccaggtgcagcaacgcgccggtgaaggtcatatgccagatattccagatatcaacatttaccacccgcgtcatacgggtcagtaacatcgccacgttaaccaatatcgcaatcggaatcgccaccagcgcaatttgcgacgcccaggtcattggtgaagagcccggccagccgacatcgaccacatgcagattcaggtcgaaattttccgccatcgctttcgccgccggaccaatggaatccagcattaagccaatcacaaggccaatgccaacaaagccaatcccgatatgcagacccgctttaaagcaatcgcctgccttcatgcctaatattttagaaaaaataatgatgacaatcggaagcatcaccgtagggccgaggtcgagaatataacgcatgacttctgaaaacataggtcacccctgtaagatagtcagaattttattttgtaatgcttcgataccgacaccagaaataaaaggcatgccgtgaactaacggaatatcgccaaaactacgatccactttggcagtggtgcatatcaaatgcacaccatccatataggtttctatttcattaacccgacactggattaattcaacaggaatattatgattctgacacaactctttaatttcttccgccgccatcgtagaggtcgcaaccgcgcctccgcaagcgacaataatcttgcgtttcataaatagtcctttttattgttacagagggatttattcgtctgaatctaaaacatactttgtgaagtattcctttaactgagtttcaggaagagtaattagtgtctcgacgatatcgggctgttgtaacttgccaaataaacagcgtaaaagtttcaattgctgctgcggattttccacaatcaacgcaataaccaacgacacctccacgtcgttatcatcatccgcttgctgaaaatgaactttatttgttggccttaacagataaatggctgacgacttagcatgaatcgcctcacaatgcggtatagcaatggcgtgctgctcaagcattatcccggtagggaattctgcttctctggcaattaatgcctgtggccaggtatcataaaccacacctttcgcgagcatctcattaccgatatgggttaaaacttcgctacgatcgacaaaagaaattccgctacgaacaaacaggttagtcatataccgtccttattccgcacagccgtagcgataggcgcgcaaaacatcataaattttatccataatcagctgatgcggtattgctgataattccccggactgaatgcgttcaaattgtttgggaagatactgactaatcatgcccagtgggatgtccacgccttcaagattcaccatcatcgtttcgacgctatttttaatccgactatgcggccagtaataacgaatacgatccgacaggctgtaacgaatatccagtaatgaatcgttaaaacccgtacgataatattttttccagtattgcggttcgtcgagcatcacttcttcaattaccgccaggcaaccgctgcgattttcaggggcgataagttcctgctcaatttgtgccagtgcaaatatcgcctcgcgtaaagcaaaggttaatgcgggaccgactttcaatattgcaaagtgatcgcggactaattcccaataagccgtccgggtctggtaatcggtagaatgtgcttcataaaccattcgggtgctttctatccattgcgccagcggctgcgcttcctgcggctgataatggataatattgctgtgatcaaattccacgcccggctgcaccacgatggcaatcacgcgtgttaacgcctctgtcagcccacgggcaataaaggccttttgatgcgtacataaagtattggcggcatcttcaacatgggtgatgtgtactgactgaatggcgctggcctcaccgcccggaaccggaacttcggtgccaatgacatagctcagttgctcacgctggcaatctgtcgccacactttccgcagcaaagcaaagcacagcagctcgttccgcaaccgtttctggtgctaacggtatgggatcccccgcgcaggacattgacgcatcaagatgaattttactgaaaccggcacgaacatattcctttaccagctcgacggatttttccatcgccgcatccgcattttcttgctgccagcagtttggccccagatgatcgccgccgagaataatgcgttcgcgtgcaaacccaactttatcggcaatcgtaaaaacaaattcgcgaaagtctgccggtgtcattccggtataaccgccaaattgattgacctggtttgacgttgcttcaatcagcactttgcgcgtgctgttgcgatcaaatgccagcgccgcttcgataaccaacggatgggcagaacagactgaacatatgccgatatgttcaccagctttatgccgggcaattaacgttttcatgttttttccttattaaatggcaggtgcgttatgccctgccctcgcagccacaatcggcaatcactttgctcaccacatcgcgcattgcggatttagccgactgcaaataatcccggggatcggtcgcttcagggtgctcggtcaggtaattttttaacgcctgcgagaaggcatttttcagctccgttgcaacgttgattttgcatatccccagtttgatggtttgctgaatatccttagtcgataaccctgacgcgccatgcagcaccagcggtaagttcacccactggcgaatgttctccagtcgagaaaaatcaagcgccggtgcgctggcatacatcccatgagccgtgccgatggcgaccgccagggaatcaattccggttgcctcggcaaattcacgcgcctgagcggggttggtataaaaagcatcggcttcattgacttgcacatcatcttcctggccgccaagttgccccagctccgcttcgacgctgacatcaaagcgatggcaaaaatccaccacctctttgacccgtgaaatattttgcgcaaaaggcaaatgcgaggcgtcaatcatgactgagcgcacgccagaacgaaccttctgagcgatatcgtcaaatttcgtgtgatggtcgagatgaattgccagtggatggtgatattgcttcgccatcgcgctgaccagcgccaacagattttctgtaccagcatgagtaaatgtgccaggcgttccggcgatgatgaccggcgcatgcaggttggcagcggtttccaccaccacttgcatcgtttcgagattgtgaatattgaatgccggaaccgcataaccgccgcgctgtgcgttgttcagcatctgctttgtcgataccacgtacattttcatatcctgtcgtttgttttcgatttcaaaatataatgaaatgatttgtttttaaatgtcgagataacgatcacaaaaacgacaatgtgaaaattgttcgaggagtaaaaggcaaaaaaaaacggcctcccgatagggaagccgtagcaaagtgcgcgtgtttttatgccggatgcggtgtaaacatacgtggcagtgctatgtaggcatgataagacgcttccgcgtcgcatcaggcataggttgccggatgcagtgtaaacgccttatccgtcctacggggtggtgctgttcgtatgaggcgtatcaggcaatagtaattttgctatcgagataaacgtcctgcacggcattaatcagtttcacgccgtcagccatcgatttcttgaacgccttacgtccaagaatcagccccattccgccagcgcgtttgttgataaccgcagtacgcactgcatcgctgaggtcagtttcaccgcccgcagcaccgccggagtttatcaacccagcccgacccatatagcagttagctaactgataacgcaccagatcaatcgggttttcgctggtcaatttgctgtaaacacgatcgtcggtgtaaccgtaattaattgctttatagccgccgttattttccgccattttttgtttgacgatatctgcaccgatggttgccgccagatggtttgcctgaccggtcaggtcggcggaaacatggtaatcaacgccatctttcttaaaggcggagttacgcaaataggcccacagcactgtcaccatacccagctcgtgcgcacgttcaaaagccgcagaaatttcttcaatctggcgacgtgactcttccgagccaaaatagatagtcgcaccaaccgcaaccgcgcccatgttgaacgcctgctccacgctggcatacagcgtttgatcgtaggtattcgggtaacttagcgtctcgttgtgattaagtttgacgaggaatggaatgcgatgcgcataacgccgcgataccgacgccagcacgccgtaagttgacgccacacagttacagcccgcttcgatcgccagttcaacaatgtttttcgggtcaaagtagagcgggttagcagcaaatgaagctccggcagagtgctcaacgccctggtcaaccggcagaatagaaagatatcctgtgccagccagacgcccggtgttgtacaacgtctgcatattacgtaacaccgctggcgggcgattattgtcaatcattacgcggtctacgtagtcatgtccggggagataaagctggtcagaaggaattgtcatacaacggtgctgtaaaaggttgtcggcgtctttgccaagcaactgcgcaatatctgtcattactatgctcccgtaaattccgattggatatcggctatggattgtcctggcccgccttttgcgggcaatcataatcctggtcgttacgggcgagtttttccatcttttggatgttttttcagcgttttctgttggctcgattcatcagaaaaaatgttagcgcggtcaagttttcacctcaaaggtatttaaaaggtattattaagtggtattgtcatcgcgtaccttacattacctgtcatgaaggaattaaaagatgaaaacaacagcaaagctgtcgttcatgatgtttgttgaatggtttatctggggcgcgtggtttgtgccattgtggttgtggttaagtaaaagcggttttagtgccggagaaattggctggtcgtatgcctgcacagccattgcggcgatcctgtcgccaattctggttggctccatcactgaccgctttttctcggcgcaaaaagtgctggcggtattgatgttcgcaggcgcgctgctgatgtatttcgctgcgcaacagaccacttttgccgggttcttcccgttactgctggcctactcgctaacctatatgccgaccattgcgctgactaacagtatcgcttttgccaacgtgccggatgtggagcgtgatttcccgcgcattcgtgtgatgggcactatcggctggattgcctctggtctggcatgtggtttcttgccgcaaatgctggggtatgccgatatctcaccgactaacatcccgctgctgattaccgccggaagttctgctctgctcggtgtgtttgcgtttttcctgcccgacacgccgccaaaaagcaccggcaaaatggacattaaagtcatgctcggcctggatgcgctgatcctgctgcgcgataaaaacttcctcgtctttttcttctgttcattcctgtttgcgatgccactggcgttctattacatctttgccaacggttatctgaccgaagttggcatgaaaaacgccaccggctggatgacgctcggccagttctctgaaatcttctttatgctggcattgccgtttttcactaaacgctttggtatcaaaaaggtattattgcttggtctggtcaccgctgcgatccgctatggcttctttatttacggtagtgcggatgaatatttcacctacgcgttactgttcctcggtattttgcttcacggcgtaagttacgatttttactacgttaccgcttacatctatgtcgataaaaaagcccccgtgcatatgcgtaccgccgcgcaggggctgatcacgctctgctgccagggcttcggcagtttgctcggctatcgtcttggcggtgtgatgatggaaaagatgttcgcttatccggaaccggtaaacgggctgactttcaactggtccgggatgtggactttcggcgcggtgatgattgccattatcgccgtgctgttcatgatttttttccgcgaatccgacaacgaaattacggccatcaaggtcgatgatcgcgatattgcgttgacacaaggggaagttaaatgaaaacagaacgtattctcggtgctctttatgggcaggcgttaggggatgcgatggggatgccctccgagctttggccacgcagccgcgttaaagcacactttggctggattgaccgttttctgcctggaccaaaggagaataacgcggcctgttattttaaccgcgccgaattcaccgacgatacctcgatggcgctgtgtctggcggatgcgttactggaacgtgaaggcaagatcgatccggatctgattgggcgtaatattctcgactgggcgctgcgtttcgacgcctttaacaaaaacgtactaggtccgacctcgaagattgcgcttaacgccattcgcgacggtaaacccgttgctgaactggaaaacaacggcgtgaccaacggcgcagcgatgcgcgtctcgccattaggttgtttgcttccggcgcgtgatgttgattcctttattgatgatgtggcgctggcgtcgagcccgacccataaatccgatctggcagttgcaggtgcggtagtcatcgcatgggcgatttctcgtgccattgacggagaaagctggtcagcgattgttgattccctgccttcaattgcgcgacatgcacagcaaaaacgcatcactaccttcagcgcctcactggcagcacgtctggagattgcgctgaaaattgtgcgcaatgccgacggcaccgaatccgccagcgaacagctttaccaggtcgttggcgcaggtaccagcactattgagtccgttccgtgcgccattgcgctggttgaactggcacaaaccgacccgaatcgctgcgccgtcctgtgcgctaaccttggcggcgacacagacaccatcggcgctatggcgacggcgatttgcggcgcgttgcatggcgttaacgctatcgatcctgcattaaaggcggaactggatgcggtaaatcagcttgatttcaaccgctatgccacagcgctggcgaaatatcgtcaacaacgggaggcggtatgagcggcgctcgattacacacgctgctgcctgaattaacctcgcgtcagccggtgatggtcgtcggcgcggcggtcattgatgtgatcgccgacgcttatgccctcccctggcgtgggtgcgatatcgaactgaagcagcagagcgttaacgttggcggctgcgcactgaatattgccgtggcgttaaagcgcctcggcatcgaagcgggtaatgccttgccgctcggtcagggcgtgtgggcggagattattcgcaaccggatggcgaaagaggggttaatcagcctgatcgataacgccgaaggcgataacggctggtgtctggcgctggttgagccggatggcgaacgcacttttatgtcattcagcggtgtggaaaatcagtggaatcgccagtggctggcgcgattaaccgttgcgcctggcagcctgctctatttttccggttatcaactggcctcgccctgcggcgaattgttagtggaatggctggaaaagctgcaagacgtgacgccgtttatcgattttggcccacgtatcggcgatatcccggacgcattactggcgcggatcatggcctgtcgacctttagtatcactcaatcgtcaagaggctgagattgccgccgaacgttttgctttatccgcagagataacaacacttggcaagcaatggcaggagaaatttgccgcgccgttgatcgttcgtctcgataaagagggtgcatggtatttcagcaacgacgcttctggctgcattccggcatttccaacgcaagttgtagacaccattggggcgggcgacagtcatgcaggtggcgtacttgccgggctggcctctggtctgccactggcggatgccgtattactgggcaatgcagtggcgtcgtgggttgtcgggcatcggggcggtgattgtgcgccaacgcgcgaggaactactcctcgcacacaaaaacgtatagatcgctgcgacagtggctaatgctgtactcaataggccgttgctgttggtcaagcgccacttgcttgatcaccagcaccggtattttgctatctaactgaatatgtgactgaaactcggcatccggcatccgggcgctaacgcgggaacgcgtacgttgtgggtaaatgtgctggctgcggaaatagtcataaagtgaaatcccgatggcatcaacatcatgaattaaatgcgccggaacccacgattcctcaatcgataccgcttcttcatcgacatagcgaatacgcttaagcaaaaagacatcacttcctgcttcgaccgccagctgctgcgcgacttcttcgggacatttcacgacacgcttgttaacccatagcgtatcgggctttttcccgcgcaataccacctgctgagaaaaacctcgcgcttctttcaacgagtattcgaagatgttgttgatctgcgtgccgtaaccgcgcgaacgcgtcaccacaccctcttcttccagcgcctgcatcgccttgcgcaccgtaatgcgcgaaacgccggttaactgacttaaatcacgctcaccgggcaaaatattgccatgctccagcaccccgctgcgcacggcattttttaccgtttcggcaaacttaatataaagcggcgtgttatccgccgctaaaatacgctcgttcagttgggcaatcagctgggtatgcgcttgttccatttgtctttttcctgccggggagtctggtgggagtatatcactgcttcttatttaaggcgtttctttaatcccatcaacgaatgcctgcaactcctccaccgtgccatgaaatacattaaaatccaccggaccattgatgccatctacctgtccacggtcggaatgctgccagaagcgccaggccatgccgtcattgtccggacgacgttgataatagtgagccacccaccacggatattcattgaaatagcccgccagattggtgtgataaaaaacggctcctgagtaaataatcggcttttttcccgtacttttttcgaccatttttagccactgacttactcgtttgcgtaattcttttgccgataattttccccgttcttctacgtccagtaccgcagggaaatcgccttgtgagaaatccaccgtttgcagaaataatcgtgcctgaaccggcgctgctaccgacggggagaaataatgatacgccccgcgcagcaggccattttcgcggcttagttgccagttacgcgaaaaatacgggtccaccagcttttcgccttccgtcgccttaataaaagcaaactgtaagcggataccgttgtcgcgcatttttgccacccgctgccagtcgatccgctcctgccagcgagaaacatctattccgtgaatggtgtaactggcaggaatgcgaatagcgaaagatttaaccgggcgataaccgtagaaatggatgtagtctgtaatctgaactgctgtcgaatagaaaaaattcaccgtctgacgcggataaattgcaacgatggaaattagcccaagagcgcataatagagaggtgagtttttttcgactggtaattcttagctgcattggtttcatccctgaatgtcagtgccaaaggctgacaataaccaaagcagctatagtacggtgctcaccaccaggcgtggaagtggtgaaccggaccaataccgtgaccaacttccagcgtgtcggcctgggctaatgctgatgaaagccagctttttgcctcctgtacggtgtcagcccagtttgtatggcgcgggcgtagtgcagccaacgccgcagagagcgtacaaccagtgccgtgggtgtttttggtcataatgcgcggtgcggtaaaccgttgttcaccctcgcgggtaaacagccagtccgggctttgctcatcatccagatgaccacctttcattagcactgcgccacagcccatcgccaacagcgatcgcccttgttccagcatttcctgttcggtgcgcgcgtgtggcgcgtcgagcaaggcggcagcttcgggcaagtttggcgttattaatgaaacctgtggcaataatcgactgcgcagtgtagcaaccgccgaaggtgaaagcagcgggtcgccgctttttgccagcataacggtgtcgagtaccacgttttggatctgataacgttgcaaccgttctgccaccgcttcaacaatatcggtttccgccaacataccgattttagtggtgtcgattcgcacatcgctgaacaccgaatcgagctgggcggcgacaaaatcaggctcaatgcgatacaccgactgtacgccacgggtattttgcgccaccagtgcagtaataactgagcaaccataagcgccaagtgccgagaaggttttaagatcggcctgaatccccgcaccaccactgggatcagtaccggcaatcgtcagagcgttaattcgtttcatgcctgcacctcctgcgtcaattgccagagcgcatcaaggaaatgtggaacaaaactgcctggcccctcgcttctggcgactgcgcgctctccggcttgtttcatccagtgacaggcagatgcgacattttccagcgtatcgcctggtaacgcacagcaggcagcgacaaccgccgataatgcacagccagttcctaccactttggtcattaacggatcgccaccgtgaatgccaacggcgcgatggccatcggtaacataatccacctcgccagtgaccacgacgattgcgccagtttcccgtgccagtgtttgtgcagcgggtatcgcgttagctgcggcgtcagtggtatccactccccgtccaccattagcaatgccagctaatgccatgatttccgaagcattaccacgtatcgctgccggtttaaaagataaaagttcatgacaaaaatggcggcgataatcgagcgcaccaaccgctactggatcaagcgtccagggtgtttgagagctttttgcttgctcaacggcagcacgcatcgcctgagcgcgtggctgcgtcagtgtgccaacgttaatcaacaaggcactggcgatagccgcaaactgactggcctcttcggtttcgataaccatcgctggcgatgcaccgagcgccagcaaggtattggcagtaaaggtttgcaccacatcgttggtcatgcagtgcacaagaggggaatgttggtgaaaaaggtgtaacgcgtgcgcagattgcgctgaactcagcaggtcgacttgcatagtttgctcctgccataacgtgaagaagcaatgacctggtggtccgtgacttccctacgctggcattatccagatcaggtgatacgggtatttctcagccttcacgcagaagggcaccccgagtcgtttggttgcgatgataaatcgcagaggaggatggtaatgtccagcgcacccgttgtaaacgaggaaaaacggcagttttacaatagcgttaataaattatttgatatatgaatccagcaccttcagaacgacatccagatcttcttcacgttttagctcatccccctggtgaacgatgtgttccgtcagatgacctttaatcacttcccgcatcagaccgtttaccgcgccacggatagcagcaatctgttgtaaaactgcagcgcattcgtgcggctcgtcgagcattttcttgagcgccacgacctgaccctgaatcttactggcacgcgctttcagtttctgtttatcacggattgtatgagacatggcaacaccttgttaacaagaacatgaaaaatcatagcactattaatctactgggggggagtatcaggtactgggggggagtagaatcagattgccgaattaatactaagaattattatcatgaccgaatttacaactcttcttcagcaaggaaacgcctggttcttcatccccagcgccatcttacttggtgcgcttcatggcctggaaccagggcactcaaaaacgatgatggcggcgtttatcatcgccatcaaaggcaccattaaacaggcggtgatgctcggactggcagcaaccatttcgcataccgcagtggtctggttgattgcctttggcgggatggtgatcagcaagcgctttactgctcaatcagcagaaccgtggctccagttgatttccgcagtgatcattattggcaccgcgttctggatgttctggcgtacctggcgcggcgaacgcaactggctggagaatatgcacgagcatgatcatgcgcatcatcaccacgatcacgaagatcaccacgaccatggacatcatcaccatcacgaacatggcgagtatcaggatgcccatgcacgagcccatgccaatgacattaaacgacgctttgatggtagagaggtcaccaactggcaaattttgctatttggcttaaccggtggccttatcccctgcccggcagcaattaccgtgctgttgatttgcattcagttgaaagccctgacactgggcgcaacactggtcgtcagtttcagcattggcctggcgttaacgctggtcaccgtaggcgttggcgcagcaatcagcgttcagcaggtcgcaaaacgctggagcggatttaacactctcgctaaacgcgccccctatttttccagtctgttgattggcttagttggtgtgtatatgggcgtacatggcttcatgggcataatgcgataactcaatcctttaggcttgcatgttatcttcagcccaggatgattcttaaatcagctatttccgctgactctctgctcgctaaggatgcttttagggcatcctttcatttacactttttacgaaatcatgggatcactaacaaaatatcgcttgtcagttatattgtatggcaggaaagatatgcgactgatattacagatccccaaagtggagagtttatgaccattaaaaataagatgttgctgggtgcgcttttgctggttaccagtgccgcctgggccgcaccagccaccgcgggttcgaccaatacctcgggaatttctaagtatgagttaagcagtttcattgctgactttaagcatttcaaaccaggcgataccgtcccagagatgtaccgcaccgatgagtacaacattaagcagtggcagttacgtaacctgcccgcgcctgatgccgggacgcactggacctatatgggtggcgcgtacgtgttgatcagcgacaccgacggtaaaatcattaaagcctacgacggtgagattttttatcatcgctaaaaaaagccccctcatcatgagggggaaatgcagacaccttgttattttttattattagccacttgctcgtcttgcttgttattagtcgtatttcacgttgattaatgcggttgcctccagtgcgccagatttaattttatttgtatcgtagacgtagtaactggcagttatcggaattgaaaccgttgtatctgtaagttttgacttcgccgcaacttcctttaaatttgtatatcctttactgctgttagtgatatttaaaagtgtgactggcgaaccattactttcaagaataaatcctacgccattatcttccgcacctttcagtattgtgttgctgttggttaacaagtcagaacttgataaatacacctgcattttccgtgatgtttgattttgttgacctaataaatttttacaacgcagaataatatcctcttttttactatttattgttgctttgttacctgtggctggtaattgtgaaacgggaatactgtctaaagtaattaataaatcatccggtttgcaggttgtggttatcgggttgtatgacaatgtcagattaaaggaatagacacctgcattttgtgccaatgcatttctgtagctatttacacatgcatcccatgacttgccacctaataaacacagtagaaattgtactgcggcactcccgcgtgtcgatgatgaagcactggataatgtcgcaacaccattaatcatcactgaaccgccgccccccgcagaaacattcacttttgcattactggccgcaggtgtcaccgtaactgaataaccactggtgaaactggtctgattatttgacaacgtgatgttgtttttattggtccattcaaaatgtaaatttaattttatggtatcgttataaagtccaacaataatatccgacgggctcataggggtgatagtatttgtacttacgcatgacgaatcattaaaattatgctcatatgtcgccatttgtgtttgagtaagtgcaaaatccccctgaacaaccaagttgtgctgaacagataactcactataacatgccgcatagctcacaggcataaccatcatcattaatataaatagcattatgcgaatttccatagaaccacctgactattactggcaaatataatttctactttcatcaatctctttaccgaaggtgattgtgcatgaaagtccttgttgcttatcaattgccacattaaccgatggcggtacttcattggtgcgaataaataactggcttccctgaccgacaacgccaatattatgaccatggatatcattgacttcataaccaaacattaatggttgcccatccgctcttaacgcttttataaaccagggcttgcgctgatcggtatcaaaattaaccagtacaaccgcgccgcgataaggggcggcaattttccggttgccacgtaattctgcttcgctatcgctttgcgacacatccagcatcaggtgattttcccgataaggtgtcattccgtcgtataccaccactccattacggtttgttgtgcgatatttttgcccattgacataagcatctttaattcctggcgcattcatcacagcaaacgtttcggaaagacggttcgccagattaacgccccccgaccaggcgacaatgccccctgaaacactggctccagcctgtcgataagtactcgactgactataactgccattcactgtcgcaaccggcgcgttccaggtcaaattcgccccagctgtcgtttcatttccctgattctgataactcaggttgaccccatagttaaactgatcccggcttccaacggttcctgataatcccgtattatttgaggcaaacccctgatcatcaaacgtcgttgagttagacatatatatttgccgacgaggcgtcgtaacgtcatcaccccaatcaaagggaatcgatataaaaatattaaaacgtttctcttcatgatgattctcgtcatacgcctggcttgccgcgaggatatagcttatccgccgccagttattggaataactcaactgataatccttactgctgccgctacgcccccagtaatctcgccataacgtacttaaggacacagccccccagccttctggcaatgactggctcatattggcagagaagctatttttacggccaaaatcgttctggtaataatcggcaatgtcatagacatcgttttcatcacggcgataattatctttattgtttgcccaaacgtgatcattaaatgtccggtaatcacgcgatgaataacgccaggccgccagaccaaaacgcgtcgacgtttggctcacaaatttgttgtaggcaatttgataactttgcccgtcaaacacatcgccgttgtcttgtttactatgcgacttcgtggcatcgacggaaatggcaccaaagcgtgtattccagccagtccccaaagtaaacgcgtaataattattcgcgaccatcgagccaccatacagcgtcaataaattattaaaaccatactgataacccgcctggacaaaatcactttgtttgctcgccccttcaatatggctacgacccgccgcaaaatcatatttcgatacgccgggttgcagcatatttggcactgctgcataaggcaccagataggtggttaccgagccgtccgcctctttcacgctgacatcaagatctgctccaccaccggccaactgcaaatctgtaatcgcgaacgggccaggaggaacctctttctgataaaccacaaaaccgttctgttcaatagttaccagcgcattactctgagcaatcccctgcacccgtggcgtaaaattttgtttcgagttaggcaacatctgcatatcacgaaacaaccgcacaccgctgaagcgaacagaatcaaaaatatcgcttgatgtgtacatatcacccacgcgaagcgtgccgagaagttgggcaaatccacgttccagatacagggtattgcttttccacacccctggattgttatttgttttactgaaactggcatcagaatgcagttgccaccccagtaaatttaacccgctgttaaaacgtacatatgtactcttactattacccgacgctttatagtcactgtaatactgactcacataataagaggtataaaacgcattaataccccgctcccagttttccggtggaacatagccactttccagttcttccacccaggcctgcgggacactgaaatcgagacgaaaaaccccgatatcccaggtatagctcccaccctgaacaagttgctcaaatgttaaacattgcttaccgctggcgaagttatcgctattaatgcctaaccgcttgataacttctattgataaacatgtttcttgcgggttgtctttaacaataatctcatatttcccgcgccattgcttattgacataaatatcgatgtcatactgccccggtaagggttgattatcatcaagacgaatatttgcaacctgctggtctttcattccacctatcataaaatgggtatcaaaggtttcttcagctgcataagcttcaatgccgagcaataacgctacgattgctgatgcaagtggggtcattctcaacataggcagctcctgcaattaaattttgtcactaatatagttgccgtggtcatcgataatggtcagataccagttatttgcattattacttttgacattaacactctgactttctaagggggcaatcataatagtttcataattgactttaacattattagctttgacatccgaaatcgtcacccaattagctgagtcattttttatcaccaatccattgccactgcgatttaccagtaactttttaaaggtcgctttatttaccggagcaatacccgctggccggtaaaacaacttaattctgttttgcatcgcaaacttcagtgcatttttgccttcttgctctggactatttggtggaatatccagaacattcagataaaaaatgctttctttattagtgggcagtttattcggcataattttgatttttacttgctgcccggaatttgcccctatttttgccactggtggcgttaacatgaaaggaacctgaattttttctggtggtaacgacgtatcgccatcatcaatccacgcctgcagcagcgaagaacggtttccctggttcatcaactgcaccataacttctttattttctgccgggtaaataatgcgcgtcccgtagataacaattccggcatgtgcaggaaggaccatagaaaaaatgagtaaagataataatcctttcatcttaatgcctcttaaattaaaaagccgccatggggatagcggccatgtttattacctggagaaacttacaattttatttattaatcctgcgccacacgcataaccagagaagataacacatcacctgattgcactgagttatctgtcagtttcaggtattttgctttaaacggaatagcatattgaccttccgctgttttataactctcaatgttaaaaggtgcagaaacatccaggacatcgctgttatcacctaaatagagatagtaacccacggtatcgttgctactggctatcgccttatcgttaccggttattttatcgttggtaatcaacgagagttttacaccagcaacttctttcgggcagctaatttttaacatgctgctggttacaccgactgcatcatcataggtagaatatttagctttaccttcaaagacagtggttggtacagtcggcatattaatacttactgaatcaccacccgcttcgaatttacacggagattctgcaatattccccttaatagttaatgttccggtatcaacgtctgcagcaaatactccagcgctcataaaaaaagaagaaaagacagcggcagcaataattgaacgtttcataatatgttccttaataaaatttatttttggttgttaagagtctgtatctcttggaaacaaatttctcacatcaaaaaagttgccgcaatgtaaacacattgttttattgatttaaaacaaattaaccattgcaatataaatacaaaaaatgtttaagagtattaactatttatcgcatctatcaattaatgtagatttatgtaaatggtattgttgatatcaataaaaaagccgaaatcatttatataaatgatttcggctttctaaatgcaattaaaatcaggttgccaaattaatcgtagcgatttaacacgattcgacgtttgctatcgctacctgcaacaaccacttctgtcgttacacctttgacgggcgaagaaaacagatgacgggtgtcaacattatacgttaactgaccacaatgctgttgaggttgaccattaaccatagccatactgcatgttgggggactgatcctgccattaatcgctaatgtggcagtctctgaagagaatgcgggagaagccaatccataggcaagaaaaataattcctgacagccaatacttattcattgaacgttatccctgtagtaaaggttatgcctggatagaatgagtgcataacaaactatagctgtacatccactacacagccacgaaggatgataatgaagcattgcctgtatgatcaatcgactttgtagagtttcggacgaaggtccgcagaatattcgcagtattaaataagtgttcattaatgcggcaaaaactaatacaccgcatcaatgtaacatctctgcggtgtatgaagaataaccagaatggttaataggcgttagaccgcgcggaaggaaatctcgccaggaatgacttcaccctgccagtagagctgagctgcaacgcggtcagccagctggcggtagatagcggtaaattcgctctccggacggctgataaccgttggcgtgcctttatcgagatcctcacgtaaggagatgtgtaacggcatctgccccagcagctgtgtgtggtatttttcagccagtttctcagcaccaccggtaccgaaaatcggttcatggtgaccacagttactgcaaatatgcacactcatgttctcgacaataccaagcaccggaacctcgactttctcgaacatcacaatgccttttttcgcatcgatcaacgcgatgtcctgcggggtggtgaccacgactgcaccagttactggaatgttttgcgccagcgtcaattgaatgtcaccggtgcctggcggcatatcaagcaccagatagtcgagatccggccacaaggtttcctgcaacatctgcattaacgccttgctcgccatcggtccacgccacaccatcgcattgtcgtcagtgaccagataaccaattgaattggttgccaggccatgagacataatcggtgccatgtgggtaccgtccggcgacgttggacgctgattttctgcgcccagcatggtgggaattgatgggccgtagatatcggcgtccagaatgccgactttcgccccttccgccgccagtgccagcgccaggtttaccgccgtggaggatttacccacgccgcctttaccggagctgaccgcaatgatgttcttcacaccattaatacccggctgattcttcacgcgttttaaggtggcgatattgtgcgacagtttccagtcgatagctttcgccccggtgatacgcagcagttcggcgctacattgctcttttaactcttcaaacgcgctatgccagacgaatggcataaccagttccacatgcaacgtgtcgtccatccaggcgacatggtgcaacgctttcagcgtggtgaggttatgcttcagggttgggtgctgaaaattggccagtgtcccggcgaccattgcgcgcaaggcttctggtgatttggcctgggattgttcgttcatcccgactccttttttgtatagataaaccatcagctgatagtttacctgaagaatatagagaagtacttacttaacattttcccatttggtactatctaaccccttttcactattaagaagtaatgcctactatgactcaagtcgcgaagaaaattctggtgacgtgcgcactgccgtacgctaacggctcaatccacctcggccatatgctggagcacatccaggctgatgtctgggtccgttaccagcgaatgcgcggccacgaggtcaacttcatctgcgccgacgatgcccacggtacaccgatcatgctgaaagctcagcagcttggtatcaccccggagcagatgattggcgaaatgagtcaggagcatcagactgatttcgcaggctttaacatcagctatgacaactatcactcgacgcacagcgaagagaaccgccagttgtcagaacttatctactctcgcctgaaagagaacggttttattaaaaaccgcaccatctctcagctgtacgatccggaaaaaggcatgttcctgccggaccgttttgtgaaaggcacctgcccgaaatgtaaatccccggatcaatacggcgataactgcgaagtctgcggcgcgacctacagcccgactgaattgatcgagccgaaatcggtggtttctggcgctacgccggtaatgcgtgattctgaacacttcttctttgatctgccctctttcagcgaaatgttgcaggcatggacccgcagcggtgcgttgcaggagcaggtggcaaataaaatgcaggagtggtttgaatccggcctgcaacagtgggatatctcccgcgacgcgccatactttggttttgaaattccgaacgcgccgggcaaatatttctacgtctggctggacgcaccgattggctacatgggttctttcaagaatctgtgcgacaagcgcggcgacagcgtaagcttcgatgaatactggaagaaagactccaccgccgagctgtaccacttcatcggtaaagatattgtttacttccacagcctgttctggcctgccatgctggaaggcagcaacttccgcaagccgaccaacctgtttgttcatggctatgtgacggtgaacggcgcaaagatgtccaagtctcgcggcacctttattaaagccagcacctggctgaatcattttgacgctgacagcctgcgttactactacactgcgaaactctcttcgcgcattgatgatatcgatctcaacctggaggatttcgttcagcgtgtgaatgccgatatcgtgaacaaagtggttaacctggcctctcgtaatgcgggctttatcaacaagcgttttgacggcgtgctggcaagcgaattggctgacccgcagttgtacaaaaccttcactgatgccgctgaagtgattggtgaagcgtgggaaagccgcgaatttggtaaagcagtgcgcgaaatcatggcgctggctgatctggctaaccgctatgtcgacgagcaggctccgtgggtggtggcaaaacaggaaggccgcgatgccgacctgcaggcaatttgctcaatgggcataaacctgttccgcgtgctgatgacttacctgaagccggtactgccgaaactgaccgagcgcgcagaagcattcctcaatacagaactgacctgggatggtatccagcaaccgctgctgggccacaaagtgaatccgttcaaagcgctgtataaccgcatcgatatgaagcaggttgaagcactggtggaagcgtctaaagaagaagtgaaagcagctgccgcgccagttactggcccactggcagatgatccgattcaggaaaccatcacctttgacgacttcgcaaaagttgacctgcgcgtggcgctgatcgaaaacgcagagtttgttgaaggttctgacaaactgctgcgcctgacactggatctcggcggtgaaaaacgcaatgtcttctccggtattcgttctgcctacccggatccgcaggcactgatcgggcgtcacaccattatggtggccaacctggcaccgcgtaaaatgcgctttggtatctccgaaggcatggtaatggctgctggtcctggcgggaaagatatcttcctgttaagcccggatgctggtgctaaaccaggccatcaggtgaaataatccccctttaaggcgctgcatcgacagcgccttttctttataaattcctaaagttgttttcttgcgattttgtctctctctaacccgcataaatactggtagcatctgcattcaactggataaaattacagggatgcagaatgagacactttatctatcaggacgaaaaatcacataaattctgggcagttgagcaacagggaaacgagttgcatatcagttggggaaaagttggcaccaaagggcaaagccagataaaaagtttttcagatgctgcggcagtggcaaaagcggagcttaagctgattgcggagaaggtgaagaaggggtatgtggagcaagcgaaggataattctttgcaaccttcccaaacggtaacgggctctctcaaggtagcggacttatccaccattattcaggaacaaccctctttcgtagcagaaacccgtgcgcctgacaaaaatacagatgctgttttaccgtggctggcgaaagatattgctgtcgtttttccgcccgaagttgtacacaccacgttaagtcatcgccgctttcccggagttcctgttcagcaagcagacaaattgacccaattacgtcgcttagcctgtagtgtgtcgcaacgggataataaaacagccacatttgacttcagcgcctgttctttagaatggcaaaacaccgtcgcccaggcgatcagtcagatcgacggcctgaaaacaacacagctaccatcaccagtaatggctgtactcacggcacttgaaatgaaatgcacaagatataaagtgcgtgaggatgttatggatcagatcgtccaggaaggcggtctggaatatgctactgatgtaataatacaccttcaacagattgatattaaatgggattatgcgaataatgtcattattattctgccgtctggcattgcacctgactacttggagcaatattccagatttgaattacgcctacgtaaacatttatcactggcggaagagtctctctggcaaaaatgtgcacaaaaacttattgccgcaattccacatattccagaatggcggcaaccattaattgctttgttattacccgaaaaaccagaaattgcacatgaaattgcccaacgtctactggggcaaaaaaaattaccctcgcttgagtggttaaaaatagtggcgactgatgagcacattcttgcctcattagaaaaatatcacgagccatatgccatttttgatgattactattgtggtgcgatatggtcagccaccgtattacaggagcaaggtgttgcagccctgccccgatttgctccctatgccgcaagtgactactgcgccgatgtgttgcgtcatatcaatcatccgttcgcattaacactgcttatacgtgtagccgggcatactaaacgctgtcacgatcggatgacgaaagcctgcgctgcgttcccacatgcagcaatggcggcactgacggaacttcttgggcaaaaagaagagaacagttggcgcattatgctaatgacaatgcttatctcacaaccagcactggcagaacaggtcattccctggctctcgacacccgcagttgccgtactgaaatcatgccagcaacaactgacacagccctcaaaccatgccagcgccgatctactgccagccgtagtagtctcccctccctggctttcgaaaaagaaaaaatcgccgattccggtgctggatttagcgccattaggcattgagccaatctgttatctgacagaagaaatcagtaatcaacttttggcgaaatatatctggtattcaaaacacatcacggttagccatgaagaaagtactaccaacctgttggcaaggatgggttttcaacgacggatcgctggtacatatattaaagctcccgaagcggtagttgaggcatggctaaatgaagattattcaaccttactaagtgaatttaaggtgtttcattcacctaccgggcattattggcagttggggattttgacaacattgccgctggagaaagcagtaaaagcatggaatgcccttaccctatctccacataccgataccgaatacgccatgttacattttggactcaaagggttacctgggttagtaaactcacttgcacgctatccacaagaagccttgcccatcacgaattacttcgcagcgagtgagctggctcctgccgtcgcccgtgccttcaacaaactgaaaacgctacgcgaaaacgcccgtagctggctgttgaaatacccggaacatgcccttaccggcctgctgcctgcggcgctcggcaaagccggtgaagcacaggataacgcccgcgctgccttgcgtatgcttaccgaaaacggtcatcagccattactgcaagaaatcgcccgacgttataaccagccggaagtaaccgatgcggtgaacgctctgcttgcgctcgatcccttagataatcacccgacaaaaatccccactcttccggccttttatcagccatcgctctggacgcgcccggtattaaaagcaaatgcccaatcactgccagatagcgccctcctccacctcggtgaaatgctccgcttccctcaggaagaggctctgtatccgggattattgcaggtgaaagacgtctgttccgccgactcactggcgggatttgcctgggatctgtttaccgcctggcagaccgctggcgcgccgtcgaaagagagttgggcgttcactgcgttaggcgttctcggtaacgatgacaccgcccgcaaactgacgccattaatacgcgcctggcctggtgaatcccagcataaacgcgccaccgttgggttggatattctcgctgctatcggtagtgatatcgcccttatgcagcttaacggcatcgcccagaaactgaaattcaaagcattacaggagcgggcaaaagaaaaaattgccgacattgccgagagccgcgaactcacggtggcggagcttgaagatcggttagcaccggatctcggtctggatgataacggttcgctgctgctggattttggcccacggcagttcaccgtcagctttgatgaaaccttaaaaccgtttgtgcgtgatgtttccggcagccgcctgaaagacctgcccaaaccgaacaaaagcgatgatgaaacgcgggcgaacgatgcggttaaccgctacaaattgctgaaaaaagatgcgcgtaccatcgccgcccagcaggtagcaaggctggaatccgccatgtgcctgcgccgccgctggtcgctggaaaacttccagctcttcctggttgagcatccgctggttcgtcacttaacccgccgtctgatttggggcgtttatagcgccgaaaaccagctactggcttgctttcgcgtagcagaagataacagctacagcaccgctgacgatgatcttttcaccctgccggaaggcgatatctctatcggcactcctcacgttctggaaatatcaccaacggatgctgccgcctttggtcagctttttgccgactacgaactgctaccaccgttccgccagctcgaccgtaacagctacgccctgacagaagccgagcgcaatgccagtgaactgacccgctgggcaggcagaaaatgcccgagcggtcgggtcatgggactggcgaataaaggttgggtgcgtggtgaaccgcaggatggtggctggatcggctggatgatcaaacctctgggccgctggtcgttaatcatggaaatcgatgaaggctttgcagttggtatgtcgccagccgaacttagcgccgagcaactcttaagcaagctgtggctatgggaaggcaaagcagaaagctatggctgggggagtaattcaacacaggaagcgcagttctccgtactcgatgccatcaccgccagcgagctgattaacgatattgaagccctgtttgaataaggaaagagcatggacaaggaattaccgtggctggcggataacgcccaactggaactgaaatataaaaaaggcaaaacaccactcagccatcgcaattggccgggcgaaccagtgcctgttatcactgaaagcatcattcagacactgggtgatgaattgctacaaaaagctgagaagaaaaaaaacattgtctggcgttatgagaatttttcactggagtggcagtccgccattacgcaggccatcaacttgatcggcgaacacaaaccctcaatcccggcccggacaatggcggcgctagtctgtatcgcgcaaaatgacagccaacagttgctcgacgaaatcgtccaacaagagggactggaatatgcgactgaggtggtgattgcacgccagtttattacacgatgttatgagagtgatcctctgctagtgacattgcagtatcaggacgaggattatggctatggttatcgctcagaaacctataacgaattcgatctccgactgcgtaagcatctctctctggcagaggaaagcagctggcagcgttgcgccgacaaactcattgccgcactgccaggaatacccaaaattcgccgtccttttattgcactactcctcccggaaaaacctgaaatagccaatgaactcgccagtcttgaaagctcccggtcaagtctccattcaaaggagtggttaaaggtcattgctactgataatacggcggtaaaaaaactcgaacgatgctggggcctggacgtatttagcgatcgagaagccagctacatgtcgcatgaaaaccacttcggctacgcggcctgcgccgcccttttgcgcgaacaaggactggcagccgttccgcgcctcgcgatatatgcccataaagaagattgcggcagtctgctggtacaaattaaccatccgcaagtcatccgcaccttgctgttagttgctgataaaaacaaacccagcctgcaacgtgtggctaaatacagtaaaaacttcccccatgcgacactcgccgcactggcagaactgctggcgttaaaagaaccaccagcccgcccaggttatccaatcatcgaagacaaaaagctgcctgcacagcaaaaagcacgcgatgaatactggcgtacgctgttacaaacgctgatagcatcgcagccacaactagcagaaagggtgatgccgtggttaagtactcaagccagggcagtgctgaatagttatttatcggcaccgccaaaaccggttattgatagcaccgataacagcagtctgcctgaaatgctcgtttcaccaccgtggcgtagtaagaaaaaaatgacagctccacgtcttgatttggcaccgctcgaattaactccgcaaatttactggcaaccaggcgaacaagagaggcttgccgccactgagtctgcccgttatttcagcacggaatctcttgcggaacgcatggaacaaaaaagtggacgagttgtattacaggaactgggttttggggatgatgtatggctgtttctgaattatatactccccggaaaactggatgctgcacgcaattcactcattgttcagtggcattactaccaggggcgggttgaagagatcctgaatggctggaactccccgcaagcacaattagcagaacaggcgctccgcagcggtcacatagaagcgttaattaacatatgggaaaatgacaacttctcacgttatcgtccggaaaagagtgtctggaacctgtatttattggcacagttgccgcgtgagatggctttgaccttctggctgcgtatcattgagaaaaagcatctgttcgcgggtgaggactattttctcagtatcctcggattggatgcgctaccaggtctgctgttggctttttcacatcgtccaaaagaaacatttccgttaattttaaattttggcgcaacagaactggcgctgcctgttgcccgcgtctggcgacgtttcgcggcgcagcgtgatctggctcgccagtggattttacaatggccggaacatacggctagtgcacttatccctcttgtctttaccaaacccagcgataatagcgaagccgcattacttgccctgcgtttactgtacgaacagggacatggcgaattgctacaaaccgtggcaaaccgctggcagcgtacagatgtatggtctgccctggagcagttgcttaaacagggtccaatggacatttacccggcacgcattccaaaagcccctgatttctggcatccggcaatgtggtccaggcctcgacttatcactaataatcagcctgttaccggtgacgctctggaaattatcggcgaaatgctgcgctttacccaggggggacgtttttatagcgggctggaacaactgaaaacgttctgccagccacaaacgctggcagcttttgcctgggatctcttcactgcgtggcaacaagctggtgcccccgcaaaagacaactgggcatttctggcgttaagtctctttggtgacgaaagcacggcacgggatctgacgacacagatcctcgcctggccacaagaaggcaaatctgcccgtgctgtcagcggcctgaacatccttaccctgatgaataatgatatggcgctgatacagctgcatcatatatcgcaacgggctaaatcccgccccttacgtgataacgcggcggaatttcttcaggtggtcgcagaaaatcgcgggctaagccaggaagagctagcggacagattagtcccaaccctgggccttgatgatccgcaggcgttgagttttgattttggtccccggcagtttaccgttcgcttcgatgaaaacctcaacccggttatctttgatcagcaaaacgttcgccagaaaagcgttccccggttgcgcgccgatgacgatcaactgaaagcgcccgaggcactggcccgactaaaagggctaaaaaaagatgctactcaggtgagcaaaaacctgctcccacgtcttgaagctgccctacgtaccacccgacgctggtcgctggcagattttcatactctgtttgttaatcatccctttacccgcctggttacccagcgattaatatggggcgtgtatccggcaaatgaaccgcgtcgtttactcaacgcctttcgtgtggccgcagagggggagttctgcaatgcgcaggatgagccaattgacctgcctgcggatgctctgattggcattgcccacccgttagaaatgacagcagaaatgcgcagtgaatttgcccagctttttgccgattacgaaattataccgccacttcgccagttgacacggcgcacggtgctgctcacgcctgacgagtcagccagtaatagtttgaatcgctgggaaggtaaatctgctaccgttgggcaacttatgggaatgcgatacaaaggctgggagtcaggctatgaggacgcatttgtctatgacctgggtgagtaccggctggtccttaagttttcacccggttttaaccactacaatgttgatagcaaagcgctaatgagcttccgttctcttcgagtgtacagtgacaataaatccgtcacttttgccgaacttgatgtgtttgatttgagtgaggcgttaagcgcacctgacgtcattttccattaaaacacagcgggcagtgatgcaactgcccgttatcaacacgacttaccagcggggaaagcgatgatcgtgcaaaaagagctggttgctatttacgattatgaggtccctgtacctgaagatccgttttccttcagacttgagatccataaatgctctgaattatttacaggttccgtctatcgactggagcgattccggctacgtccaacatttcatcaacgtgatcgagaagatgctgacccgctaataaatgatgcgttgatttatataagagatgagtgtattgatgagcggaaattacgaggtgaatcacctgaaactgtaatagcaatttttaatcgtgaactacagaatatattcaaccaactaatagaatattagtttattaaagggggaagcggttttcccccttagttgcgtttcaatttgcccattacttcaacaaaccaatcaaccgtaacagagacactaatagctccagtacggcaatgagcacggttaacttttgtgtcagcgtgtccatccgctctccttattaaggagcgcaacaccagcaccttacccttacactgcctgtcgatactggtttacgtttgttgagtcgccatgttgcactccggatcagagcactacctgcggcaccacccgtccggtagccaggacttgaaatgggttcgatccggcgcaacttcccaacagtcaggattataaatctcattatcttaattgcaacactgtccagaggtggttataattcgttcgttgagatgccatgttgcactatcagtaacttaacatcaaagtagtaaataaaagaacctgcctcaccagcaggtttttttattttctgcgatctactttccagatattttttgccaatagcccaccataaatattcacatcccggtcaaatggtgcgttgaatataaaatcgatgaatttataaataaaaatgagttatatgatgaattaataaaaacagtaatcattttattaaagggggaagcggttttcccccttagatgcgtttcaatttgcccgttacttcaacaaatcaatcaaccgtaacagagccactaatagctccagtacagcaatgagcacggttaacttttgtgtcagcgtgtccatccgctctccttattaaggagcgcaacaccagcaccttacccttacactgcctgtcgatactggtttacgtatgttggaccacgatgttgcactccggatcagggcaccacctgcagcaccacccgtccggtagccaggacttgaaatagattcgatccggcgcaacgtcccaacggtctggattataaatctcattatcttaattgcaacggggtccagccgtggttataattcgttcgttggaacacgatgttgcacaggctgtggtgttaggcctgaaagtagtaaataaaagaacctgcctcaccagcaggtttttttatttactgtgatctgctttccagatatttttcgctcaaacaactaatgcgccaaacatttattgcgcgtaaaatatcgtttatttcattaatacatttcagggatgaatatatgtcaccgcagaataatcatctgcagcgtccgcctgctgctgtgttatacgccgatgaactggcaaaattaaaacaaaatgataacgcaccttgcccgcccggttggcagttaagtttgcctgcggcccgtgcttttatccttggcgatagcgcgcaaaatattagccgtaaagtggtgattagtccctccgctgtcgaacgcatgttagtcactcttgccaccgggcgcggtttgatgttggtgggggaacctggcaccgcaaaatctctcctgtctgaattactggcaaccgctattagcggcgatgccgggttaaccatccagggcggcgcatctactaccgaagatcaaatcaagtacggctggaactacgccctgcttatcaaccatggtccgtcaacggaagcactggtccctgccccgctttaccagggaatgcgcgacggcaaaatcgtccgttttgaagagataacgcgtacaccgctggaagtacaagactgtctgttaggtatgctttctgacagggtgatgacggtgccggaactcaccggtgaagccagtcagctctatgcgcgggaaggctttaatattattgccactgccaatacccgcgatcgcggcgtcaatgagatgagtgccgcgctaaagcgtcgcttcgattttgaaaccgtctttccgattatggatttcgcccaggagctggaactggtcgccagtgcttcggcgcgtttgctggcccatagcggtattccgcataaagtgcctgacgcagtactggagttactggtacgcaccttccgcgatctgcgtgccaacggcgaaaagaaaacgtcaatggatacactgacagcgattatgtccaccgctgaagccgtgaacgtggcccacgccgtaggcgtccgcgcctggtttttagcgaatcgcgcgggggagcctgccgacctggtggactgtattgccggaaccatcgtcaaagataacgaagaagatcgcgctcgtctgcgccgttacttcgaacagcgtgtcgccacacataaagaagctcactggcaggcttattatcaagcccgccaccgcctgccgtgaggaaagaggcatgagcgagccgttaattgtcggcatccggcatcatagtccggcctgcgcccggctggtgaaatcgttaatcgaaagccagcggccacgatacgtgttgattgaaggcccggctgattttaatgaccgggtagacgaactttttttttcccaccagcttccggtagctatttacagttattgccagtatcaggacggtgcagcccccgggcgtggtgcctggacgccatttgctgaattttcgccggagtggcaggcgctacaagccgcacgtcgtattcaggcacaaacttacttcatcgatttgccttgctgggcgcagagtgaagaagaggacgattcgcctgatacgcaagatgaaagccaggccttactgctgcgtgccacccgcatggataacagcgataccctgtgggatcacttgttcgaagatgaaagccagcaaactgcattaccctctgcgctggcgcactattttgcccaactgcggggcgatttccccggcgatgcactcaatcgtcagcgcgaagcctttatggctcgctggattgcatgggcggtgcagcaaaataatggcgacgtgttagtcgtctgcggtggctggcacgctccggcactggcaaaaatgtggcgcgaatgcccgcaggacattaacacgccggaattgccctcgctggcagatgccattacaggttgttatctcacgccctacagtgaaaagcgccttgatgtgctggcaggatacctttccggtatgcctgccccggtctggcaaaactggtgctggcagtggggcttacagcaggccggtgaacaactgctaaaaacggttctcacccgtttgcgccagcacaacttgcctgcttcgaccgcggatatggctgccgcacatctgcatgcaatggcactggcacagttgcgcggtcatacactaccgttacgcactgactggctggatgccatagcaggctcgttgattaaagaagccctgaatgcaccgttgccgtggagctatcgcggcgttattcatcccgataccgatccgattctgctaacgttgatagacacattagcgggtgacggattcggtaaacttgccccttccacgccacaaccgcctctgccaaaagatgtcacctgcgaactggaacgtaccgcaatctctcttccggcggagcttaccttaaatcgctttacccccgatgggctggcgcaaagtcaggtgttacatcggctggcaatactggagatccctaggattgtacgccagcagggaagtacactgacacttgcaggcaacggtgaagaacactggaaattaacccgcccgcttagccagcatgcggcattgattgaggccgcatgctttggtgcaacacttcaggaagccgcacgccataaattagaagccgatatgctggacgcgggtggaatcggcagtatcaccacatgtcttagccaggcggcgttagcgggtctggcgtccttcagtcaacaattactggagcaactcacattattaatcgcccaggaaaatcaatttgccgaaatgggccaggcgctggaagtgctatatgccttatggcggctggatgaaattagcggtatgcaaggcgcgcagatattacaaacgacgttatgcgcggctatcgatcgcacgctgtggctgtgtgaatctaacggcagaccggatgaaaaggagtttcacgctcacctgcatagctggcaagcgctttgccatattctgcgcgatctacatagcggcgttaatttatccggcgtttcgctttctgcggcggtagccttactggagcgacgcagtcaggcgattcatgccccggcgctggatcgcggcgcggctcttggcgcactaatgcgtctggaacatcccaacgccagtgccgaagcggcgctgacgatgctggcgcagttatccccggcacaatccggcgaagcgctgcacggtttgctggcattagcccgtcatcaactggcctgtcaacctgcatttatcgccggtttcagcagccatttgaatcaactgagtgatgccaattttatcaatgccctgcccgatttacgcgcggcgatggcctggctaccgccacgagaacgcggaacgctggcgcatcaggtgcttgagcattatcaactggcgcaacttcccgtttcggcactgcaaatgccgttgcattgtccaccgcaagccattgcacatcatcaacaactcgaacagcaggcactggcatcgctgcaacactggggagttttccatgtctgaactgaacgatcttctgaccacccgtgagctacaacgctggcgattaattcttggcgaagcggcagaaacgacgctttgtgggctggatgacaacgcccggcagatagatcacgcgctggagtggctgtatgggcgcgatcctgaacggctccagcgtggtgaacgctctggtggattaggtggctcaaatctcaccactcctgagtggatcaacagtatccacacgctgtttccgcaacaggtgattgagcggctggaaagcgatgccgtactgcgctacggcattgaagatgtggtgacaaatctcgacgtgctggaacgtatgcagccttcggaaagcctgctacgcgccgttttgcacaccaaacatctgatgaatcccgaagtactggctgccgcccgccagatagtgcgccaggttgttgaagaaattatggcgcgactggcaaaggaagttcgtcaggctttttctggtgtccgcgatcgccgtcgccgctcattaattccactggcgcgaaactttgatttcaaaagtactctgcgcgccaacctgcaacactggcacccgcaacacggcaagttgtatatcgaatccccccgctttaacagccgcattaaacgccaaagcgaacaatggcaactggtcttactggttgatcaaagcggatcgatggtggactcggtgatccactctgcggtgatggcggcctgtttgtggcagttacccggcattcgtacccatctggtggcgtttgacacaagcgtggttgatctcacggcagacgttgccgatccggtagagttattaatgaaagtacagttgggcggcgggaccaatatcgccagtgccgtggagtatggtcggcaacttattgaacaaccagcaaaaagcgtcattatcctcgtgagcgatttttacgaagggggttcatcatcattgctgacgcatcaggtgaaaaagtgtgtccagagcggcatcaaagtgctgggactggcagcgctcgatagcaccgcaacgccttgctatgaccgcgatacggcccaggcgctggttaatgtcggcgcacaaatagccgccatgacgccgggcgagctggcatcatggcttgcggagaatcttcagtcatgaattcactacgtccggaattattagaactgacaccgcaggcactgacggcgttaagcaatgccggttttgttaagcgcagtcttaaggaactggaaaatggcaacgtcccggaaatcagccatgagaacggcgctttaatcgccaccttcagtgacggtgtccgtacccagctggcgaacagccaggcactgaaagaggctcagtgcagctgcggggccagcggcatgtgccgtcatcgcgtgatgctggtgttaagttatcaacgactttgtgccaccgtccagcccacggaaaaagaagaagagtgggatccggcaatctggctggaagaactggctaccctgcccgatgccacccgcaaacgcgcgcaggcgctggtcgctaaaggcatcaccattgagttgttctgtgcgccgggcgaaattccctctgcccgcttaccgatgagcgatgtgcgtttttattcccgtagcagtattcgtttcgcccgttgtgattgtattgaaggcacactttgcgaacatgtcgtactggctgtgcaggccttcgtcgaggccaaagcgcagcaagcagaatttaaccatttaatctggcagatgcgcagcgaacacgtcacatcatctgacgatccgtttgccagcgaagaaggccaaacgtgtcgtcaatatgttcagcaattaagccaggcattatggcttggcggcatcagccagccgcttattcactacgaggcagcattcaaccgcacattgcaggcggcagaggcctgcaactggcgctgggtgagtgaatcactacgacagctacgggcaagcgttgatgccttccacactcgcgccagccactatcatgccgtagaatgcttacgtcagcttgcggcattaaacagtcgattaaattgcgcacaagagatggcccggcgcgacagtgttggtgaagttcctcctgtgccgtggcgcacggtcgttggctctggcattgccggagaagcaaagcttgatcatctgcggctggtgtctttaggtatgcgttgctggcaggatattgagcattatggtttacgcatctggtttaccgatcccgacaccggcagtattttgcacctttcgcgcagttggccgcgaagtgaacaggaaaactcaccggcagctacgcgtcggctgtttagttttcaggctggcgcactggcgggtgggcaaattgtttcacaagcagcaaaacgcagtgccgatggcgagctgctgttagctacccgcaaccgcttaagcagcgttgtgccgctgtcgcctgatgcctggcaaatgttgagcgcgccgttacgccagccgggcattgtggctttgcgggaatatttacgccagcgtccccccgcctgcatacggcctcttaatcaggtcgataacttatttattctgccggtcgctgagtgtatttcgctcggttgggatagcagccgccagacgctggatgcgcaggtaatcagcggcgaaggtgaagataatctcctgacgttatcccttccggcatctgcctgttctccttttgccgttgaacgcatggcggcgcttttgcaacaaacagacgaccccgtgagtctggtttctggctttgtcagttttgttgatgggcaattgacactggaaccacgggtgatgatgacaaaaacccgcgcctgggcgctggacgcagaaactgcgcctgtggcaccgctaccttctgccagcgttttgcctgtgccgtctaccgctcatcagttgctgatgcgctgccaggcgttacttattcaactgctccataacggctggcgctatcaggaacagagcgctattagtcaggcagagttgctggcgaatgacctctccgcggtcggtttttatcggctggcacatgtgttgggacaatttcgtaatacagaaagcgaggcacgggtagaagcaatgaataacggtgttttactttgcgaacaattattccccatgcttcagcaacaaggatgaaatagtgctttttactaagagttctactccagttccggactgctcacgccacggtattaggcatatcctatatagcccctggtgagagtcaccagttccttgattaaataaaatggagttttacatgaaggctttcaataagctgttttccctcgttgttgcatctgttctggttttctctcttgctggctgcggtgacaaagaagaatcgaagaaattcagcgccaatctgaacggcactgaaattgccattacctatgtctacaaaggtgacaaggtgcttaagcaatcttctgaaaccaaaattcaatttgcctccattggtgcaaccaccaaagaagatgctgccaagacacttgagccgttaagcgccaaatacaaaaacatcgcgggtgttgaagaaaaattaacctataccgatacctacgcgcaggaaaacgtgactatcgatatggaaaaagtggattttaaagccctgcagggtatttcaggaatcaacgtttctgctgaagatgccaaaaaaggtatcactatggcgcaaatggaaatggtgatgaaagccgctggttttaaagaagtgaaataatcggttggcggtcatgctctaaacatgaccgccaattttttagccttttttcacatgctggcgcgctgccagtccacgcagaaaataacgtaaaaattgatcgccgcattcgcggaagtttttatgatccggtgcgcgcatcatcgctgtaatttccggcatcgaaacgcggaactgctgttcggtgaggatagccagaatgtcatcggttttcagcgaaaacgcgatgcgtaattttttcagcacgatgttgttattaatgcgacgttccggctccagtgccggagcagactcatccttgccgcgtttttcataaatcaggccattgaggaatgacgacaaaacaatgtccggacaacgctgaaaaccctcttcgtcttctttacgtagccagacggcgatctgttccgcggtggcttcgacattacccagcgccagaatacgcaccaggtcattattattggctttcaaaatgtagcgcacgctgcgcagaatatcgttacttagcatgaggccttcaggtgttgatgaggcaaaaagccattttagcagtcttttacaggccaatcgcctcttttaagcttttcagataacggcggctgaccggcacggttaagccattacgcaaaatcaactcagcctggccgttatcttccagacgaatctcctgtaaatgcgcgaggttaaccagatactgacgatggcagcgcagtagtggtgtacgactttccagggtacgtaatgtcaattcggtaaagccctctttcccttcgtggctggtaacgtagacaccgctcatccgactgctgacaaatgccacatctttcatttgcagcaaataaatccgactatgccccgtacaagggataaatttcagcgcctgttgattttccggtaacagcgaaacatcctgcttgctgcgctcctgacgcaatcgcgccagcgttttctccagtcgcgcttcatcaattggcttcagcaaataatcaaaggcatgttcttcaaaggctttaatagcgtattcgtcaaacgcagtgagaaaaacaatatacgggcgatgttccgggtcaagcatccccaccatttccagaccactgatgcgcggcatctggatatcgagaaacagcacatccgggcgcagtttatgcaccgcgccgatcccttccacggcgtttgaacactctccaacgatttcaatatcgctctgctcctgcaaaaatacacgcaggttttcccgtgctaacggttcatcatcgacaattaagactttaatcatgcctcgtccctccatggtagtcgtaacgttattcgggtgtaactatcaggctcacaggcgacgcttattccatagtcatcgccaaaccgttcacgtaaacgcttatccaccagattcatccccagcccactggcattggttaccggttgatacaaaccggcattgtcttcgatctccagcatcaaatgttgcccctcacgtcgggcgctgattgccactcgccctgtatccagcagttgtgatgtcccatgtttaatggcgttttccactatcggttgcagggtaaacgcgggcaattgctgctgggataattcttgcggaatagcaatgttgacctgcaaccgcgactggaagcgcgccttttcaatttgcagataagcgttcacatgttcaatttcgtcggcgagagtaacaaactccgaaggccgctttaagtttttgcggaaaaaagtggaaagatactgcaccagctggctggcctgttcgctgtcgcgacggatcaccgctttaatggtgttaagcgcattaaacaaaaaatgggggttcacctgggcgtgaagcagtttgatctctgactgggtgagcatcgctttttgccgctcatattgcccggcgaggatctgcgccgaaagcagttgcgcaatcccctcgcccagcgtgcggttgattgaactgaataaacggtttttggcttcatacaatttgatggtgcccatcacccgctgattttcaccacgcaacggaattaccagcgtcgaccccagtttgcattgcggatgcaaagagcaacgataaggtacttcgttgccatcagcgtagaccacttcaccggtttcaatcgcttttaaggtgtaagtcgaagaaatcggtttgccgggtaaatggtggtcgtcaccaattccggtaaaggccagcaatttctctcgatcggtaatcgcgactgcaccaatatccagctcctgatacagcacctgtgccactttcatgctgttcacttcgttaaacccctgtcgcaaaatgccttccgtcgaggctgccactttcagcgcagtggcagaaaaagccgaagtgtatttttcaaacatcgcgcgtttatcgagcaatatacgcataaacagcgccgcgccgacggtattggtgaccatcattggcgcagcaatattactcaccagacgcaccgcatcttcataaggtcgggcgatcgccaggatgatcagcatttgcaccatttcagcgacgaacgtgacggcaccggcggtaatggggttaaagactttatcagtgcgcccgcgacggatcaggatgctgtgtaccaggccgccgagcaatccttcaacgatggttgagatcatgcaacttagcgcggtcatgccccccatcgaatatcgatgtaagccgccggtcagaccaaccagcccaccgacgaccggaccgccgagtaagccgcccattaccgcgcctatcgcacgggtattggcaatagaatcgtcaatgtgcaacccaaaccaggtgcccatgatgcagaagatggaaaagacgatgtagcagagaaatttatgcggcagacgaaccgtgacctgcattaacggtatgaataatggcgttttactcattaaccacgcaatgactaaaaaaacgcacatctgctgaagcagcagcaacaccagattaaaatcgtacatacccgcaaaccacacttccctttaaaacgcgtaacatacattgcctgcgtttaactttctttgaactcttgcagaaaaatgagaattcgtgagtacgatcactcaaaatcgcctggcaaaaataaaatcaccctatagatgcacaaaaaacgggcaaaactacctggttcgcaaaactgcgtctaaagttaaactgggacctcgcgagcaagggtgagacgatggcgctttacacaattggtgaagtggcgttgctttgtgatattaaccctgtcacgttacgcgcgtggcagaggcgttacgggttgctgaaaccgcaacggacagacggcggtcatcgactgttcaacgatgccgatattgaccgtatccgcgagatcaaacgctggatcgacaacggcgtgcaggtcagcaaagttaaaatgctgctcagtaatgaaaatgttgatgtgcagaacggctggcgcgatcagcaagaaacattactgacctacctgcaaagcggcaatctgcatagcctgcgaacgtggatcaaagagcgcggtcaggattaccccgcccagacactcaccacacatctgtttattcctctgcgccgacgacttcaatgccaacaaccgactctccaggcgctgctggcgatcctcgacggcgtactgatcaactacatcgccatttgtctggcttcggcacgtaaaaaacagggtaaagatgcgctggtggttggctggaatattcaggataccacccgtctgtggctggagggctggattgccagtcaacaaggatggcgcattgatgtcctcgcccactcgctcaatcaactacgccctgaactattcgaaggccgtacattgctggtgtggtgcggtgaaaatcgaacctccgcccaacagcagcaactcaccagttggcaagaacaaggccatgatattttcccactcggcatttaatgattcgttaacaaatgcgctttactgtacaatcctttcgttaacataaggagtgcattatgcgcatagctaaaattggggtcatcgccctgttcctgtttatggcgttcggcggaattggtggcgtcatgctcgcaggttatacctttattttgcgtgctggctaagcgcctgcaccagcctttcaaacaggcggtctgcgatgatcgccgccagtgccaccagtaacgccccctggatcacatacgcggtattaaatccgctaagcccgatgatgatgggcgtacccagcgtgctggcccctaccgttgaggcgatcgtcgccgtaccaatgttgataatcaccgaagttcgcacgcccgccagaatcaccggagccgccagcggtagctcgaccttacgcagtcgctgaccacgactcattcccatacctttcgcaacttctgtcacgctggcatcgatcgctcccagcccggcaagtgtcgcctgcaggacgggcagcacaccgtaaaggatcaaggcgataatcgctggttgcagaccaaagccgatcaccggaacggcaatcgccagcactgcgacgggcggaaaagtctgtccaacggcggcaatagtttccaccagtgggcgaaattccgcgccccacgggcgagtgacagcaattccggcaccagtgccaatgatcaccgcaaacaaactcgaaattcccaccagccagaaatgagccagtgccagagctgcaaaactttcttgctgataaacgggtcgtggcagttgtgggaacaaggcagcaaacagcggctggctgtaaggcagccagaaaatcagtgccacaaacaaagcaatgagccagaacagcggatcgcgcaacatcttcatacgcttacgcctccaccagcagatcctgaaaatgcagcgtaccgcaaggctggccctgcgtgttcaccaccggcagcacctcgcaaccccgcgcgacaaacagggagagcgcatcgcgtagcgtcatctcttctaccagtgcctcaccttctgcccgttcttcgcgacgcacgtaatccgccacactacgtaacgaaagcagacgcacacccagttcgctacgtccaaaaaactggcggacaaaatcattcgccggacgagtcagcatcgtcagcggattgccctgctgcaccacttcaccgtgatccatcaataccagatgttcagccagccgtagcgcctcatcaatatcatgagtgaccagcacaatagtgcgccccagcaaacggtgaatgcgcgtcatctcttgttgcaacgcgccgcgcgttaccgggtccagtgcgccaaaaggttcatccatcagtaagacttgcggatcggcagccagtgcgcgcgccactcccacacgttgctgctgaccaccggaaagctgatgcggataacgctcacgcaaatttgactccagccccagtagcgtcattaattcgtcgatacgatcgtcaatccgtgcccgcgaccatttttgtaattgcggcacggtagcgatgttttgcgccacgctccagtgggggaacaggccaatagattgaatggcatagcccatccggcggcgcaactccagtactggcagcgagcgaatttcttctccggcaaagcggatctctccgctgtcatgttccaccaggcggttaatcattttcaaggtggtggatttgccggagccagatgtgccaatcagcaccgaaaaactcccttcctgaaaattgagattaagatcgttaacggctttttgtgcgccaaacagtttgctgacatggctaaattcaatcattacgtttcaccttcagcagtgcgataagcaaatcgaacagggcatcgatcagcaccgccagaacaattaccgggatcacccccagcaacactaaatcaatggcgctgcttagcagcccctggaaaaccagcgcaccaaaaccgcctgcgccgattaacgccgcaatcaccgccatacctacagtttgcaccatcaccacccgcaggctgcgcagaaataccggtaacgccagtggtaactgaacatgcaggaatcgctgcgccccgctcatgcccatcgctctggcgctctccagcacatcgcgcgggatctggttcaaaccgactaccacgccgcgcaccagcggcagcaaggcatagagcaccagcgcaatcagtgcgggtgtcattccggttcctgctatgccgagcttccccagccacggaaaggccgtcaccagcgcggcaagcggcgcaatcaacaggccaaagagcgccaccgaaggcacggtctgaatgacattgagcagagaaaaaattgccccctgccgcgcagtggaaaagtagcaccagatgcccaacggcacaccaatcactaacgcaggcagcaccgcaccaaacagcaacgtcagatgttgtgccagcgcgtcgtcaaacacatcctgacggttggcgtattctttcattagtgagagatcgttaagcgtgccggagtacagcaaccacagcggaataatggcaatctgcatatgcaacaaccagcgccacagcggatgcgtggagattcggcggatggcatcgctacaggccagcaatgccagcgccgcagccagccagaaaccactgccgaggctggtacgcgccagcgcactgccattttgcgccagttgggtcgccgcctttccagctccccacaccaacaatacgaagacgaattgcgccagaatgagtgcacaaatgctgccttttttagcggggacaaaacaggctgtcagccaggcgcaaccaacgcccaccagcatccagatcgtttgcggccacagttgccagagatgacgcccttcacccgagactaaacgattaggcgcgtagctgataaacggcagcgctgctgcgattgccgtcagcaacagcagcagcgccagaacaggattaatacgtagataagtcacgggaaattacttcgcccaccctttttgtttcaggtagtcggcagccacttttttggcatccagtccttccactgcaatgctggcattcagttgctgcaatgtttttgcatcgaggctggcgaagactggctgtagccactgtgccatttgcggatactccttcaacaccgattcacgcaccactggtgcaggcgcatagataggttgcacgccttgcggatcgcttaaggtttgcagccccagcgccgctaccgggccgtcagtgccgtaagccattgcagcattaacgccagaggtttgctgggcagcggctttgatcgtcaccgccgtgtcgccaccagccagtgacagcaactgatcctgaccgagcttaaagccataggctttttcaaacgcgggtaacgcatcggcgcgttcgataaactctgccgaggctgccagtttgaaggtgccgccctcttgcagataacgactcaggtcggcaagcgaagtgagtttatttttctctgccacatcctgacgcacggcgatagtccaggtgttatttgcaggcgcgggcgtcagccagattaacttgttgtgctccgaatcgagctttttgactttctcgtaaccttgctgcgcgtttttccacgctgcatcgttttcatctttaaagaagaaagcgccattgccggtatattccggatagatatccagttcaccggaagtaatcgccccgcgcaccacaggagtcgttccgagttgcactttattcaccgtcggtacgccgtggctttccagcacctgcaaaatgatattgccgagtagcgcaccttcggtatcgatttttgaaccgactttaacgggggaagccgcctgtagcggcaggctcacggctgccaacataaccagtgaacctgcccagagctttaagagtggcatgatgctttcctcattcttttactgttgttttcagcgaattaagagaaaagcatagttgataatggcggggttagcttgagcggaaggattcagttgcagaatcagataaatacttaagaggcatattcggtccggcgtttcctgccggatgcggcgcgagcgccttatccggcctacaaagggcgcaaacgtcgcgcccttactaaagcattacagcaactcaaactcgcctttcttaacgcgtgcggaatcagtgccgataaatacattgaacttgccaggctcggcgtcatatttcatctgttgattccagaacttcagcgcctcaatatcgatcgggaagctgacagtctgagtttcgcccggtttcagggtgattttctcaaagcctttcagctgtttcacagggcgactcatggaagccgtcacatcctgcaagtacatctgcactaccgtggccccctcgcgcttaccggtgttcgtcacctgcacgctggcagtcactttgccgtcacgcttcatggtcggcgcagaaagtttcacatcagagacggtgaaagtggtgtagctcagcccatagccgaacggatacaacgccccgttagcttcatcaaaataacgcgaagtgtatttgttcggcttgtcggcattatacgggcgaccggtattcagatggctgtagtacaccgggatctgcccgacagaacgcgggaaggacattggcagcttgccggacgggttgtaatcgccaaacaatacatcggcaattgcattaccgccttcagtccccgcaaaccaggtttccagaatcgcatcagcctgctgatcttctttcaccagcgccagcggacgcccgttcatcagcaccagcaccagcggtttaccggtggctttcagcgccgcaatcaagtcacgttggctttgcggaatagtgatatcggtccggctggaggcttcgtgcgccatcccctgtgcttcaccgactacagccaccaccacatcagattgtttcgccgtctgcaccgcttcatcaatcatctcttgcggcgaacgcggatcgactttgaccgcttcttcatactgattcaggaaatcgataatgcctttgtcactggtaacgttcgcccctttggcatacagcactttaccgttttcaccgacggaatttttaatcccggtcagtacggtcacggattgatcggcaacaccggctgcggaccagctgcccatcacgtcacgtttactgtccgccagtggcccaaccaccgcaatggtggccgattttttcagcggtaacgtttcgagacggtttttcagcaacaccaggctttcgcgcgccacttcacgcgcttctttacggtgcaggcggctttcggcattggtatccaccgggtcagactctttcggccccaaatggctgtatgggtcgttaaacaatcccatatcatatttaacgttcagtacatggcgggcagcatcgtccagctcttccatcgtcactttgccggatttgatcaacccaggcagatacttcgagtaatactcgtcgctcatactcatgttgattccggatttcagcgccacgcgcaccgcatcttccgggtctgccgccgtgccatgtttaatcagctctttgattgcaccgtgatcggaaacggtgatgcctttaaagccccactggtcgcgcagaacatctttcagcagccaggaatcggaggtggctggcgtgccgttcagcgagttcagcgccaccatcaccgcgccgctgcctgcgtccagccccgctttgtacggcggcatataatcattaaacaggcgctgcggactcatatcgacggtgttgtactctttaccgccttctaccgcgccgtatgcggcaaagtgtttgacgctggtcatcaccgagtagcgatctgccgggcttttaccctgcatcgcttccaccatggttttacccattgttgaggtgagatacgtatcttcgccaaaaccttcggaagcacgtccccagcgcggatcgcgcgagacatcgaccatcggtgcccaggtcatattcaggccatcatctgccgcttcataagcagagacacgtccgaccgttttcactgcatcgaggttaaaagacgaggccagaccgaggctaatcgggaacaccgtgcgctgaccgtgcagcacgtcgtaagcaaagaaaagaggaattttcaggcggcttaattccatcacctgatcctgcatggcgcggatatcctgacgggttacggtgttgaaaatcgccccaacctgaccgtctttgatcatctcgcggatcgcctctttcgggttatccgggccgacgctgattaagcgcagctgaccaattttctcatcaactgtcattttcttaagcagttcggtgacgaacgcatcccgcgcttcgggcgttaatggatggttgccgaataaatcatccgccagtgctggctgcagggccagactcaccgcgattcctactgaacatagccatttcatatggatttttcttcctctgttgcccgacgaggcagcgaaaatggtgcaaaaaccgtagtttgccataagcatgatggagagagaaaaagaatgctcagtttattgtctgaattttcaaaatattcactcgctgaattgtcatacaaggcgctattctagtttgtgatattttttcgccaccacaaggagtggaaaatgtcttccatgacaacaactgataataaagcctttttgaatgaacttgcccgtctggtcggtcattcacacctgctcaccgatcccgcaaaaacggcccgctatcgcaagggcttccgttctggtcagggcgacgcgctggctgtcgttttccctggctcactactggaattgtggcgggtgctgaaagcctgcgtcaccgccgacaaaattattctgatgcaggctgccaatacaggcctgaccgaaggatcgacgccaaacggtaacgactatgatcgcgatatcgtgatcatcagcaccctgcgtctcgacaagctgcacgttcttggcaagggcgaacaggtgctggcctatccgggcaccacgctctattcgctggaaaaagccctcaaaccgctgggacgcgaaccgcactcggtgattggatcgtcgtgtataggcgcatcggttatcggcggtatttgtaacaactccggcggctcgctggtgcaacgtggcccggcgtataccgaaatgtcgttattcgcgcgtataaatgaagacggcaaactgacgctggtgaaccatctggggattgatctgggcgaaacgccggagcagatccttagcaagctggatgatgatcgcatcaaagatgacgatgtgcgtcacgatggtcgtcacgcccacgattatgactatgtccaccgcgttcgtgatattgaagccgacacgcccgcacgttataacgccgatccggatcggttatttgaatcttctggttgcgccgggaagctggccgtctttgcggtacgtctagataccttcgaagcggaaaaaaatcagcaggtgttttatatcggcaccaaccagccggaagtgctgaccgaaatccgccgtcatattctggctaacttcgaaaatctgccggttgccggggaatatatgcaccgggatatctacgatattgcggaaaaatacggcaaagacaccttcctgatgattgataagttaggcaccgacaagatgccgttcttctttaatctcaagggacgcaccgatgcgatgctggagaaagtgaaattcttccgtccgcattttactgaccgtgcgatgcaaaaattcggtcacctgttccccagccatttaccgccgcgcatgaaaaactggcgcgataaatacgagcatcatctgctgttaaaaatggcgggcgatggcgtgggcgaagccaaatcgtggttggtggattatttcaaacaggccgaaggcgatttctttgtctgtacgccggaggaaggcagcaaagcgtttttacaccgtttcgccgctgcgggcgcagcaattcgttatcaggcggtgcattccgatgaagtcgaagacattctggcgttggatatcgctctgcggcgtaacgacaccgagtggtatgagcatttaccgccggagatcgacagccagctggtgcacaagctctattacggccattttatgtgctatgtcttccatcaggattacatagtgaaaaaaggcgtggatgtgcatgcgttaaaagaacagatgctggaactgctacagcagcgcggcgcgcaataccctgccgagcataacgtcggtcatttgtataaagcaccggagacgttgcagaagttctatcgcgagaacgatccgaccaacagcatgaatccggggatcggtaaaaccagtaaacggaaaaactggcaggaagtggagtaaaaattacggatggcagagtatcgccatccgaattcacttaatcgttctgtgccgtctgccccgccgccgccatttgggcggctttttgttttttatagctcaacgctgctgccggcacaggcatcactttaccggtttcaatccaggtacgcaggcggctggcatcggcaaaatgggtatatttgccaaacgcgtccatcactaccagcgccaccggtttattattgataaccgtacgcatcaccagacaatggcccgccgcattggtaaagccggttttggttaactgaatattccagttatcgcgatacaccagatgattagtattgcggaacggcagcgtatacgtcgggttagagaaggttgccatatcttcccgggtagtacttaactgcccgatcaacggatattgtttgctggcaatgagcagtttggttaagtcacgggcagttgaaacgttatgcaccgacaatccggtaggttcaacaaagcgcgtgttgttcattccgagcgatttcgctttcgcattcattgccttaataaaggctttgtaaccaccgggataatggtgtgcaaggcttgccgccgcgcggttttctgaagacatcagcgccagcaacagcatatctttacggctgatttcgctattcagtcgtacgcgcgaatagccccctttcatctccggcgtctggctgatatccacttttagtttttcatccagcggcagtcgtgcatccagcacaaccatcgcggtcattaatttgctgatagacgcaatcggacgcaccagatccgggtggttcgaatagatcactttgttggtattcagatcaacaatcatcgcgctaccggaggcaatttccggttgtgaagcggtggtagcggctgccgttttcgcaacggcctgcggtgcaaaaggcacagccagcatcagggccaggctaaataaagaaactcgaaatttcggcatgatgagcattcagatagtggttcacgcgcacgggttgcgcaccgccggagtaaggatttactgaggctagcgacgccatcataacgagcaaaaagtgcgatcgtcaaaggagaatcgtgaggaaatgctgcattgctgacatttacgccagcaatgcaacgtcaaagaactttctagaacaaacgataaccgtagccccatagtataacggttagggcgagcagcacttccagtaccagcacgccaatcgccagcgtcgaactagagaagctaaggccttcctctttgttgatattcaggaagctcggaataccaaggtaaagcaggtagccggtgtaaaacagcgccaccgtgccgaccagcgcacacaaccagaccagtggataaagcgccaccagaccgcttaaaaacagcggagttgcaacgtagcccgcgaagaccatgcagtgcgcaagtgacggacgctgcggataattacgcgccatccaccagatgacccgccccatcaccgcgaccccagccagcataacgccgtaaaacaagacagccagcgccagtccggtaaaccaggataacttcaggatagtgccatcgccaaaattccagccaatctgtgtagtgccaatgaaggcgcaaatcaccggaatcgccgccatcagcaaaacgtggtgggtgtaatggtgagaaatcgtttcgttttcgcgattaatcacctgcatttcacgatcgggatgggaaaacagtccccagacatggctcataccgcccccttgttgtgagttcatgaacctgacagttcaagtataagtcagcttgtgattattttttgttcgcccatgtaatttgcaccgtctgatgtacgtcctttttcagcgtgaatgatttccagggtgtatgcttacaggcaaccaaagggagacagactggcctatggatctcaatacactcatctcacaatatggttatgccgcgctggtgatcggtagcctggcggaaggtgaaaccgtgactttgctgggaggcgttgcggcgcatcaggggctattaaagttcccgctggtggtactttctgtggcgcttggcggcatgattggcgaccaggtgctttatctgtgcgggcggcggtttggcggcaagctgttacgccgtttctcgaaacatcaggataaaattgagcgggcgcagaaacttatccaacgccatccgtatctgtttgtcattggtacgcgctttatgtatggctttcgggtgattggcccgacgctgattggtgccagccagctgccgccgaaaatctttctgccgcttaatattctcggcgcatttgcctgggcgttgatttttaccactatcggttacgctggtggtcaggtgattgcgccgtggttgcacaatctcgatcagcatttgaagcactgggtctggttgattctggtcgtggttctggtggtaggcgtgcgctggtggctgaaacgacgcgggaagaaaaagccggataatcaggcgtaaaaccattgccctggataaggcgttcgcgccgcatccgacatccggtgcaccatgcctgatgcggcgcttgtgcgtcttatcatgcctaccaaaattttacccattgaaatatccacacacctcactgcgctattctgggttgaactgcggattcgccaacataaagccgccatccactatcaacgactgcccggtggtgtaatttgcgccctccgaacaaagccacgccaccaggctggcaatctcatacgttgcgccaaaacgccgcagaggaatcgaaggctccgcgtcgggcttcacgtcgctatcatccatgccgttcattggcgtagcgatcgccccaggtgcgactgcgttcaccaaaatcttatgcctgaccaactccagcgccattgctttggttaacccgccgagcgcatgtttagcggctgtgtaggcgctggcatccggcagcggcgtatgttcatgtaccgacgtaatgttgatgatgcgaccaccctgcccttgtttcaccatctggcgggccgcaatttgtgagcataaaaatgcaccatcgacatcaacggtaaaaatcttgcgccactcatcgaaagccatatcaagaaacggcgctttggtcattgcgcccgcattattcaccagcacatcaatacgccccagccgttgaatgagtttctccagcgcctgtgcaccttctggcagtttaccgagatccagctgcacaatctccgcacgtacgccgtggctaactacctcacgcgcggtatcttttgccccttcttcatctgagtgccaggtaatgccaatatcaaacccctgctgcgccagtaataacgcgcactctttgccgatccccgaatcggaggcggtaataatcgcaacctgtgccatcgagttctccacttaacgctgaataaacgttaagtatagaaggcgcatatcatcagcgtttgtaacccccgcccaacgcaccagtgagttgaatggaagcatccagccactgcccttgcaataacaggccattggcccgctcacgcagcgcggggattctggcttcgctgacgcgggaaccagcaatgatgcccgcgttaaagcgcgcctgcgcaagacctaccacacgcaaggcatcgcgctcaatttgcgcctgatgctggtttttctccgcaagtgtctgaacctgactggctgcccgcgccacgtcattcaccgcttcaaccaccgctttgttgtagctggcgatagacaagttgctttcggcttttgcgatatcgagattggcgttaagacgaccactatcgaaaatgggtagcgtcaggcctgccgtaacgcccatttgctgcgcggaatgacggaacagatcgcttaagtgcaacgcatcctgttgcaggaaggccatcaggttgatgtcaggataaaatgccgcttttgccgcatcaatggtgcttagcgatgactcaacgtaccagtgcgccgcctgcaaatctgcccgccgggccagtaaggagtaccccagttcatcaggaagctggcttgccactttcggcaacgcgaccggtttaagcttcaatgactttgtctggttatttgtaagtgcgcttaaccgtgcctcaataattttcattttccccgcgacatcgttgagctgctgccgggttttgctggcattaatatcggtttccacaccttcaactgaagaagtaatcccgttctgatatagctggcgatcggtcgcgataatggtgttctgctctttttctatttgctgcaagaccgtgtttaacgccgcctgggtttgccactcccagtacaggcgggctacgctgccagccagcaattggcgggtttgctcgcgttccgccgcccgtgctttaaccgtacccaggcgggcagtaacctccgcccgattctttccccagatatcgagatgccagcccgccgttaagccaaaagttccgttggtgtaccacggaccggtcgtacctgcggccggatcgttcagagcaaacggccccattaagccttctgccgacattttttgccgctccatatccgcagaaaagtcgatctgcggaccatcctgagtagcaattgccttcgcctgggcttcagctagctgaatgcgctgttcagccacctgcatatccggtgcgttctgtagtgcattgttaattaaggacgtgagttgattatcgtgatactccagccaccattggctgtctggccaaccatttttcagcgccgtgggtaatgcggtgtcaacttgtgcagcgggcgtttgctggcttaacgcctggcgggtttcatgcataggcgcacacccggccagcatcagtaacagcggaaaacaggcgatggcgggataaaaggaatcacgattcatgggggaataatcaggtaagaaaaggtgcgcggagattaccgtgtgttgcgatatattttttagtttcgcgtggcaatacatcagtagcaataaaacgacatatccagaaaaatatacactaagtgaatgatatcttccgatttatcttaatcgtttatggataacggcaaagggcttcgttttttcctatacttattcagcactcacaaataaaggaacgccaatgaaaattatactctgggctgtattgattattttcctgattgggctactggtggtgactggcgtatttaagatgatattttaaaattaattaatgtcatcatgtccgaaaataacgagaatatttcagtctctcatcctgttgcgctcctgtcatgtgcattgcttcatataatcactggcgcaaggagcgcgcagggggcggccaatcgccgccgccccctgcacccccgggctctggcgaacaaaatcgccgctgcgcggtgccctcggcttatcccttacggctaccgggtcgggcgcgaggtaacatccctgtaaaacgcgccctcagcccacatccatgtgggctgccccggccttcagggaacgcctcggcaattttgacgccaccaaacaaccgtgcggcctattgataaagagctaacacattgtcaaaaaacatcactatggttttttagagtttctcgatatcaattgcctgaatagcccttgcaatatcaggggaattattcaacacccgaacatgctgaaataatcccgttgcttcatcgtattctttacgcaaataactcaaccactgtttaatccgcgcaacgtgatataacccggtatcgccctgcttttccagacgggtatatttttgcagcaaagcaaccacctccggccacggcattcgcggttcgttatattttactacccggctcaggttgggaatattgagcgccccgcgaccaatcatcactgcgtcgcagccgctgatcgccatgcattgttgcgcactctgccagtcccagatttcaccgttggcaatcaccggaatattcagccgctggcgaatctcgccaatcgcctgccagtcaatatgctccgcgcggtaaccctgctcttttgtccgcccatgcaccaccagctccgtagcgccagcctgttgaaccgcatcggcgatttcaaatttcttctcaccgctgtcccagcccagacgcacttttacgctgacgggcaaatgcgctggtacagcttcacgcatcgcttttgcaccctggtagatgagttcaggatctttgagtaacgtcgccccgccgccgctgccgttaaccgttttcgacgggcagccgcaattgagatccacgccccaggaacctaattccaccgcacgggcggcgttctctgccagccattgtgggaactgacctaacaactgaacgcgcaccagcgtaccggatggtgtccggctggcgttttgtagctcagggcaaatgcgatgaaagacttttaccggcagcagttgatccaccacgcggacaaactcggtgatgcacagatcgtagtcgttaacttcggtcagcaattcacgcaccagagagtcaagcacaccctccatcggcgccagtaacacacgcatatcatcacccgcaaaaaaatgaggcgctatgttagcgcctccggtcagcggattaaagtactcagcgtggttgcagacagttatcttctttccagccgtacagccactccatgccgcggtaaaactctgcctgcgatttacctttccacagcaggtttcgtacctggcgctctactcctgcggcgtgatacacccgtcccatctcacgggtcgaccagacgatgcgcgcggtgcgcggaatacgtaccgactcatacagtgcaaaggcttgcgccgcatccccttcacactgcgccagcgccttgccgagcgtcaccgcatcttccagcgccatacaggcaccctgcgccatatattgcgccaccggatgcgccgcatcgcccacaagcgttatgcgcttcgttccccacttcgccaccggttcgcggtcggcggttgaccagcgtcgccatgaagtcggtttatccaacatctggcgcggacgggggtggatcccctcaaagtaagagagcacttcctctttactgccatccttcacgccccactcttcctgctggcggctgtggaatgtcaccaccaggttatactgcttgccgccgcgcaaagggtaatgcaccaggtgacagtgcggccccgcccacagcacaggtgcgttgatgcgtaaatcttccggcatatcggcacaatcgataaccgcgcggtagaccacatgtccggtgacgcgcggcgcatcgcctaataagctctggcgcaccactgacttcacgccatcacagccaatcagaatatcgccgctccagctattaccgcgatcgtcgaaaacggtgacatcgtcttccgtctcacgaatatccacgacgttggtggaggtgtgatactccacgtccggatgcgtcagtaccgcttcccacaccgaggcgtgaatatcaacccggtggatcaccgcgtaagggccgccgaaatggtcacgaaaggcctgaccggtttcaatgcgcaccacttcttcggcgtttactgcatccatcatggtgatgtgatcggtaaacaccgcgcgctggcgggcaatgtcgccgacgccaagactatccaacgccgagaacgcgtttggccccaactggatgcccgcgccaatctcaccaatctcatgcgccttttccagcagcaccactttgatccccaggcgagccagtgacaacgcagttgccgcaccgccgatcccgcctcccacaattactgcgcgtgtcactttagtcattatggttctcctggtcaggctgaaattttatcttgttgattttctggcgctgcggcaatgaacgctggcagctgcgtgcaggcgtcgtacaccgctttgcagcgcggatacccactcagatcgcagttcatgcgtagcgcgttcgcccactgcgggacaaggcagcaatctgccagcgtcggcgtctcgcccacgcaaaattgccccgactggctctggcgcaacagctgttccaccgcgcttaacccttgctggatccagtgcgcataccagcgttttttatcttcttcactgacgttcagctcttcggtcaggtagcgcagcacgcgcaggttattcagtggatgaatatcacaggcgatggcatagacaatttccagcaccttgttgcgggccggctcttcctgcggcaccagcggaacttgggggtagtgacgatccatccagtcaataatcgccagcgattgtccaagtgattcgccctcgtcagtcagcagcgtcggcaccagcccgaccggattcatccgccggtaggccagttcattttgctgaccaatgcggatattcaccccttcggtctggtaatcaatgcctttcagcgccagcgcaatgcgtacccggtacgatgctgaactattaaaaaaactgtacagcttcatcatgcacctcagacaattttcaccgcgataggcgttaagccctcgacgttgccggtgatcacatcacctttcactaccgggccaaccccttccggcgtaccggtgaagatcagatcgcccggttgcagttcaaaaaagccggacaggtagctgatggtttcattcactgaccagatgagatggcgaatatcgctgcgctgatgatcttcgccgttaacctgtaaccagattggcgcgttatcaataccgccggtttcgctggctttgtgcagcggcgcgatgggggccgagagatcaaacgctttgccgatttcccacgggcggcccatctggcgcatttccatttgacggtcacgacgagtcatatcaagacccgtggcataaccccaaacatattcatgggcgttttccagcgggatatcactgccctttttaccaatcgccaccaccagttcaatttcgtaatggtagttatcggtctgcgccggatacggcagcgccagcgtttcgccagcggcaaccggaacaacggcatccgccggtttgcagaagaagaatggcggttcacgatccggatcaaagcccatttcgcgggcgtgggcggcatagttacgtccgacgcagtacacgcggcgcacggggaattgttcatcactgccaacaaccggtacggtaacgggcgcttgtggttcgaatacgtattgagtcattttttctctcccaaattaataacgcgcttcgcggaacagtcccagggcttcttgtaccggtctgtccgaaaaactgaataacacggtatcttgcgtggtctggaacgacacgccgtgccaggtcggcaccacgaagatatcttttgcactaaagctgaaggtttcattgccaatagtgacctgcccgccaccttccaccacgtgatagatggtgctgtcagtggtacgcgccacgcgggaggcgaaccctttcggcagccgttgcaggaaagcgcccatcgacggcatcggatagccaccggtgaccgggttgacgtagcgcattttgtagccatcccactcatcggcatcgcccaggcgggttaaatcgtgcagcacttcgcggctgcggtcataacggtagttaaagatgggtgaggagttcccggtctgatggcgcagcggcaacatattggcagcgtaacgcggcagataatcgccctctttacgcgttaccggttgttgctcttccgggtaatcttcggcaaaaccgcagcccagagtattcactaatggcagatccagcccatcgagccagataactggttcgtcgccagggttaccgtgatcgtgccagcgccactgcggagtgaggataaaatcgccctcattcattggcgtgcgttcgccgtcaacggcggtaaatgcccctttgccttcaacaataaaacgcagcgccgactggttatggcgatgactcggtgccacttcgcccggcatgatcagttgcaaaccggcatataaagtcgcggtgatggaagactgcccgcgcagcgccgggttttccagcaccagcacgcggcgcaccgcctctttcgcgccaatcaggctgccgctctccagcagcagcgggcggatctcctgataattccagtacgctggcgcacagttagcgttgggcgttttcggcaccagatggtgtagtgactcccacagcggggtcaggttttgcccggaaatgtgctgataaaattgttcgcggctattttgattgttatcagtcattaggatgctccttattcgttcacaacgcccgcgcgaggcagtgagtcagggacagaggtcgactggcgaaccacggtaatcagcaaggctaacatcaccgcactgatcgccgcgggcacagcgataatgaaaaacagggtgtcgaaagagaaattcatcgccatcatcacgccgccagaaagcgagccaacaatcgcaccgcagcgacccacggcgtttgaccagctcacgcccgtggcgcgactttgtgttggataaagtgtggcggtcagcgcattcagccccacctgcgatccgctaataccaatgccggtgccgaaaatcgccagcgccatcagccataatccgtcctggcttaagccaatcatcacgatgcatacagcgcctatggcatagctcagcgccagtacgcggaaaggattgaacttatccatcagcacacccagcgccagcgcgcctaacgtaccaccaatctggaacgcggcggtgacccaggacgcgtgttgcaggtcgatgccgcgatggttcaatagcgtcggcatccagcttgagagcaggtaaataatcagcaggctcataaagaacactacccacagcatcaacgtgatgggtaactgacgtcccataaacagttgacgaatgctgccttttgtaacggaggctgattcaatgagataaaagtgggtatcgacataacgctcgcgggtgatggcgctgacggttttcgcaatcaccgcctgcggtagctggcggcgcacctgccagcgtggcgattccggcagaactaccagcagtgcgacaaacagcatcagcggtaacacgccccccaacaccagaatgccgtgccagccaatcaccggcaccagctgcgcgctaacaatcccgccaaacgccgaacccagcgtaaagccgcaaaacatcagcgtcaccagcgcgccgcggcggcgggcaggcagatattccgaggttatggtgatggtgtttggcatcgcgccacccagcccaaggccggttaggaaacgcaggaataccagcgtttgcagatccggtgagaaagccgaggcaaggcttaacgcgccaaacaaaaagacgcacagctcaatcacccgtttgcgaccaaagcgatcggacaacgggccacaaagcagtgcgcctgcggttaaccccagcagacccgcgccgaatagcggggcgagatcgcctgcggtgagttgccagtgagtgcgaatatcaggggcgataaagccgatagccgcggtgtcaaaaccatcgagcattaccaccagaaaacagcagatgataacgcgccactgcatcttgccgaccggagcagcatcgatcagtgcttgtaaatcacgtcgttgagtcatagtaaatgcctcagtgcaggtaaggtagatgtttcttttgttttatgtatgttgcgatattgtgattaaagagatgaaatgtacaatggcatttcgagcagagagataacctggaggttatggcaaatggcaaactgggcgcagaaacttaagcttcatcacctgcaaatgctggtggcgctgggtgaacagggtaatctgacccatgttgcacggatgatgcatatcacccaacccgcgctttcgaaatggttgtcacatctggaagatgagatcggactcacactttttgagcggcacagcaaaggacttcgtcctactgaaggcggcaaattgttattgcaacatgcccaacggttaatcaatgacatggagcgctcgcaacatgaactggcccgttttaaacaaggtggactggtcggcagtctgaaaattggctgttctcccgtcgccactgactgcgtatcccaggcgattttgcatttgctcaaggagatgccaactctacacctgaatatcgaagagaaggtgatgaccccattgctgcaagatctgttggcaggttctgtcgatgtggtggttgggcgaattggcggtcgcgcgttgcagctgccgctgaattatcgcgtgctctacaccgagccggtgtgttttgtcgcccgtcctgagcatccactggcgaaatacgccatcctcagctggaatgatcttgctaactggcggtggatagtctggccgacaggtacccccatccgcatcagcattgataatgcgctggtagaccacggcgtgatgctgccagaaaacacgattgagtcggcgtcgatgaacgtcagtaccaacctgttacaaagcagcgatatgatctctattttgtcattacgcctggcgcaacgttatgccagccagggacaactggtgatcctcaacctgccaaagatagaacagaaaggcagcgtcggtgtgttctggcgcaataacgaaacgccttcttatgctttaagtcagtttctgcactttttacagcagaattagtgtgctgaactgggcgatcgcccgaggttacttccctaaaattcaactatgctgagaattcttaatgtgatcggtagcacgttttacgaattaattgtatgatgaatccatctcatctggggtgttgattatgagtaagacactgaacattatctggcaatatttacgcgctttcgtcctgatttatgcctgcctgtatgcaggcattttcattgcttccctgctaccggtaaccattccgggcagcatcatcgggatgctgatcctgtttgtcctgctggccttgcaaattcttccggcaaaatgggtcaatccggggtgctacgtactgattcgctatatggcgctattgtttgtgccgattggcgtaggcgtcatgcaatattttgatttgctccgcgcacagtttggcccggtagtggtttcctgtgcaatcagtacgctggtggtttttctggtggtgagctggagttcacaactggtacacggtgaacgtaaagtcgtaggtcagaaaggatcagaagaatgatggcgaatatctggtggtcattaccgctgacgttgattgtcttttttgccgcccgcaaactggcggcacggtataagtttcccctgcttaacccgttgctggtagcaatggtggtgatcattccttttttaatgctgaccggcatctcttacgacagctactttaaaggtagcgaagtgctaaacgatctgctgcaaccggcggtcgtcgcgctggcctatcctttatatgagcagctacaccagatccgcgcgcgctggaaatcgatcatcaccatctgttttatcggcagcgtggttgcgatggtgacggggacttccgtggcattgttgatgggcgcttcaccggaaatcgccgcgtcaatcctgccgaaatcagtcaccacgcctattgcaatggcggttggcggcagtattggcggtattccggcaatcagcgcagtttgcgtgattttcgtcggcatcctcggcgcggtatttggccatacattgcttaatgcgatgcgtattcgtaccaaagctgcgcgcggtctggcaatggggactgcctcgcacgccctcggtacggcgcgctgcgccgagctggattatcaggaaggtgcatttagttcgctagcgctggtgttatgcgggataattacttcgctgatcgcaccgttccttttcccgattattctggcagtaatgggctaaaatttgcgatgcgtcgcgcatttttgatgtaagtttcacgcgttgcataattaatgagattcagatcacatataaagccttaacgggttcgtaaactgttatcccattacatgattatgaggcaacgccatgcatccacgttttcaaaccgcttttgcccaacttgcggataacttgcaatctgcactggaacctattctggcagacaagtacttccccgctttgttgaccggggagcaagtctcatcgctgaagagcgcaacggggctggacgaagacgcgctggcattcgcactacttccgctggcggcggcctgtgcgcgtacgccattgtcgaattttaatgttggcgcaattgcgcgcggtgtgagcggaacctggtatttcggtgccaatatggaatttattggtgcgacaatgcagcaaaccgttcatgccgaacaaagcgcgatcagccacgcctggttgagtggtgaaaaagcgcttgcagccatcaccgttaactacacgccttgtggtcactgccgtcagtttatgaatgaactgaacagcggtctggatctgcgtattcatctgccgggccgcgaggcacacgcgctgcgtgactatctgccggatgcctttgggccgaaagatctggagattaaaacgctgctgatggacgagcaggatcacggctatgcgctgactggtgatgcgctttctcaggcggcgattgcagcggcaaaccgttcgcacatgccttacagtaagtcgccaagcggtgtcgcgctggaatgtaaagacggtcgtattttcagcggcagctacgctgaaaacgccgcattcaacccgactctgccaccgttgcagggagcgttaattctattgaatctcaagggttatgattacccggatatccagcgcgcggttctggcagaaaacgccgatgcgccgttgattcagtgggatgccacctccgcaacgctgaaagctctcggctgtcacagtatcgaccgagtgcttctcgcttaagcctggtgccggatgcggcgtgaacgccttgtccggcttgccagccctctcctggtgtcgaaattcccggcaaacagtttgccgtttcttgcgcaaaaccagcgggtaaagtagcctgatggaaattttccttagatcgagtctcctgcatgttaaagcgcgtgttcctcagcctgttagtcctgatcggcttgctgctgttgactgtgctcggcctcgatcgctggatgagctggaaaaccgcgccttatatctacgacgaattgcaggatctcccctaccgccaggtcggtgtggtgctcggaacagcaaaatattatcgtactggcgtaattaatcagtattatcgctaccgcattcaaggagcgattaatgcctataacagcggtaaggtaaattatctattactgagcggcgataacgcattgcaaagttataatgagccgatgaccatgcgcaaagatttaatcgctgctggtgtcgacccatcagatattgttctcgattacgcaggctttcgtacgctggattccatcgtgcgtacacgcaaagttttcgatactaatgatttcattattatcacccaacgtttccactgtgagcgggcattatttattgcgctgcatatggggattcaggctcagtgttatgccgtaccgtcaccgaaagatatgctgtcagtacgtattcgcgaatttgccgcccgtttcggtgcgctggctgacctttatatttttaaacgtgaaccgcgttttttagggccgctggtccctattccggctatgcaccaggtgccggaagatgcgcaggggtatcccgccgtcacacccgaacagttacttgaattacaaaagaaacaaggaaagtagttatggatgtacagcagttttttgtcgttgccgtttttttccttattccgatattttgtttccgcgaagcatggaaaggctggcgcgcaggcgcgattgataaacgggttaaaaatgcaccggaaccggtgtatgtctggcgagcaaaaaatcccggactctttttcgcttatatggtggcatatatcggcttcggaattttatctatcggcatgattgtttatcttattttctatcgttaatattttctcttttctgttaattattgagaataattattacttcactcaataagctgcggatataacattctgaaccgcagctatttgtgaatcctttcacagtataaatttccccacgcgcatagccttaatatcagcacgcaatatttatactctaaataattcgagttgcaggaaggcgacaagtgagtgagtccccaggagcttacataagtaagtgactggggtgagcgaacgcagacgcagcacatgcaacttgaagtatgacgagtatatttagcgttcgccttaattactcatagcattaaggaagatcacatgccgcaacaaaattatctggatgaactcactccggcttttacgcctttactggcgattaaagaagcctctcgctgtttattatgtcatgacgctccctgtagtcaggcttgcccggcacagaccgatccggggaaatttattcgctcaatctactttcgtaattttaaaggcgctgccgagacaattcgcgaaaataatgccctcggtgccgtttgtgccagagtgtgcccgacggagaaattatgtcaaagcggttgtacccgtgccggtgttgatactcccattgatatcggtcgcttacagcgttttgttactgattttgaacaacaaactgggatggaaatttatcagcccggtactaaaacgctcggcaaagtcgcgattattggcgcaggtcctgccggattgcaggccagtgtaacactgacaaaccagggttatgacgtcacgatttatgagaaagaagcgcaccccggtagctggttgcgtaacggtattccgcaattccggttaccgcaatcagtgctggatgcagagatcgcccgtattgaaaaaatgggcgtgaccattaagtgcaacaacgaagtcggtaacacactcacccttgagcagctgaaagcagaaaaccgcgcggtactggtcaccgtggggttatcaagcggttccgggctaccgctgtttgagcatagtgacgttgagattgccgtcgacttcctgcaacgtgtacgacaggcgcaaggcgatatcagcattccacaaagcgcattaattatcggcggcggtgatgtcgcgatggacgtagccagcacgctgaaagttctcggctgtcaggcggtaacctgcgtagcgcgtgaagagttagatgagtttccggcaagcgaaaaagagtttgccagcgcccgggagctgggcgtttcgatcatcgatggattcacgccagtagccgtggaaggcaataaagtcacgtttaagcatgtacggttaccgggcgaactgacgatggcggcagataaaattattctcgccgtcggtcagcatgccagactggatgcctttgcggagttagagccgcagcgtaacaccatcaaaacacaaaattatcagacccgcgatccgcaagtctttgctgctggcgatattgttgagggtgacaaaaccgtggtctatgccgtgaaaaccgggaaagaagccgccgaggcgattcatcactatttagagggagcttgctcatgttaacgaaagatctttcgattactttttgcggcgtgaagtttcccaacccgttctgcctctcttcttcgcctgtaggcaactgctatgagatgtgtgccaaagcctacgacacaggttggggcggcgtggtgtttaaaacgatcggcttttttatcgccaacgaagtctcgccgcgttttgatcatctggtgaaagaagataccggttttatcggcttcaaaaatatggagcagattgctgaacatccgttggaagagaatctggccgccctgcgtcagctgaaggaagattacccggacaaagtattgatcgcttcgatcatgggggaaaatgagcagcaatgggaggagctggcgcgcctggtgcaagaagctggcgcggatatgatcgagtgtaacttctcctgtccgcaaatgacttctcatgcgatgggtagcgatgtcgggcaaagcccggagctggtagaaaaatattgtcgggcagtgaaacggggttccacgctgccaatgctggcgaagatgacgccgaatatcggtgatatgtgcgaagtggcgctggcggcgaagcgcggcggcgcagatggcattgcggcgattaacaccgttaaatccatcaccaatatcgatcttaatcagaaaatcggtatgccgatcgttaacggaaaatcgagtatttccggatattccggtaaagcggtaaaaccgatcgccctgcgcttcattcagcagatgcgcacccatccagaactgtgcgatttcccaatcagcggtatcggcggcattgaaacctgggaggatgcggctgagtttttattgctcggcgcagcaacgttacaggtgaccaccggcatcatgcagtacgggtatcggatagtggaagatatggcaagcgggttgtcgcattatctcgccgatcagggatttgattcgctgcaggagatggtaggtctggcgaataacaatattgtcccggcggaagatttagaccgcagttatattgtccatccccgtatcaatcttgataaatgtgttggctgtggacgctgttatatttcctgttacgacggcggtcaccaggcgatggaatggagcgagaaaacccgcacaccgcattgtaataccgagaaatgtgtgggttgtctgctttgtggtcacgtctgcccggtgggttgtattgagctcggggaagtgaagtttaagaaaggcgagaaagaacacccggtaacgttgtaaaaccagagacgcatccggcatttggcaccgattgccggatgcagcgcatccggcaatatccacaatcacatcacttcttacgcgcgtatttcagtgaatccagcgctacggcgaagataataatcgcccctttgatgatgtactgccagtatgggtttacgccgatatacgtcaggccatagttgatgacggtaaaaataattaccccggtcaccacgccaatcaccgtccccacaccgccgctgaacgatacaccgcctaccacgcacgccgcgatagcatccagctcatacataaagccgaggttgttggtggcagagccgatacgtccggcttctaacatcccgccaaaggcatagaacacgccagacaacgcgtagatcatcagcaggttcaggccgacgttgacaccagatacttttgccgcttccgggttaccgccaatggcaaaaatgttcttaccgaagcgggttttgttccacaacacccagacgaacgccaccgcaatcaacgcgtagaaggtgatgtaagagagacggaaactccccagcgcgacaaagccctgagcaaaggtagagaagccactgtcaaaaccagaaattggcgacgccccgacaaagtcgtaatagagcgagttgattccatagacgatgatcatcgtgccgagcgtggtaatgaacggcgtcacgttgagataagcgataatcagaccgttgatcaaaccgatcaccgcaccaatggcacagacaatcagaataaccagcgcaatcggcatcgtcgccatttccgggaacactttgttggcgttatccatggactgcaataatgtcgcagccaccactgccgccagccctacctgacgaccagcagaaagatcggtcccctgggtgacaattaaccctgccacaccgagcgcgataataatacgcaccgatgactgggtgagaatattacttaagttcaacagacttaaaaatgttgggtcctggaaaataataatcgccagcaaaactaaaagaacgacgtaaataccgccctctttcaggtaagtaagaaaacttttcttatttaacgcactcatgggaagcccctaatcttaaaggtgcaaagacgcaagacgcagaatttcgttttgcgttgttgtttttgtatcgacaattccggaaacgagaccattgctcatgaccagaatacggtctgttatccctaacaactcaggcatttcagaggagataataataatccccttgcctttcttcgccagttcggcaattaactgataaatttcaaacttcgccccgacatcaataccgcgcgtcggttcatcgagcattaatatttctggttgcgttagtagccagcgaccaataatcaccttttgctgattaccaccggagagcgaaccaatttgcgtccgatgacccggcgtttttacccgcatcgaatcaatcacccactgggtatcgcttttcatccgcgagttatccagtaaaccaactttatttttgtagttgcgaatattggaaattaacgagttaaaactaatatccagataggcataaattcccgttgagcggcgctcctcagttaccagtgcaaatccgtgatttatggcttcgttggcattatggttattgatctgtttgccgtgcaacgtaatggtgccagccgatttctcgcgaataccaaataacgtctcaacaatatcggtacgtttcgcccccaccagaccggcaataccgaggatctcccctttatgcagatcaaacgagacatcgcgaatcgacggctggcgcagtgacgtcaggttacgcacctcgaggatgacttcgcccggcttgttttctttgtcagggaaacgctggttaagagaacgcccaaccatcatggcgatgatcttgtccatcgtcagtcctgccagcggttcggtggcgatccactgaccgtcgcgcaatacggtaacttcatcacataactggaagatttcttccattttatgcgagatataaacaataccgcagccgcgctcttttaatttacgaataatagtgaacagatgattgacctctttttcggttaacgaagaagtcggttcatccataatcacaattttcgcgttataggaaaacgctttggcgatttcgatcatctgcatttgcgaaacggataatgtgccgacgcgcgcacgcggatcgatatcaatatccagttcatcaaaaatcgctttggtttcgcggtacattttgtcctgatcgacaaacatgcctttggtgggatatcgccccagccacatgttatccatcaccgaacgttgtaataccaggtttaactcctggtgtaccatcgaaataccattttccagtgcttctttggcagaatggaaatcgatctctttaccctggaataaaatggtgccggagtctttttgataaataccaaacaggcattttaataatgttgattttcctgcgccgttttcccccattaatgcatggatagaatgtggccggacttttaaattaacgttatcaagtgccttaacaccaggaaaagacttgttgataccgctcatttccaacaagtattccccggaagacggagtcgttgagctgaccatataattttaccttgttggccatacaataagggcgcagtaatagactgcgcccaatcagtcttatttcttgctgaattcagccaggttgtctttatctacgccaacataaggtacgcggaccactttgttgtcgattttccagttggtgccatcagccgcacctttgccatcggccagatttttcgccagatcaaaggtcgctttcgcctggttgttagcatcgttcagtacggtgcccgccagtgcaccggatttcaccagcgccagagcttctggcagcgcatcgacgccaaacaccggaatgctggacttgttgtgtgctttcagcgcttcaaccgcacccattgccatcgcatcgttgttagcaataaccacttcgattttgttggcgttcgggccagacagccaggcgtccatcttatctttcgcctgagcggtgtcccacatagcggtatctaactgtaactgttcagttttgatgcctttgtcgttcaattctttaatcacgtaagtggtacgtgcttctgcatccggatggcccggttcacctttcagcagtacgaactgaatctgaccatctttattcagatcccaaccctgattcgccgcccagtgtttagcaatcaaatcgccctgaataatgccggactctttggaatcagtgccaacgtagtaggctttgtcgtagctatccagcgccttacgagacggttctttgttgaagaaaaccaccggcacgttttgcccacgcgctttctcaatcaccgtacccgcagctgccgggtcaaccaggttgattgccagtgccttcacccctttcgccagcaatacgtcgatctgatcgttctgcttggactggtcattctgagaatcattcatcagcagctgaacatctggcgcggctttcgcatcttgctcaatagccttgcgcactacagacataaagttatcgtcgtacttatagattgttacaccaatgcgagtatcagcagcgtgtgcagcggcaccgaataacatgctggccatcacagcagacagggttaacaccttcttattcatggtatctccggtttttcttatgcagggtagtgcttgagataaatgctcggcggggcagtagagttaatgaagtgttactgaacgccgaagctcactttttaaaattcgttcttccatgcccggtaacgctccagaaaacggctttaattgttgttatgacgctattacctcggtgaaagtgattattcactgttacatacgggttacaacgttaaaacggtgcaatcatagctatcacattgttaagatactgtgaaatcactcacagattgaaagcggttacatcgcctgatttgttgagttagtgagcgtcgccgcattctggcgtgttgcgacagaatggcgacgcactaacgtcggcataaaacagtggctggcacgaggatcaatattgcctgctgccccctgcaaggccagttcggtggctaatttcgccattgaagcaatgggataacgcacggtcgttaattgcgggtcggtgtaacgggcgatgggaatatcatcgaaaccgatgattgagagatgtaacggaatcgcaatgccattatcttttaatgctgtcagtgcgccagcggccatattgtcgttataagcaaatacagcggtaagttgtagattgcgccccagcagttcaaccatcgccgcctcaccgcccggcatgtccggcgtaccagtgccaatccagctttccggcggaataatatcctgctctttcaacgcactcatccagcctgctttacgcatggcgtcatcttcaatgccgtggctggaagaaagataaccaatacgttgatgacagttattcagcaacatgcgcgtcgccattcgggcaccgctgagattatccaggcaaacgcaacgatgggcgtaccccggcacaacgcggttgattaacaccataccgggaatgttatccataaattgcgccagttcatcgtcactcaatgcttttgagtgaacaatcaacgcattacaacgctggcgaattaacacctcaatggcgtgacgctctttttccgcttcatgatagctattgccgattagcacgtatttctgatgctgctgggcgaccagatccaccgcttttaccagcgcgccgaaaaaagcatcagaaacgtccatcaccaccacgccaatggtatcgctaacctgagttgccagcgcctgggcattggcatttggccgataatccagctcactcacggctttcattactgcttcacgcgtgtcggcactgaccagcgtgctgttattgagcacccgggaaaccgttgccacagagacgccagcctgacgcgctacatcacgaatggtgatcatattcactacctgttatgagattgcagtaaatgactgcttgctggcggctattttgtcagcactgaatacaggacttcgtgaatcgagtcacagcaatggaaacggttacagccgttttgttaacgaatgtgatccagatcgttatcttgatgttttagatattgccgttccggcagcacgcaaagttaactgacgccagagccattccaccggcccctggcggaagtaacgcagccagataacagagaagaggatattcgccagccataccggaataacaaacgccagcagctccaggcgatcaaaatgcataaacaaaccgaggtggtaaaaaagcgtggtacaaatcagcgtttgcaatagatagttggtcagcgccatccgtccgacgcaggcgattgccagcaccagcttaaagcggcttaattgcggccagaagccataaaacagcgacgcatagccaatcgcctgaaacggcgcactcagttcccgcggcatttgaagtaagaaggcacaccagcgatacgcccagtccagctgccattgcagggcgatggcaggaaggttaatggtcaccccaatcgccaccagcacaaaaccagtacgacgatagtgacgtaagctgaactgccctttcagccagccgctgcgcatcagcgccgcaccaatgagcatcatcccagccagttgccagccatactgtgcgcccagtgccagtaaactgttgccaacaccatcggcacgattactgatcgcatcaacgccgccgtgaagcttccagtatttttcatacaaaatagccgatgcatccggcgtccaggcgcggctggtctggctgtcggaaatcagccccaataacagcaaaacgccaagccccaccagataaagcatgacgccggtattaaacaggctttttaccgatggcgcatcgcgcaccagccgccagcagattaagcccaccagcccgtaagccagcagaatatcgccgtcccagaacaataaaccgtgaataaagcccaataagactaacagcgttaaccgcgactggatccagcgtctgccacggggcagcaacatttgcagtccagcaccaaacagcagcgcaaaaagcgtgaggaatttcacctgggcgatgagatcaagaaatgcccaggtccatgcatcctgcggcgtaatagcaccgtaccaggcgggattgagataagccgcctttggtagcccaaaggcgctgatgtttaatagcaggatccccagaatggcgacgccgcgaacaaaatcgagcgtgacgttgcgctccatggttcctgccttttaatcagttgtgatgacgcacagcgcgcagaaactcgtggcgcgtattctgactggatttgaacaatccaccaagagaggtcgttgttgtggcactggttgcatcgcggatgccacgcgccttcacgcagtaatgcaccgcgtcgatcgagacagccacgttattggtgcccagcagcgtttgtagcgcaataagaatttgctgcgtcagacgttcctgcacctgcggacgctgggcaaagaactgcacgatacggttaatttttgacagaccgatcaccgaatctttcgggatataagccaccgtcgctttgccatcgatggtaacaaaatggtgttcacaggtactggtcagagtgatatcgcgcacggtgaccatttcatcgaccttcattttgttttcaatgagggtgattttcgggaagttggcgtaatccagaccggagaaaatttcatcgacatacattttagcgatgcgatgcggcgtttccatcaaactgtcatcagccaggtcgagattcagcagctgcatgatttcggtcatatgaccagcaataaggcttttgcgcgtttcgttatccatttcatgcacgggcgggcgcagcggtgtttccagtcctcgcgcaactaacgcttcatgaaccagggccgcttctttactgagtgatggcatttatgatttctcctgcaggtgtgacgcctccgccctgcgtgggggcaaagttattaagctgatttacagcttgattattgtgcgtgaggcggcgcacataatccagtattcacagcgataattattgtaattgccgctgcctttcatcagcagatgttaaaacatcgttatgcaaatacggaagtgaaagttactcacagcacattgaataaacggtatgatgaagaaattgcaaacaacacaacaaggagccacgcatggaaatgctcgaagagcaccgctgttttgaaggctggcagcaacgctggcgacacgactccagtaccttaaactgtccgatgacgttcagtatctttctcccaccacctcgtgatcacaccccgccaccagtgctgtactggctttccggattaacctgcaatgacgagaacttcaccatcaaggcgggtgcccagcgcgtggcggcagaactggggattgtactggtgatgccagacaccagcccgcgcggcgaacaggttgccaacgatgatggctacgatttaggccagggcgcggggttttatcttaacgccacgcaaccgccgtgggcgacgcattaccggatgtatgattatctgcgcgatgaattaccggcgctggttcagtcgcaatttaatgtcagcgaccgctgcgccattagcggtcattcaatgggtggtcacggtgcgctgattatggcgctgaaaaatccgggtaaatacaccagcgtttcggcctttgcgccaattgtgaatccgtgcagcgtcccgtggggaatcaaagcgtttagcagctatttaggtgaggacaaaaatgcatggctggaatgggacagttgcgcgctgatgtatgccagtaacgcgcaggatgcgatcccgacgcttatcgatcagggcgataatgatcagtttcttgccgaccagttgcaacctgcggtactggcagaagccgcgcgccagaaagcgtggccgatgacgctgcgtattcagccgggatatgatcacagttactacttcatcgcctcttttatagaggatcacctgcgcttccatgcgcagtatttactgaagtgaaagtccgcccggttcgccgggcatcttctcatcagaagcgataatccactgccataaagtaacgacgtccgtcttcgttatagctgtagtcgtcacgactgagatccttgtcgccaaggttcagcacgcctgcgcgcagtttgacgtctttagtcacctgccaggccgcgccggtattccagatggtataaccgcccggtgttttagccgtcgcgctgtcggcgcgtttctgcccggtatagtgaccagaaacatagaatgaccagtcttccagcgccagcggtttccagtccagcgtaccgttagcagtatggaacggcagatcggatagcggtttgttttcgccgttgctgacatcacgaccatcgttgtaggtgtagttgatcgacagtttccattcatcgttgaacggaattttcagttcggtttccacgccctgaatacgagctttgttaacgttgtagtagctaaataccggtatgcgccgtccgttagcgcccgtctcaaaaccaacaaagttttggtagcccggtgcagcgttgacgtcagacgtacggctgatgctgatacgatctttcacatcgttacggaaaacggtaacgctggattcaaccccttccagccagccttcttcacccatgtagtaaagccccagctcccaactttcgctggtttctggtttcagatccgggctacccacaatcttacatgcgccacggcaggaattgctcgtccagtcagggctaagttgcaacagagaaggtgctttaaatgccgtcgcccagccccctttcaccgttacggtgtcggtggcgttataaaccaggtaggcacgcggactccagtgttcaccgtaggtttcgtgatcgtccatacgcacgccggtcgtcagcgccagcggctcgaagatccgccattcatcttccacaaacagcgcgtactggctggcagacgttttggagctggttcccccggtcaggttcaccgcatcgctaagtttgtcgtgacgccattcaccgccaaccgtgagaaactgattaattgccgtcagcggcaacgtgtatttgccgtcgaccgcattgctttcggaagttatcgggctgctgttgccagggtttttgttctcgactttctcaccgtagtatttcagttcgctggtgccgtaatcccaacgcccattatggctgacggagtagttctggcgttccaggcggtttttgtccagcgagtcggaatcacgatcctgacggtcgaaaccgtatccggcagtaaaatcgtgattttgattcggtgtccaggcaaattcgacattgccgtcgcggctggagaatccttcaatacgcggcgtttctccggtatcggtggtcgttgagttttgcgggtcatccttttcacgttttgccaggctgccgtaagctttcattcccagcacaccatcaattaatggtccactggtaaagaactgaccgttataggtatcaccgcgatcgcgatgttcctgaatggtggtatcgacggtaacggtacccgaccatttctgaccgatttttttggtgatgatattcactacaccgccgagcgcatcggagccgtatagcgacgacatcgggccacgaaccacttcaatacgttcgatggaatcgaccgggatccagttcagatcgaaatcattgtggcggaagacggcattgcgggagttaacgcgtttaccgtcgacgagaatcagggtgtagcggctgtccagaccacgaatactaacgcccttacggttatccccttcgttcgtcagttgtacgccaggcacttctttgaggacatccttcagattctgtaccggttttcgctgcaggtcttcctgggtaatgacgctgatactggcgggtgcatctttgaggttttgttcaacggaagatgcagtgacaaccatcgtttcgccatcatcatcgaccgctaacacaggccatgcacaagaaatagcggacaaacacagcccgacccgtacgaaagggttcaacctaaacattccatatctccatgaggtaactacgaaaataaaatgggttatcgctcacatcttcttcacgtccccttgcgtacggcagcatcgcggtggacttatttgtatgcaggtgatcatcccagaaagccggaacagcctctgatttgtcagccttttttgattgcggcgtaacgataatgcaaacgataacaattatcaatccaaatgttaaattttatatccgcatgatttgtcagggaaatggaattgaaaaagccctctcggttgagagggcttagcaaggaagggaggaaacttatttcttatcgttctgcgggaacttcatttcgctgtagcgtacgaagtgagttcctttaatcagcttgtagccgaaccaaataatcaggaacagcgggataccaatatacgttgccgctacgccgccccagtcaatggtatctttcaggaacgcttcgtagttctggcccaaagtgataatcagacacagaatgaatgcgaagatcggccccagtgggaagaaacctgaacggtacggcagatcgttaatgtcgtgtccctgcaatacgtaaccgcgacggaagcgatagtggctaatggcaatccccagccaggcgataaaacccgtcatcccggaggtgttcagcagccacaggtataccgtctggttgccaaacatggaggtcaggaagcacagaccggcaatcaccgtcgtcgcatacagcgcattacgcggcacgccaccacgcgacagtttagcgaaaatgcgcggcgctttaccgtcacacgccagggtgtacagcatacgagtagacgcatacataccggagttacccgctgacagcaccgccgtcagaataactgcgttcatcaccgccgccgcagagagcagacccgcgtgctggaacaccagggtgaacggactaacgctgatgtctttaacatcgttacgcagcaggctcggatcggtgtacggaataatcaggctgataatcaggatcgcgaacacatagaacaacaggattcgccagaacacctgacgtaccgcgcgtggaatgtttttcgccggatcttcggactcgcctgcagcaataccgatcagctcggttccctggaaagagaagccgacaatcatagctacgccgatcatcgccgcaaaaccaccagcaaacggcgcttcgccgattgtccagttgctccagcccgcaggctgcgcgcctttgaagataccgataatcatcagcacgccaacgatgataaagacaataactgtcgtgactttgatcagtgagaaccagtattccgcttcaccaaagccacgaactgagatgtagttcagcaggaagataacgccgaggaacaacgcactccagatccagcccggtgtatccgggaaccaccagctcatgaccagctgagctgcaaccaggtcaacggcgatagtcaccgcccagttgtaccagtagttccagcccagcgcgaagccaaagccttcttcaacatagttctgaccgtaagtggcaaacgaaccggaaaccggcatatatgcagccagttcaccgagactggtcatcaggaagtaaaccatcaggccaatcagcatatacgagagcaatgccccgcccggacctgcctgagaaatcgttgcgccagaggcaacaaaaagacctgtaccgatggaaccgccaatggcaatcatcgtcaggtgacgcgcctttaattcacggcgtaagcccggcgcttctgtggttttagtttcggaaaccatacaaaaatgctatccatcttaaaaatgaggcgcgattgtagcagacgattggcaatccttccggcagaaatacacggttataagacaccttcatgatcgcccagggattataagtaaagcagccaatctcttttctggcgaatgcatgctgagggcgctgcgtcacgaaatcgacacagcaccagcatgttcttgtacagcaacttaacgcggtacattcgcgggatcgcaatagtccagaaagcgccgtagcgcgttggaaaggtgtttttgccgatgatgtatacgccacaacgtacgcatcaggcgcggcagagggaccgcaacttcacttaatgtgcctgcctgcaattgatcttcaatcacccgtcgcgacaggcaactaattcccaacccatgacgcaccgcatgtttgattgcctcggagttacctaattccatcgccatctcaaacttcggtaaatgtgacagcaatagataatcgacaatctcccgcgtgccggaaccgcgttcacgcaggatccacggcgcagcggccagctgctctaaggtgaccggaccacgggccaacggcgaagtcggcgcggcgaaaaccaccagctcgtcttccagccacggttcagaaataatttcagtgctgtggcacggtccttcaataaaaccaatatcaacgcggaaatccagcaccgcttgcatcacgtcctggctgttcccaacgctaagttcaatcggcaactgcggataatcatggcgataacgggcgataactgcaggcagaatgtagttaccgatggtactactggcatagatacgaatcgcgccgttgtcttcgcgaaacagttgttcgatttcaaccgcctgttcaagcaatgccaacgcacgcggatagagcagccgcccgtgttcattaacaaccagtcttttccccacgcgatcaaacagttgcacgccaagctgcccttccaggtcggtcaaggctgcgctcactgctgattgcgacaacgccagcatcaccgacgcctgggtggttgatccacttttcaatacttctgcaaaaacttccaactgccggagggtgatgtgcatagtcgcttaccacttataaagattaattataaatatataatcaattttatttttaaaccagttagtcgtaaccttatgcccggttaaaggagagggttatgacgaatatcaccttacagaaacaacatcgtacactgtggcattttattccggggttagccctgagtgcagttatcaccggggtcgccctgtggggtggttccattcccgcggttgcgggtgccgggtttagtgccctcaccctcgcaatcttgttggggatggttttaggcaacaccatctatccgcacatctggaaaagctgtgacggtggtgtgctgtttgccaagcaatatttattacgtctgggtatcattctttatggcttccgtctgacgttctcgcaaattgccgatgtcggtatcagtgggatcatcattgacgtgctgacgctgtccagtaccttcctgctggcttgcttcctggggcagaaagtgtttggtctggataagcacaccagctggttgatcggtgccggtagcagtatctgtggtgctgccgcggtactggcgactgagccagtagtgaaagcggaagccagtaaagtaaccgtggctgttgcaaccgttgttatcttcgggaccgtcgctattttcctctacccggcgatatatccgctgatgtctcaatggtttagtccggaaactttcggtatctacattggttctactgtgcacgaagtggcgcaggtggtggcggcaggtcatgccatcagcccggatgcggaaaacgcagcagttatttccaaaatgctgcgcgtgatgatgctggctccgttcctcatcctgctggcggcgcgtgttaaacagctgtctggggcgaacagcggcgagaaaagcaaaatcactattccgtggtttgccatcttgttcatcgtcgttgccatctttaactcgttccacctgttaccgcagagcgtggtgaacatgctggtaacgctggataccttcctgctggcaatggcgatggcggcgctgggtctgaccactcacgtcagcgcgctgaaaaaagccggggcgaaacctctgctgatggcactggtactgtttgcctggctgattgttggtggtggtgcgattaactatgtgattcaaagcgtcatcgcataaaccactacatcttgctcctgttaacccgctatcattaccgttttcctccagcgggtttaacaggagtcctcgcatgaaatacattggagcgcacgttagtgctgctggcggtctggcaaatgccgcaattcgcgccgccgaaatcgacgcaaccgcgtttgccttgttcaccaaaaaccaacgtcagtggcgtgccgcaccgctcacgacgcaaaccatcgatgaattcaaagcggcctgtgaaaaatatcactacacatcggcgcaaattcttccccacgacagctatctgattaacctcggacatccggtcactgaagctctggaaaaatcgcgcgatgcctttatagatgaaatgcagcgttgcgaacaactggggctttctttgctcaacttccaccctggcagccatctgatgcagatttcagaagaggattgccttgcgcgtattgccgaatccatcaacattgcgctggataaaactcaaggtgtaacagcggtgattgaaaacaccgccggtcagggcagtaacttagggtttaaattcgaacatctcgcggcgattatcgacggcgtggaagataaatcccgtgtcggcgtctgcattgatacctgccatgctttcgctgccgggtatgatttgcgtactccagccgaatgcgagaaaacgttcgcggattttgcccgtattgttggctttaagtatctgcgcgggatgcaccttaacgatgcgaaaagtacctttggcagccgcgttgaccgccatcatagcctcggtgaaggcaatatcggtcatgatgcgttccgctggatcatgcaagacgaccgtttcgacggcattccgctgatccttgaaaccatcaacccggatatctgggcagaagagatcgcctggctgaaagcgcaacaaactgaaaaagcggtagcctgaagatgaataaccgggaaaaggagatccttgcaattttacggcgtaacccgctgattcagcagaacgaaattgcggacatgctgcaaatcagtcgttcgcgcgttgcggcgcatattatggatttaatgcgcaaagggcggattaaaggcaaaggttacattctcaccgagcaggaatactgcgtagtggtggggacaatcaatatggatattcgcgggatggcggatatccgttacccgcaagcggcttctcatcccggtacaattcattgctcggcgggcggcgtgggacgcaacatcgcccacaatctggcgctgttaggccgtgacgtccatttgctttcagtgattggcgatgacttttatggcgaaatgctcctggaagaaacgcgccgtgccggcgtgaatgtctccggctgcgttcgtttgcatggtcaaagcacatcgacgtatctggcaattgccaatcgagacgatgaaaccgtgctggcgattaacgatacccatctgctggaacagttatcgccgcaattattgaacgggtcgcgcgatttacttcgtcatgcgggcgtggtactggctgattgcaacctgacagccgaggcgctggaatgggtctttaccctcgctggtgagatcccggtgtttgtcgataccgtttcagaattcaaagcgggcaaaatcaaacactggctggcgcatattcacaccctgaaacccactttaccggagctggaaattttatggggacaggcgatcaccagcgatgctgaccgtaatgctgcagtgaatgcgttgcatcagcaaggtgttcagcaactgtttgtttatttgcccgatgagtcagtttattgcagcgaaaaggatggagaacaatttttgctgaccgcaccagcgcatacgacagtagacagttttggtgctgacgatggttttatggcgggcctggtatatagctttctggaaggaaacaatttccgtgacagcgcccgttttgcgatggcctgcgcggcaatttcacgcgccagcggcagcttaaacaaccctaccctgtctgccgataacgcgctttcattagtgccaatggtgtaacaatgttgccggattcgacgcttgaccgcatcttatccggctcataaatcgcacactacgctaaaccaataaagaacccggcaatggtggcactcatcaggttagaaagtgtcgccgccgccagcgcgcgtaaaccaagctgggcgatttccggcgcacggtgtggcgcaaccgcagaaaacgcccccaccaccaccccgatagaaccaaagttagcgaaaccgcacaacgcgaaggaaataatcgccacggttttagcatccagagtgccagccgtttgcagatagggtgagaaattgagataagcgacaaattcatttattgccagtttctgtccaatcaaactcccggcaagattcgcatcagtccagtcaacacccattacccacgccagtggggccagcaggtaacctaaaatggactccagcgaggcatgttcaaaaccaaaccagccgccaacgccgccgataataccgttaattaacgcaatgatggcaacaaatgccatcaccactgttgccacacccgcagcgattttcagcccggtcatcgcccctgtcgcggcggcttcaataatgctttttggcggtgtttcggtgaaagagaggttattaaaagaaacctgcgaagattccgtagccgggcttaacaggcgggcaaacaagatcccgcctgggatcgccattaacgatgccgccagcaaatattccacaggtacgcccagtgcggcgtaaccaatcattgtcgaaccggcaattgaggccatgccactacaaatcgctgtaaataattcattgcgattcagccgatcgataaagggtttgacgattgccggaatttcgttttgcccgaggaaaatggtagtgaccgcgacgaatgactcgatcttgctgatatttaatgctttctggaagataccgccgagaatgcgaattaagatccccatcacaccgatgtaatagagaatactcaccagcgcggtgacgaagataattgccggtaatactctgaaaccaaagataaatcctgcgccatcaaacagcgtgtccattttcggcccgaccagcgaaccgaagataaatgcgctacccgcgtcgctgtacgccatcactttatgcacgccaaaagcgactttttcagcgacccaacgccctggcggtaaccaaagcataatgccgccaatcacaacctgtaacactaacgccgcgccaacggtacgcaggctgatcttcttcttgtttactgacagcaaaaatgcaattgccagcaataccaccattcccagaacacttctcatgacatccatagtgattatctcttcatgtcatattgggcgacggctttctgcccctcagaaatagccaggcctgcatcttgcgataccggcccggcttgttatcaacacttaatgggttttgatgtagccgcgcacgcactcttcgactaagccccagaaccagtcggtatcaatagtgatgccgactttggtattggcgggcttgccaagaacgcccagctcgtcgcagacggtgcgcccatagcaagggccactgttgacgtccacttcgacgtacatctcctgggttttaatgccatcagggttaatcagataaccgatgcaggtggcgtcgtgcaccgggccgccagccaggccgtagttttcgaactgcgttttgagagtgaagttcatgatgtcgctgaacagctctccggcagggccgcctgccctttccatccgtgcaatcacgtccggggtgcaaacggtctggttggtgagatcgaggcccatcatcactaatggaacgccagaggtgaacaccacgcgggctgcttccgggtcagcaaagatgttgaactcggcagatggcgtgaagttgcctgtaccgtaagcgccgcccattagcacaatttcacggattttgggcaggatcgcgggttgcatacgcattgccaccgcgatatttgaaagcggaccaaccggcaccagagtgatatcgccatcgcttgccatcagggtatcaatgatgtatttcaccgcgtgggtactttctgcctggcgggtcagcggctcgaataccgggccatccagtccggtttcaccgtgaatattatcggcaacgatttgttgacgcataatgggttgcggcatccccgcataaaccggaacattaatctccagtttctggcaaacattcaggccattaattaatgttttatcaagcgtctgattacccgctacaatagtgatgcctaataaatctattgccggatgtttcgctgccatcatcattgcaatagcatcatcatgacccggatcacaatccagaataatttttctcttttccattgtttatttcctctgtttccagttgcgttattttttctacagcaaagaaaattcgaccgggccgatgattgaatcttaccaaccgcgtacgtatgctaaatatgagaaatctcatagcggataaacatcgtgaaagaaatccacaataatgatcttaagcagcaattgatgagtgaatccgcgtttaaggattgctttttaacggatgtttcagccgatacgcggctgtttcattttttagcgcgtgactacattgtgcaggaagggcaacagccgtcctggctgttttacctgacgcgaggccgcgccaggctttacgccacgctagctaatggtcgcgtgtcgctgatcgatttctttgccgccccctgttttattggcgagattgagttaatcgacaaagaccatgaaccgcgtgcggtgcaggctattgaagagtgttggtgccttgcgctccctatgaaacattaccgcccgcggttattaaacgacacgctatttttacgaaaactctgcgtcaccttaagtcataaaaattatcgtaatattgtttctttaactcagaatcaatcatttccgttagtgaatcgcctggcagcatttatattactctcgcaggaaggtgatctttatcacgaaaagcatacgcaagcggcagagtatttaggcgtttcttatcgacatcttttatatgttctcgcgcaattcattcacgacggtttattaattaaaagcaagaaagggtatctaattaaaaacagaaagcagttgtcaggactggcgctggagatggacccggagaataaattctccgggatgatgcagtaaaaattatttgcaatagcgcgattgccggatgcaacacttaataagcgcatacatccggcaatgaaactcaagctaaaccaataaagaacccggcaatggtcgcactcatcaggttggaaagcgttgctgctgccagcgcccgtaaaccaagctgggcgatttccggcgcgcgttttggcgaaatagccgaaaatgcgccaacgacaacaccgatagaaccaaagttagcaaaaccacaaagcgcaaaggagataatcgcaatggttttcacttccagcgtgccgcccgtttgcaggtatggggagaaactcaggtaagcgacgaattcgttaatcgccagtttctgcccaatcaggctacccgcaagattggcatcactccagtccacacccatgatccacgccagcggtgccagcacatagccaaaaatactttccagagaggcattggcgaaaccaaaccagccaccaattccgccgataatgccgttgatcagcgcaataattgcgacaaacgccattaccaccgtcgctacaccagcggcgattttcagcccggtcatcgcaccgctcgccgccgcttcgataaagctttttggcggcgtttcgctgaacgacagattttcaaatgtgacctgtgaaggctcggtggccgggctaagaatacgtgcaaacaaaataccacctgggatcgccatcagcgatgccgctaacaggtagtcaattggtacgcccattccggcataaccaatcatcatcgaaccagcaatggacgccatcccgctacaaattgcggtaaacaactcgttgcgattcatgcgatcgataaacggtttaacgatcgccgggatctcattttgcccgaggaaaatagttgtgactgcgacaaaagattcgattttgctgatgttaagagctttctggaaaatgctgccaaggatgcgaatcagcagccccatcacgccaatgtagtacagcagactgatgagcgcagtaacgaaaataatcgccggaagtacgcgaaaggcgaagataaaacccgcaccgtcaaacaggacatccattttcggcccaaccagcgaaccaaaaatgaaggcgctaccggcatcactgtaagacatcactttatgaacgcctaatgccgcctgttctactgcccactttcccggtgggaagtagagcatgatgccaccaatagcgatttgcagcagcagtgcggctccaaccgtgcgcaaactgatgctctttttattcactgacaacagaaatgctattgccagtaacaccaccatccccacaacacttctcattatatccataatgattttcccttcatgccagtaaacccggcgtcagcgccaggttttggtatgcttgatgagtacgggcgacggctttctgcccgtcagaaattaacccgcgagacgctggtattctttggcaatttcactcgccagaatggcgttgttgaacaccagctggatattggatttcaggctgtcaccgccggtcagctcagcaacgcgcgccagcaggaacggtgtactttctttaccaataacgccctgctcttcggcttcggcgacggcttgatctatggctgcattgatagattcctccggcatcgcaaactgttccgggatcggattcgccactaccaggccgccgttcaaaccggtttgccatttcactgccattgcacgagcgatttccgtggcactatcaaggcgaatactgacttcaaatgggctggtacggcagaaaaacgcaggcagcgcttttgtctgatagccaattaacggcacaccgaaggtttctaaatattctgttgttaatcctaaatcgagaatagatttcgccccggcacaaacaacggtgacattagtatttgccagttcttgcaaatcggcagaaatatcgaaggtatgttccgccccgcgatgcacaccaccaattcccccggtggcaaatactttaattccggcaagcgccgcaataatcatcgttgaagccacagtggttgcgccattttttccggcggcaacaacaaaaggtaaatcgcgacgactaactttggtcacgttatgcccttcacgacccagtaattcaatttcttctttgcttaaacccactttcatcacgccgccaataatggcgatagtggcaggtactgcgccctgtttacgaatagtttcttctacttcaattgcggtctgggcattttgtgggaacggcatcccgtgagaaataatggtcgattccagcgccacaaccgtttttttgttttttaaagcgtcctgcacttccggggaaatttgtaataattcaggggaaatttttaattcagacattctgcgttctccactaacgatataacgttggcaatcgataaatcggggttattggtgtattcacaggagagcgccattgacgaacatccctgtgcgaaacgaacagattcggcaaacggcattccgtctacccaacacgaagcaagtcccgccatcatggcatcgcccgctccggtaacattaataacattggttttgatcggggcagaccagccactttcaccgctgatatcactgtaataaacgccatcgccgcccatgctcaataccagtcggttcaggccatgttgatggaaccaggcagcaacttttgccacatcttcacgccctgacagcgcaatcccactcagtgtttccgcttcaaggcggtttggcttcagagtgtggatctgatttagacggtcgcgcactttgacacatttccacgctgaaaccggatcgacaaatacgggtacgttggcggcattatccagaatccatgccagtgcctcttcactgatattacagtctgcgacaatgacctttgccctctgaataaattcacggtgctgtgcgagatattcagctgtaatagcgttgctaatattcatgtcatttatagcaaccagcatttcaccggtattatcgagtaatgataaataactagacgtattttctcccggcacaatcaggcatttatcgacataaacgccagattgattggtttgcgttagcagcgattgaccataaaaatcactgcctactgcgctcagtagccaggctttgttacccagcaacgccaggttttgtgcaatattgcgccctactccaccaggcgtaaattttattttacctggatttgaatccgcataatttaatgattcatgtgaatatccggcgacatcaatattcgccgaacctataattacgacataatccttttcgcgcatagcacgtcctctggtaaaaaattaccaaccctgtcaatccacaagaatatagatactgcaaagacggtttaaacatgtgttcatatttaaacatgtgctcatagtatgcatgttttacgtaaagtaaattaccgccagagaggcaaaatgggcagatttgagcaggctcacaaaatgcgattaaatgcctgaattacaaaagcgaggaatttgtgacgggatgcacagaacaggaacactaaaaaagggcagaaaataatctgcccttgaggaaataaccttagtgtttgatgaacgtttcaggtttctactgaaagataaaaccatttaaattcataaaattacatttacaaaccggtcattccctttgcgctcatccaatgatacagggcaggaaatttctgccctgtaacacaccttttattacgctgctttcgctactgcgtccacttccggacgtttcaggaaggcataggccaaacccgccaccagcgtaccggcaataattgctaccaggtaacccaataccggcgtaatagcgccagggatcagcagaacaaacagaccaccgtgcggtgccatcagtttcgcaccaatcgccattgagattgcgccagtcagcgccccacccacgatacagcacggcagcacacgcatcggatcacgagcagcaaacggaattgcaccttccgaaataaagcacagtcccagtaccagagcggctttgccaccttcctgctgcgctttgtcgaatttgcgacgcgccaccattgttgccaggcccattgccagcggtggcaccatacctgccgccataatcgccgccatcgggccataggtttgagtactcagcagacccacaccgaatgcgtacgctgctttatttaccggaccgcccatgtcagtacacatcatgccaccgaggatcgcccccagcagaaccgcattcgcagtccccatggtctgcagccagtgagtcaacccttcgagaatgccagcaaccggtttaccgatcaggtagatcatcgccagaccgaccaccagactggaaattagcggaatgatcaggatcggtttcagcgcctccatactctgtggcagtttcaattgcgtactgattaacttcgcaatgtaaccagccaggaagcccgcaataataccaccaatgaagccagaaccggtgctgaccgccagcataccgccaatcagacccggcgtgaggcccggacgatcggcaatggaaaaggcaatataacctgccagtaccggtaccatcagcgcaaaggctgaaccaccaccaatctgcatcagcgccgctgccaacgtacccggctctttaaacgcttcgataccaaaagcaaaagaaagcgcgatacacagaccaccagcaacgaccatcggcagcatgtaagagacgcccgttagcaagtgacgataagcgcctgcactctctttcttaccttcagtggtcgccgtttgagttttgcccgccggttcatacggcgttgcttcagcaaccgctttatccagttcctgcgcggttttcttcagcgccagaccggtagaggtacgatacatcggtttaccagcaaatttcgccagatccacttcgatatctgccgccacaatcaccagatccgctgcggctacttcctcgggagtgattgcattacccgcgccaacagaaccacgggtttcaactttcacccaccagccacgttttttcgcttcggtttcaatggcttcagccgccataaaggtgtgtgctacgccagtcgggcaagcagtcaccgcaactacgcgtttcggaccgctggcggcaaccggtgctgtcgcagtgaccggcgcagtgtaaggtttcgcatggcctttggcttcactcaggaacagctcagggtgcgcaactgcccgggaaatatcacccagccagacatttttaccgttcagcgcgctgtcattcgggatggaatcaccgagaacaatcgccatttctgcgtcgttcggattgtcgatgatttccagttttgcttttcgcgccgccgcgcccagcagggtcttcgccatataggcgcgtgcctgaccgagattagcgtcaataatcagcagcgttttcattatgcctctcctgctgtcagttaaaaggttgtaagtcgacgcgcgccatcattgcggccaactgcggacgatcggtaatacccacattgctttgacttaccgccagggctgcaacagctgtcgccagacgcagtgtgtgttcactggattcacgcatcagcaagccataaatcaggccaccaaccatagaatcccctgcgccaacggtgcttacgacatcgactgacggtggtttggcgatccattcgccggaggcattaacccaaagcgcgccttcggcacccagtgaaataacaacatgcgcaataccttgttcacgtagcgcatgtgcagcttcaatcacatctttcatttcaggcagtttacggcctgcccagatttccaactcgcggcggttaggtttcaccagccacggtgccgctttcaaacctgctactaacgcttcacggctactatcaaagataatgcaaggacactgactacgcaggcgagtcatccagtcggtgaacgcttccgggctgacgcctgacggtaagcttccgctgacacagaccatatcgaactgaccgagccagctcagagaatcagtcacaaagcgttcccagtcggcgggggtgacttcaaaacccgagaagttgaagtcggtcacttcgccgtctttttccgtcagcttaacgttaattcgggtgcgcccctgtacaacctggaaacggttggcaatgcccagctcgctgaacagttgctgaaaaccatcctgattgtctttacccaggaagccgccaacggtgacatcaattcccaggtcttttaatactttggccacgttgatgcctttacccgccgcatgcagaccggtggttttcaccaggttcacttcgccgcgttcaatttccgggcagaaaccaacaaggtcataagccggattaagggtgatagtagcaacacgtctgctcattatgcgccctccccaagaccagcagcgatagcgtcgccgattgctttcagcgcctgttcagcatctgcaccctgggcggtaaagcgtaggcgatgacctttcttaacgccaagtgccacaactttcatcagactacgtccgtttgccggtttgccggtaccatcaaggtttgtcacggtaatatcactgttaaattgtttaatggtattgaccagcatggtacctggacgagcatgcaggccgtgttcattgcgcaccacaaactccgcgcttaacacgtcgtcggtcggcgcatcatcgctggtcagcagcgccagcaacgttgccgcatccgctttcagcaagcggtcagctttattgtcgagcaataaatcagcgagacgcttaagaaccgcgatgggctgatcgtcattcatcgccacactcaccagcatggctgccgtttcgccgtccacatcaaaagcatttgccgcacggcttaccgcaatcgcgctacgcagattgccttcggcgctatcgctcagccagataccctgtccgagattcagcggttgttcattgatggctttggtgacgaaagtggcgtcaactgcccccgcctctttcagacgcgcagcgttcagcgcctgaagagtcagcagatcgctggcgacgatatccagcgtcagcatttcgttgtcgagcttcagctgctcactctgcttttcgcccatcagtaatgcgcgaagttcttctgctgttgttgctgacttcagttgttcagcaacggaatcatcgctcagtacgtgggtcagctggcgtagcaggcccagatgttcatccgagctggcagcaataccgattgccacgtacgctacctgaccgtcaccccaggtgacgccttccgggaactgaaatacctgaacgccggttttcagcacctgatcgcgggtgtcggtagtgccgtgtggaatagcaataccattgccgaggaacgttgaggtttgctgttcgcgcgccagcatgccattgacgtagccttctgctacattaccggcctgcaccagcgccgcagcgacctggcgaatcgcctcttctttgtctccggccttttcgcccggatggatgtcctgtacggataactggaacatagttctcctctcttgctgaattgaaacgattcagcctctatgagaaaaaaagcgccaacctggcttagggttaaagacaagatcgcgctgaaacgtttcaagaaagcataatacttctgtttcagcacgcaaggaaagccgtaaagttatgagcaaaagtttgatgtgctgcacaattttttgccatttttcctaattgctgatgggaaaatccgttatcagcaatttcatttcagcagcgtcagcagccaatcagcaacagtgaaatggcattttgattattcgtggcgcttttgatttcgctgtctgtttattttctgacaagcagcgtaaactccgcgtcttcctcttccagtgatcgaccagcatgcataactcccccgcagtctccagcgcgaaatcgtttgacctgacctcgacggcgtttttaatcgttgcctttctcaccggtattgcgggcgctctgcaaaccccgacactcagtatttttcttactgatgaagtacatgctcgtccggcgatggtgggattcttctttaccggcagcgctgtcattgggattctggtaagtcagtttctcgccgggcgctctgataagcgcggcgatcgcaaatcgctgattgtcttttgctgcctgttaggcgtgctggcctgcaccctttttgcctggaatcgcaactactttgttttgctattcgttggcgtctttcttagcagctttggctcgaccgctaacccgcaaatgtttgcccttgcccgtgaacatgccgacaaaaccggacgtgaggcggtgatgttcagctcttttttacgcgctcaggtttcactggcatgggtcattggcccaccgctggcttatgccttagcgatgggtttcagctttacggtaatgtatctgagcgcagcggtagcgtttattgtttgcggtgtgatggtgtggctgtttttaccgtcgatgcaaaaagagcttccgctggcgaccggcacgatcgaagcgccgcgccgtaaccgtcgcgatacgctgctgctgtttgtcatttgtacattgatgtggggctcgaacagcctgtacatcatcaacatgccgctatttattatcaacgaactgcatcttcccgagaaactggccggtgtgatgatggggaccgccgccgggctggaaatcccgacgatgttgattgccggatatttcgccaaacgtctgggtaagcgtttcttaatgcgcgttgctgccgtgggtggcgtctgtttttacgcaggaatgctgatggcgcattcacctgtcattctgttgggcttgcagctgctaaatgctatttttattggcattctgggcggcatcgggatgctctattttcaggatctgatgcccggtcaggcgggttcagccaccacgctctataccaacacgtcgcgcgtgggctggatcatcgcaggatcagtggcgggcatcgtcgccgagatctggaattatcacgctgtgttctggtttgcgatggtgatgattatcgccactctgttttgcttactgcggattaaagatgtttaaggcgcggtcagcatttccagatcgataagccaggtcatggcctgctgacgcgagttaccgcacatttcagcgctggcttgtaagcctgcacagactttcggtcgcagtggcgaggtgaaaattttacagcgttgctgttcatcaagctgaatgcagggcgtattggcgggcttgccatctggcataccgggaatagggctggaaattgaaggggcagtgcaacacgccccgcaacccggacggcatttcatacgttgttctcttaaggttaaccaccggattgatgagcgcgcacagtaccaccttttttgcaccagcaaaagtgcgaataccacttgcccgaaaggcccgtcgcgagtactttgtcgcgatatttttgacattttcgactacaggaatttttcgatgccaagagcgaacgaaattaaaaaaggtatggtactgaattacaacggcaaactgctgctggttaaggatattgatattcagtcgcccactgcccgcggtgccgctacgctgtacaaaatgcgtttttctgatgtccgtaccgggctgaaagtagaagagcgtttcaaaggtgatgatatcgttgacaccgtgacgctgacccgccgttacgttgacttctcctatgtcgatggcaacgaatatgtctttatggataaagaagactataccccgtataccttcaccaaagatcagattgaagaagagttgctgtttatgccagagggcggcatgccggacatgcaggtgctgacctgggacggtcaactgctggcgcttgagctgccgcagaccgttgatctggaaatcgttgaaaccgcaccaggcatcaaaggggcatctgccagcgcccgtaacaaaccggcgacattgagcactggtctggtgattcaggtaccagaatacttaagcccgggcgaaaaaattcgtatccatatcgaagaacgccgttatatggggcgtgctgactaacttcagccgcatgcagaaaagggatagctcaggctgtaatgccagtcagttaagcaactgactggctctttttcggggctgtggggtatttccagggcctctcctttaccactctcgggaaggccctttcccttcttgtcggtaatttcacaagttgtccca

SEQ ID NO: 29 - DNA, 98819 bp, Escherichia coli
  source 1..98819: mol_type = genomic DNA
aaggcagtccgctgcataaatctacgcaacaggttagaacccaaggcccgatacggcatgcggactgcaggcagagaaaactggccgattttctctgcactggagggataatacaaggcctgataagacgcgccagcgtcgcatcaggcgctgaatgccggattgttacccggcatttgtcatttagcggtgatgtttgcctggaccatgaccgccgtgatgatcatgatgagctttcttatggtgacgcggcggtggcggcggtccgtgtgggtgccagcgattgcctcgccattcataatgttgtttccaccagccgtggtcgcgccagtgaccgccatcccagtaataaccgcgattatcacgatcgcctatctgtaattttactgacgggactaacgtaatttccgcagcctgcgctgccatgggagcgaccagaaccagggaaagtgcgagtacgatagattgcatctttttcacaggttactccttttatcattgcccgttatgggtcgatatccggagattacgcgatgagaacgacggttgttattctccgcaatcctaatctctaagttaccgcatttattgagaatttctcctttttccctgtcgtttttctccataatttcttcataaaaaagccgggctgcataaaagcaaacccggcctgattgagataatgaatagattttactgatgattcatcatcaatttacgcaacgcagcaaaatcggcgggcagattatgtgaaagcaagggtaaatcagcacgttctgccagctcttttggcagatccaacgtttcaccgagaatcgcttccacgctctctttaaatttcgccggatgcgcggtgccgaggaacaagccatattcgcctggattcaactggtcacgcagcgcacgatacgctacggcagcgtgcggctccgaggtgtagcccagttcttttaactcacgcattgtctgttgcgtggtttcatcatccacggctgcataacccagctctttcagttgccagattttgcggcggaacaactcttccacacgcggccagttgttcggctgactcacgtccatcgcgttggataacgtcgcctgagtcgctttgggtgaccactgaccgtcgtgcaggaaacgtggcacggtatcgttcacgttggtcgcagcaataaaacgtttcaccggcagaccgagtgacttcgccagcagacccgccgtcaaatcgccgaagtttccgcttggcaccgagacaaccagctggttgcgcgcttcctgcggcagctgcgcaacagcttcaaagtagtagcaaatctgcgccagcaaacggctgatgttaatcgagttagctgagtttaaccccagcgccactttcagttcttcatcatcaaacgcctgcttcaccagcgcctgacaggcatcgaaatcgccgtcgatggcaacagtttcgatattgccgcccaacgtacagaacagtttttcttgcagtggactgattttgcctcgtggatagaggataaccactttcacattcggtaaaccgtagaaagcatgagccactgccgctccggtatcaccggaggtcgcggtcagaatggtcactggcttatcgcccgcaatatgggtcagcatttgtgccataaagcgaccgccgaaatctttaaatgccagcgttggcccgtggaacaattccagacaaccgacatcgctttcaacattggcgaccggagccgggaaggcaaacgccgcgcgcacgcgctcttccaggatttcctgcgggatttcatcaccaataaacgccgagaggatcttcgcactgcgggtgacaaaatccagcttcagcatctcatcaatttcagtcaggctgaattccggcaggtcatgcggaaaaaacagcccctgatttttgcccaacccctgggttacggcttgcgcaaagctgacctgctcgttgtgatctttcagattgtagagtttcatttagttttccagtactcgtgcgcccgccgtatccagccggcaaatatgaacaaaaccttcctgattttgcaggtagttcttacccaaccagtcggcaacgcgctgggcggtatccggcttgtcacatagagcgaacaaggtcgggccggagccggagataccgctcgctaccgcgccgatttccgcgaccgcctgccgcgcctgccggaagccaggcagtaaccgttcacggtagggttcagcgataacatctttcatcagcttcgcggcaagctcaggctgacgggaatagcaggcgtgaatgaagccagccagatgtcgcccgtgcgcaatgcaatcctggcggcgatactgcgccggtaaaatagccctggcttctgccgtcgagactttaatccccggatacgccagcacccacagccactcatcaaaccctggcacttgctggctgatgatgtcgttttcttcgatcatcaactgcataccaccaagaaaacacggtgccacgttgtcgtaatgaatgctgccggagattcgtccttccagctcgcccatcaaagccagcaaacgagtgtcattaagcggcttgccacagtgttcattcatcgccatcagcgccgcgaccaccgaacaggcgctggagcctaagcccgaaccgattggcatattcttttccagagtcatcgccactggaatttgcttgccaagctcctggcaaaaacgctcccagcactgataaacgatattttcccgtggttctgacggcagcttatcggcaaagcgtccgaggttgttgagactgaatgtctctgccgcctcaaccgtgactacatctccgagcaatgcaccatcaacaggtgtcaccgccgccccgagcacatcaaacccgacgctcatattggcactggaagccggggcataaactttaaccatgtcagactcctaacttccatgagagggtacgtagcagatcggcaaagacaccggcagctgtaacgtcattgcccgcaccatatccgcgcagcaccaacggcagcggctgataatagtggctataaaaggccagggcgttttcgccatttttcactttgaacagcggatcattaccatccacttcggcaatcttcacgcggcaggcaccatcttcatcaatattgccaacatagcgcaaaacttttccttcatcacgggccttcgccacgcgcgcggcaaagagatcgtcgagctgtgacagattcgccataaaagcggcaacatcaccctcagcgttaaactctgcgggcagcacaggttcaatttcaatatccgccagctccagttcacgtcccgtttcacgagcgagaatcaatagcttacgcgctacatccataccagaaagatcatctcgcggatccggttcggtataacccatttcccgcgccagagtagtcgcctcggagaaactcatgccttcgtctaacttgccgaagatataagaaagcgaacctgaaagaatgccggagaacttcatcaattcatcaccagcattgagcagattttgcaggttctcaataaccggtaatccagccccaacgttggtgtcatagaggaatttacgccgcgatttttccgccgcatgacgcaacagatggtagtaatccatcgacgaggtgttggcctttttgttcggcgtgacaacgtggaaaccttcgcgcaagaagtcggcatattgatccgccactgcctggctggaggtgcagtcaacaatgaccgggttcagcagatgatattctttcacgaggcgaattaagcgcccgagattaaacggctctttggcttgcgccagttcttcctgccagttttccagatttaggccatgcacattggtgagcagtgccttcgagttggcaacaccgcagacacgtaagtcgatatgtttattcttcagccagctttgttgacgcttcagttgctccagcagcgcaccgccaacgccaccgacgccaatcacaaacacttcgataacctgatcggtattgaacagcatctgatgagtaacgcgcacgccagtggtcgcatcatcgttatttaccacgacagagattgagcgttcagaagatccctgagcaatggcgacaatgttgatattggcgcgggccagcgcggcaaagaatttcgccgagatcccacgcaaggtgcgcataccatcacctaccaccgagataatggccagccgttccgtcaccgccagcggctccagtaagccttctttcagttccaggtagaactcttcctgcattgcccgttcagctcgcacacagtcgctttgcggaacgcagaaactgatactgtattcggaagatgattgcgtaatcagcaccacggaaatacgggcgcgtgacatcgctgcaaagacgcgcgccgccatgccgaccatccctttcattcccggaccagaaacgctgaacattgccatgttattcagattggaaatgcccttgaccggtaattcgtcttcatcacggctggcaccaatgagcgtacctggtgcttgaggatttccggtatttttaatcaggcaagggatctggaactgggcgatgggggtaatggtgcgggggtgaagaactttagcgccgaagtaggaaagctccatcgcttcctggtaggacatcgacttcaacaacctcgcatcgggcacctgacgcgggtcgcaggtatagaccccgtcaacgtccgtccaaatctcgcaacaatcggcgcgtaaacaggcagccagcaccgccgcggagtagtcggaaccgttgcgtccaagtaccaccagttcgcctttttcattaccggcggtgaagcctgccatcagcaccatgtgatcagccggaatatgacttgccgcaatacggcgggtggactcagcaatatcgacggtagattcgaggtaatgccccactgccagtagtttttcgaccggatcgataacggtaacgttgtgaccacgcgcttctaacacgccggccataatggcgatcgacattttctcgccacggcaaatcagcgcagcgttgatgctatccgggcactgccccaacaaactaatgccatgcaggacatgttttatttgggcaaattcctggtcgacgaaagttttcagttgcgccagcgggaatcccggctgggcggcggtgagtcccgtcagaagttcggcaaaaatacgttcggcatcgctgatattgggtaaagcatcctggccgctaatggttttttcaatcatcgccaccaggtggttggtgattttggcgggggcagagaggacggtggccacctgcccctgcctggcattgctttccagaatatcggcaacccgcagaaaacgttctgcatttgccactgatgtaccgccgaacttcaacactcgcatggttgttacctcgttacctttggtcgaaaaaaaagcccgcactgtcaggtgcgggcttttttctgtgtttcctgtacgcgtcagcccgcaccgttacctgtggtaatggtgatggtggtggtaatggtggtgctaatgcgtttcatggatgttgtgtactctgtaatttttatctgtctgtgcgctatgcctatattggttaaagtatttagtgacctaagtcaataaaattttaatttactcacggcaggtaaccagttcagaagctgctatcagacactctttttttaatccacacagagacatattgcccgttgcagtcagaatgaaaagctgaaaaatacttactaaggcgttttttatttggtgatatttttttcaatatcatgcagcaaacggtgcaacattgccgtgtctcgttgctctaaaagccccaggcgttgctgtaaccagtcgaccagttttatgtcatctgccactgccagagtcgtcagcaatgccatgactcgttcgcgtaaagcttgcagttgatgttggtctgccgttgtgtcacttttcgtcggttgttgtattaatgttgctaattgatagcaatagaccatcactgcctgccccagattgagcgaaggataatccgccaccatcggcacaccagtaagaacgtcagccaacgctaactcttcgttagtcagcccggaatcttcgcgaccaaacaccagcgcggcatggctcatccatgaagatttttcctctaacagcggcaccagttctactggcgtggcgtagtaatgatatttcgcccgactgcgcgcagtggtggcgacagtgaaatcgacatcgtgtaacgattcaaccagtgtcgggaaaactttaatattatcaataatatcaccagatccatgtgcgacccagcgggtggctggctccaggtgcgcttgactatcgacaatccgcagttcgctaaaacccatcgttttcattgcccgcgccgctgccccaatattttctgctctggcgggtgcgaccagaataatcgttatacgcatattgccactcttcttgaccaaataaccgcgaacagggtgatcactgtcaacttattacgcggtgcgaatttacaaattcttaacgtaagtcgcagaaaaagccctttacttagcttaaaaaaggctaaactatttcctgactgtactaacggttgaattgttaaaaaatgctacatatccttctgtttacttaggataattttataaaaaataaatctcgacaattggattcaccacgtttattagttgtatgatgcaactagttggattattaaaataatgtgacgaaagctagcatttagatacgatgatttcatcaaactgttaacgtgctacaattgaacttgatatatgtcaacgaagcgtagttttattgggtgtccggcccctcttagcctgttatgttgctgttaaaatggttaggatgacagccgtttttgacactgtcgggtcctgagggaaagtacccacgaccaagctaatgatgttgttgacgttgatggaaagtgcatcaagaacgcaattacgtactttagtcatgttacgccgatcatgttaatttgcagcatgcatcaggcaggtcagggacttttgtacttcctgtttcgatttagttggcaatttaggtagcaaacatgcagaccccgcacattcttatcgttgaagacgagttggtaacacgcaacacgttgaaaagtattttcgaagcggaaggctatgatgttttcgaagcgacagatggcgcggaaatgcatcagatcctctctgaatatgacatcaacctggtgatcatggatatcaatctgccgggtaagaacggtcttctgttagcgcgtgaactgcgcgagcaggcgaatgttgcgttgatgttcctgactggccgtgacaacgaagtcgataaaattctcggcctcgaaatcggtgcagatgactacatcaccaaaccgttcaacccgcgtgaactgacgattcgtgcacgcaacctgctgtcccgtaccatgaatctgggtactgtcagcgaagaacgtcgtagcgttgaaagctacaagttcaatggttgggaactggacatcaacagccgttcgttgatcggccctgatggcgagcagtacaagctgccgcgcagcgagttccgcgccatgcttcacttctgtgaaaacccaggcaaaattcagtctcgtgctgaactgctgaagaaaatgaccggccgtgagctgaaaccacacgaccgtactgtagacgtgacgatccgccgtattcgtaaacatttcgaatctacgccggatacgccggaaatcatcgccaccatccacggtgaaggttatcgcttctgtggtgatctggaagattaatcggctttaccaccgtcaaaaaaaacggcgctttttagcgccgtttttatttttcaaccttatttccagatacgtaattgatcgtccattgtaacttctttactggctttcattttcggcagtgaaaacgcataccagtcgatattacgagtcacaaacatcatgccggccagcgccaccaccagcacactggttcccaacaacagcgcgctatcggcagagttgagcagtccccacatcacaccatccagcaacaacagcgcgagggtaaacaacatgctgttgcgccagcctttcaataccgcctgcaaataaataccgttcattaacgccccaatcagactggcgattatccatgccacggtaaaaccgatatgttcagaaagcgccagcaagagcaaataaaacatcaccaatgaaagccccaccagcaaatattgcattgggtgtaaacgttgcgcggtgagcgtttcaaaaacaaagaacgccataaaagtcagtgcaatcagcagaatggcgtacttagtcgcccggtccgttatttggtattgatcggctggcgtcgtcactgcgacgctaaacgcggggaagttttcccagccggtatcattgcctgaagcaaaacgctcaccgagattattagcaaaccagctgctttgccattgcgcctgaaaacctgactcgctaacttcccgtttggctggcaaaaaatcacctaaaaaactgggatgcggccagttgctggttaaggtcatttcgctattacgcccggcaggcaccacagaaagatcgccggtaccgcttaaattcagggccatattcagcttcaggttctgcttccgccagtccccttcgggtaaagggatatgcacgccctgcccgccttgctctaacccggtaccgggttcaatggtcagtgccgttccgttaacttcaggcgctttcaccacaccaataccacgcgcatccccgacgctaatcacaataaagggcttgcctaagatgatatttggcgcgttgagctcgctaagacgcgaaacatcgaaatcggcttttagcgttaaatcactgtgccagacctgaccggtataaatccctatcttgcgttcttccacgttctgattgccatcaaccatcaatgactcaggtaaccaaaaatggataaaacttcgtttccgctccacggttttatcctcttcctgcaccgtataaagctcggtcacaggaatagcgataagcggcccaacgagtttttgcggcccgctggtactttggcgaatcgcatcttccacatcgctacggtaatcggcacgttcgacaatcacttgccgaatcagcattatcggaatcaacaacagcaatactgcaccaaacaaggtggtcattttccagaacaggggggatttcaacatagtcttctcctttgcaatggcagcaggatacgaaggctatgtgggaagaatttgaagctatgtgaagtgacggtgaagtcgaagcgaggccagcacgccaccttcctgcacgttgcgcagcgtgacttcgccgttaaacaaacgggcgacctcactgacgaacgccaaccccagaccgctgcttttttgcccatttgcacgcggcaaagagtaaaagcgttcaaaaatacgtgacagcgcgtagtcaggaataccactaccggtatccagcaccttaagggcgacgtgttcctgatccacttcggcgcttagcgttatgcgaccgctctcgggggtaaaatcgatggcgttatccagtaaattccccagcgcctgctccagtaacgccggttcagcagcaacattaacctcagtgggcataacatgtagagtgatgtttttttctgccaactgcacggtgcgcgcttcgctgacgcggcgaaataatgccgccacatcaacaacagtcagaacgacttcctgacgattctccagtcttgcctggcgtagtaacgtttctaccaatgcctgcatacgcgcattttgcgtcagaatgttgtcagtaaaacgagccactacttcaggcggcggaccttcgcgtaaaatttccgccgcgccacgaatcgccgccagtgggctttttagctcatgggttaacgcataaacatattgctcaatatagtttttcccttccagcttcacgcgcatactttccagcgcctgcgcgagtttacgcagctcgctactaccgagatcgggaagaggaacgggcttattgtcagtgacggaatcggcatagcgagtgagccgggcaatggagcggttgatccaccaaaccatgcctgcgccaatcaccagtgcaatccccagcaaaatggcgctggcccataaaattcgccgctcgctacgcttaatgaccggagccatcgccgcgttcggtttgcctacgctcaaaacgccaataagccgcgagccgtccataatcggcgcggcaacatacatcaccgaactttcgggatcggcaggattttgcaacgtgctgcgcgcaccatactgaccacgcaacgttagccagacgtcattccagcgcgaataatcctgcccaacggctttatttgccgaatcgaacaatactttaccctgcgaatcggtcatatagacatgatattcattgcgcactttgttaatgccaccgatattggcgcgaaacgggcgatgttgtagctgattaaacgcctgcgccagttgcccatgcgttgggtccccagagagcaaatcgggacgcgccagctccgccagcaacgttgcggtatcgattaacgtcccctccgttgctcttcgcacgcccggtttaacttctttgacaaaaatagccagtacgaaccaggccgccaccgccaccagtaaaaaatagcccagcagcaaccgcatgccgatacgcattacaggcccctcaggctatatcccatgccgcgatgagtattaatcggagaaagatcggggttgatggcgcgcagcttggcacgcaacgttttaatgtgggtatcgacggtgcgatcgtaggtgtcctgcgcatcttcccacacgctatccattagttgctggcgggaccagacgcggcctggcgacttgagtaacgtcttcagcaataaaaactcataccgcgtcagcgttaatggcgtgtcaaaccagctgatctgcgccgcgggttcattcaattcaaaatgaccaatacggatgacgggagacggcgacgagaacttcttcacccgacgcagtaaggtgcgcaccctggcgcacacttcgcggggtgaaaacggtttagccacatagtcgtcagcgccaatttccagcccaagcaggcgatcgacctcttcacttcgggccgtcaggaacagtacaggtaacgccggatggagcgccagtaactggcggcacaattcaaagccgctgatatcaggcaaaccaacatcgagaatcatgacgtcgggaacctgctggcgagctttatccagcaccggcaagcctcgctcaaagacctcgacggcaaaaccttcctgctgcaacatgtagaccagcgtgtcggctatcccttgctcatcttccactaaccagaccgtttcccgttgcataaatcgcctctgttattgccgccacggcatgacaggaaccgcgctaatcgcgtttttcggcgaaccttctacaactttgtcggagtaagccagataagcgagcgcgttgcgtttggcgtcataaaagcgcacgacctgtaacgacttaaagaccagggacgtgcgttttttgaatactacctcgccctgagctttgccgtttttaatacgatccgacagttcaatcggcccgacttgctgacaagaaatagccgcatcggaggtatcttccgccagacccaatccccctttaataccacctgttttcgcccggctcacataacaggtgacatttttcacatcgggatcgtcaaaggcttccacaacaattttgtgatccgggccgatcattttaaatacggtgtcgaccgaaccaatctcttctgcatgagccaatggccccagcattatcaggcttaaagacaggatcaaatgcttgtatttcatattgttaccatttttatctattacacgagcaattagttcgtcacggtaaataacatattgattaagaacaaaatctcaatacttttatttccgtcaagacctaaaacatactctactaagaaaaaaacactgaatgctaaaacagcaaaaaatgctattatccaattacctgatgtcaggtgctcgttgttgaaaggatgaggatattttatggatcaggccggcattattcgcgaccttttaatctggctggaaggtcatctggatcagcccctgtcgctcgacaatgtagcggcgaaagcaggttattccaagtggcacttacagagaatgtttaaagatgtcactggccatgctattggcgcgtatattcgtgctcgtcgtttgtcgaaatcggcggtcgcactacgcctgactgcgcgtccgattctggacatcgcgctgcaataccgcttcgactctcaacagacatttacccgcgcattcaagaagcagtttgcccagactcctgcactttaccgccgttctcctgaatggagcgcctttggtattcgcccgccgctacgtctgggtgaattcacaatgccagagcacaaatttgtcaccctggaagatacgccgctgattggtgttacccagagctactcctgttcgctggagcaaatctctgatttccgccatgaaatgcgttatcagttctggcacgattttctcggcaacgcgccgaccattccgccagtgctctacggcctgaatgaaacgcgtccgagtcaggataaagacgacgaacaagaggtattctataccactgcgttagcccaggatcaggcagatggctatgtactgacggggcatccggtgatgctgcagggcggcgaatatgtgatgtttacctatgaaggtctgggaaccggcgtgcaggagtttatcctgacagtatacggaacgtgcatgccaatgctcaatctgacgcgccgtaaaggtcaggatattgagcgatactacccggcagaagatgccaaagcgggagatcgcccaattaatctgcgctgtgaactgctgattccgatccgtcgttaacgctgcaactcatctaatgcaggggcgtccagatgcgagatgtcccctgcggtttcaacaacccagccagacgccagccacaggctttcctgataatccacgcgcgaaatagaacagttacgcagacgtaagcggcgctctgcccatgctggtaatccgagaatcgtactcaccagacatcccagtgcaataccatggctcaccagcagcggtcggcttccctgcggtaagtcccggcaagattccagtgccgcattgacgcgatcgctgagctcctgcattgactcgccttcaggaatacgcccgtcaacggtgccattgaccagctgccgacgccagttctcttcttcttcggtcagagaatcgatatgtcttttttccagcacacccatgtttaattcacgcaggcgagaatcaaagatgatgtcacagccgcaggcctgggcgatgatttccgccgtacgccgggtgcgtcctaaatcgctactgataatatgcgtaatgccaagctctttggcacgggttgccacctgcatcgcctgttgctcacctttggcggtcagcgggctgtcagactggccctgaatacgtcgctcggcgttccactgcgtttcaccgtggcggactaggtatacctgtaacatgctttttttccgtatactgctgtaacgttaattttctgagtaatgctgattatgcaccaagttgtctgtgcgaccaccaatcccgctaaaattcaggccattctgcaggcatttcacgagatcttcggcgaaggatcctgccatattgcatccgttgccgtcgagagcggtgtaccggaacagccctttggcagtgaggaaacgcgcgctggcgcacgaaatcgggtagcaaatgcccgccgtttacttccagaggctgatttttgggtggcgattgaagctggcatcgatggtgacagcactttcagttgggtggtgattgaaaacaccagccagcgcggcgaggcgcgttcggctactttgccgttacctgcggtgattctgcagaaagtgcgtgaaggtgaggcgcttggtcccgtgatgtcgcgttataccggtattgatgagattggtcgtaaggaaggggcgatcggcgtgtttaccgccgggaaactcactcgcgccagcgtctatcaccaggcggtgatcctggcgctgagtccgtttcacaatgccgtgtatcaggcattgtaggacggataaggcgttcacgccgcatccggcattcggtgcacgatgcctgatgcgacgctgccgcgtcttatcaggcctacaaaatcaatcgcttttcagcaacacctcttccagccactggcgcagctcaacgggcgcggctttcaggctgttagatccacgcgtaatcgtcgcgatgcccgcgccgagttcattttttaactcacgctggctcatttcgccgcgcaacagctcttcgacaatacgcacgcgagtccccaacgcttcgcgctcatctggcgtcagcatcaggtttaacaacggtaaatggagatcgttttggtaggcattcttaagcaggtcgacaaaacgtaaccactcctggtgacgctgttctgccatcgctgctgaatagggtgattgttgggccataatatgtcgccattgttagcgggggaagcaaaatgcctcccccggttgtactcgctaaagagtacgatagcatatcataaacgtgcggatcagtaacgacgtccccattccgtggcgctcatcaacgtcggtttatcccccatgaaatagcggtagtaagcgtcataagccagcacgttcttcacataaccgcgcgtctcggagaacggaatactctcgacaaatgccacagcgtcgatacgcccggcgctgttgccaagccaggttcgcacccgtccaggtccggcgttataagctgctgaggagaaaatacggttattgccaaactgctgataaacatattgcaggtaactggtgccaatgttgatattcgtttccggatccagcaattgcccagggctgctataaccaggaatagagaacatcttcaccgtatgggtcgctgtaccaggcataatctgcatcaggccgctggcccctaccggtgatttcactttcggattccaggcgctctcctgacgggcaatcgccatcgcatagctttgcgggatctctttcccactggtgtaacgtttgaaaagatcgttgtaagccagcgggaatcgctcttccagatgatcccaaagcttcccggcgatcgttgcctgaacgctaagatcccaccattggttattgaaagcataccgagccagttgagcctgctctgtttttgacttgctcttcaccagattggcccactcgctacgcgcggtgttatcgagattccagtacatcaactcgcgcacgcgcgccatctccggcccctgagtcagggcgctgtcaacattctgcggcgctttatcaatcttcagctcatactcttctccgatgcgttgtgctgcaaccatcgggtagaaaccacgctgttgcatgagttgatgcaaaatctctttcgcttcagcttcacgtccgcgttccagcaataaatccgcctgccagtaacgccattcatctttctcttttgcttccatcggcagacgcgccagccaggtattcaggccgcgacgatcgccggtgccaagtgccattcgcacacggcgttcaatcaacgacgtggattgcgagcgcataatggcgtcatcgcgccatttcgcctgctcgtcggtgacatcgttgcccatcaaacgccaggcgacgatatcgcgcagctcctgaatctgatcttcattaagctgctgcgcctgggcaagcgacgggatcatcagccgtgcattttcagcatcctgccgcgccacactggcaaacgccaccgctgccatttgacgggtaaaatcggtcgctccggttgtacgcgcgaaggtcagtaccgtattagggttgttcgccagtgaaatgattgccgaggcgatagtctggtaatcggcaggcatctgccctgccagcactgttaccaggccagtgttacccgctttcatcgccagacggatacgctctaaatacgccagcggatcttgtttacctgacgcacgccagacgctaaataacttgtcacaggcgttaggctggctcttgccggttagccacagctctttcgccccttgccaggcttcttcactctgcccggtgttccatttcgcatagtagtaattacattgcgcttcggtagttccgggcttttccgggctaaaggctaacaagccacgccagtcttcacgccgcgccagttcattgacgaaacgagattgcagcgtgcgagcgggaggaagcgtggggttagcgcgaacaaagttagtgaccgtcaccgccggttgattcatcagatcatcggtgatctggcggtattccaggtagggataaagcggataatccttcagtccaggcatcatttgttcgaccacatccatttgtcgattatcccaggcctgcttgatttgcgcgtaacggctacgctgctcatccagtgagtcggctcgcgccacgctgctgaccgtcagcagacagacaccggcagccaacagccgccaggtaacttgtttggctttttccacaagcgcatcctctaagtgtaaatacatcaatgcagcgtcatgccgcgtaatagatttatgctaaccagtcattgccgtttacgccacgttacggacacttttttacttttactgcgaaggtgatcgaccaactgggattaggcggggaaaaaggctacacttcgcctttgaaaactcatcatcacgataaacatagaggcgaagtccaacgtggctcaattcgtttataccatgcatcgtgtcggcaaagttgttccgccgaaacgtcatattttgaaaaacatctctctgagtttcttccctggggcaaaaattggtgtcctgggtctgaacggcgcgggtaagtctaccctgctgcgcattatggcgggcattgataaagacatcgaaggtgaagcgcgtccgcagccagacatcaagattggttacctgccgcaggaaccgcagctgaacccggaacacaccgtgcgtgagtccattgaagaagcggtttctgaagtggttaacgccctgaaacgcctggatgaagtgtatgcgctgtacgccgatccggatgccgattttgacaagctggccgctgaacaaggccgtctggaagagatcattcaggctcacgacggtcataacctgaacgtacagctggagcgtgcggcggatgcgctgcgtctgccagattgggacgcgaaaatcgctaacctctccggtggtgagcgtcgtcgcgtggcgttgtgccgcctgcttctggaaaaaccagacatgctgctgctcgacgaaccgaccaaccacctggatgccgaatccgtggcctggctggaacgcttcctgcacgacttcgaaggcaccgttgtggcgattactcacgaccgttacttcctcgataacgttgcaggctggatcctcgaacttgaccgcggtgaaggtattccgtgggaaggcaactactcctcctggctggagcagaaagatcagcgcctggcgcaggaagcttcacaagaagcggcgcgtcgtaagtcgatcgagaaagagctggagtgggtacgtcagggaactaaaggccgccagtcgaaaggtaaagcacgtctggcacgctttgaagagctgaacagcaccgaatatcagaaacgtaacgaaaccaacgaactgtttattccacctggaccgcgtctgggcgataaagtgctggaagtcagcaacctgcgtaaatcctacggcgatcgcctgctgattgatgacctgagcttctcgatcccgaaaggggcgatcgtcgggatcatcggtccgaacggcgcgggtaaatcgaccctgttccgtatgatctccggtcaggaacagccggacagcggcaccatcactttaggtgaaacggtgaaactggcgtcggttgatcagttccgtgactcaatggataacagcaaaaccgtttgggaagaagtttccggcgggctggatattatgaagatcggcaacaccgagatgccaagccgcgcctacgttggccgctttaactttaaaggggttgatcagggtaaacgcgttggtgaactttccggtggtgagcgcggtcgtctgcatctggcgaagctgctgcaggttggcggcaacatgctgctgctcgacgaaccaaccaacgacctggatatcgaaaccctgcgcgcgctggaaaacgccctgctggagttcccgggctgtgcgatggttatctcgcacgaccgttggttcctcgaccgtatcgccacgcacatcctggactaccaggatgaaggtaaagttgagttcttcgaaggtaactttactgagtacgaagagtacaagaaacgtacgctgggcgcagacgcactggagccgaagcgtatcaagtacaagcgtattgcgaagtaatgcgtaaaatgccggatgcggcgtgaacgccttatccggcctacaaaccaagaaatttcaatacgttgtgaatctccaggcctgataagacgcggtaagcgtcgcatcaggcattgagcaccgaatgccggatacggcgtgaacgccttttccggcctacaacagccttagtatccgcaaattcgtagcgggtcacccgtgctgattcttttaaaccttgtttaatctcgacagcctcttccagagaggttttcaactcatcaaaaaacttattttatacctcgcctttgagccgtttcatcgcggttatctctgctcccccatcatctcccgcaccagctccacgcagcgcaggaaacggctgtcataatcgtcctcttcaacccgcacgaattcgatattgttctcttccagcatctccaccagcaagttctggaactctttgcgatccaccgaactgccgaggctgcgtaaaccatccgccacccacggcgtgttgttctccagcaggatcaccagatcgaaacggtattcatcaatcaacgcctgtacgaacggatgctcacgcccttcgtactttttgcagaacgcctgggtagtgacaaaatcagtgtcaataaacgccactttattggcatatttcactgcaaaatcaatgtattgtgcgtggcccagcgcgattttatcgtaatcggaatactgcaatgcgatctcatcaccgccgaggtgtgaaaagacataatcgcgaccatattcccacgcactggtggtattgaagatattggcaagtttgtttaccaaagtggatttaccgctcgactcgccaccaaggatcgccacggtacgtacaaagaacggcttcacttccgtaggaatatattcccagtagcggaacgggttttcgcggatctgcgcaccgctgatactcataaaggtacgtttcggatcgaccagcaccgtatcgatccccagatgttccatatactgtggcgcatcggcttcttccgaggtgtagatcaggtccggctgaatccccttttcagccataaactttttgatgccgttgctccacacatcccagccgtgcggatacggctccatgccctcttcgttgaaagcatgaatgcgaatatttttctgatatttaaaagtttgtaataaccagcgcagacgatccggcaccgtgggctgctgcgacatggcgctgtcttcaaacaacgcgcggtcgcgggtatcgtcaaaacccataatgatatgcagctcgtcaacctggctacaggcgcgctggataaggtagatatgtccggtatgcagcgggtagaacttaccgaatacgacaccaatggttttcttctgtcggggaaattcaagccccaaaaaacggtgcaacgcctccagcttttgcgcgctggggcttttaattttggcattcagtaactggcttaaataccctttggtcataccgctggcatcagctacctgctgtagcgtgcagccctgttgcttgatggcagttttcaggtaatcaaatgacgacatatctccctccgtatctctcattataagtcgtcgaacacgctaagcgcgtcggagagttttttaacgccaaaaatctgcatcccttccggcgcttttttcggtacgttagccgccggaacaatcgcccggcgaaaaccgtgtttcgccgcttctgaaattcgttcctgaccgctgggcaccgggcggatctcccctgccagcccgacttcaccaaacaccaccagatcctgtggcagcggtctgtcacgcaggctggaaaccatcgccagcagtaacgctaaatcggcactggtttcggttaccttcacgccgccgaccacgttcacaaatacatcctgatcggccatttgcagaccaccgtgacggtgcaagacagccagcaggattgccagacggttttgttccagccccactgccacgcggcgcggattcgccatcatcgagtgatcgaccagcgcctgaatctccaccagcaacggacgcgttccttcccacaccaccatcacggagctgccggaggtcacttcatctccgcgacttaagaaaattgccgaagggttgctgacttcacgcagcccctgttcggtcatcgcgaagacgcccagctcattcaccgcgccgaagcggtttttatggctgcgcaaggtgcgaaaacgggagtcggcatcaccatccagaagcaccgaacagtcgatacagtgttccagcactttagggccagccagcgagccatctttggttacgtgcccaaccatgacaatcgccacaccgcgcgttttggcgaagcgcgtcagataagccgccgtttcacgcacctgcgccacgctaccaggcgatgattgtacatccgccatatgcatcacctggatcgagtcaattaccatcagtttcggttgctcttcttcggcaatcaggcagatctgttcgatgctggtttccgacaacatattgagattgtcagtcggcaggccaaggcgatgagcgcgcattgccacctgttgcagcgactcttcgccggtgacatacagcgttttcatctgctgggccagtttgcacagcgtttgcagcaacagcgtggatttccccgcaccagggttaccgccaatcagaatggcacttcctggcaccacgccgccgcctagtacgcggtcgaactctttaaatccggtggaaaaacgcggcagctcttcaaggctgatatcggagagtttctggacttttgccaccccggcgctaccggcatagccgctgagacgctcgttacgcgccaccgttggcgacgcagcaagacgcacctcggtgatggtgttccaggcatgacaggcactgcactgcccctgccagcgcggataatcggccccgcattcattacaaacaaaggcgcgttttggagcttttgccacggtgtacctcgttaatgctgtgccgcccgcaggatggcgggcgagcaattacttctgattcaggctgcctgagaggatgcagaatacccccatcaggtcagcgtgacggatggtgacttccgccttttcattcacttttggcttggcatggtaggcaatccccagccctgctgctttgatcatcggcaggtcattagctccatcgccaatcgccacggtctgcgccagcgggatttcatactcctgcgcgaggcgagtcaaagttttcgctttgtactgcgcgtctacgatgtcgccgatcacattgccggtaaatttaccgtccatgatctccagttcattggctaccacggcggtcaggcgcagcttgtcgcgcagatattcagcaaagaaagtaaagccgccggaggcaatcgccactttccagcccagcgtttccagcttgagcaccagttgcgttaagcctggcatcagcggcagattttcacgcacctgttgcagaatattggcgtcagcgcctttcagcgtcgccacacggctgcgcaggctggcggtaaaatcgagttcgccgcgcatcgcccgttcggttacttccgccaccatctcgcccgttccggccagtttggcaatttcatcaatacattcaatctggatggcggtggaatccatgtccatcaccagcaaacccggcgtgcgcaggtgcgggattttccccagcggggcgacatccagttgcgcttcatgggccaggcgcgtagcccgtgcggtgagtgaacctgccagacgaatcacctgataatcttccacgcaccaggcggcaacaatcaccatcgccgcacccagtttgctctggtattgggtcagacgctgtttatccagcccacgaccatacagcagccagccgctacgacctgcgtggtaatccagtggcatcacttcatcaccacttaatgaaagaggcagaccaggccataaagagacatcttcaggcaggtcgcaccaggtaatgttaggcattaaggctcctgtaaaatcgttcgaagcagggaaaataacgcatgaggctaccttgtatccattgcttctggcaacattaagtctcaaattttcaaagggtggaagatggctcgcacaaaactgaaattccggctgcatcgggcagtgattgtcctgttctgtcttgccttgttagtggcgctgatgcagggagcgtcatggtttagtcaaaaccaccagcgacaacgtaatccacagctggaagaactggcccgcaccctggcgcgtcaggtaacgctgaacgttgcaccgctgatgcgtaccgactcaccagatgaaaaacgcattcaggcgatcctcgatcagttaacggatgaaagccgtatcctcgacgcggatgtgtatgacgaacaaggcgatcttatcgcacgttctggcgaaagcgtcgaagtgcgcgaccggctggcgctcgacggtaaaaaagcgggcggctattttaaccagcagattgtcgaaccaattgccgggaaaaacggaccgctcggctatctgcgcctgacgctcgacacccatacgctcgccaccgaagcccaacaggtggataacaccactaacattttacgcctgatgttgctgctttcactggcaatcggcgtagtgctgacccgcacgctgctacagggtaaacgtacccgctggcagcaatcgcccttcctgttaaccgccagcaaaccggtgccggaagaggaagaaagcgagaaaaaagagtgacccattactacaagaaaggaaatcgttatgtccacattacgcctgctcatctctgactcttacgacccgtggtttaacctggcggtggaagagtgtatttttcgccaaatgcccgccacgcagcgcgttctgtttctctggcgcaatgccgacacggtagtgattggtcgcgcgcagaacccgtggaaagagtgtaatacccggcggatggaagaagataacgtccgcctggcgcggcgcagtagcggtggcggcgcggtgttccacgatctcggcaatacctgctttacctttatggctggcaagccggagtacgataaaaccatctctacgtcgattgtgctcaatgcgctgaacgcgctcggcgtcagcgccgaagcgtccggacgtaacgatctggtggtgaaaacagtcgaaggcgaccgcaaagtctcaggctcggcctatcgcgaaaccaaagatcgtggcttccaccacggcaccttgctgctcaatgccgaccttagccgcctggcaaactatctcaatccggataaaaagaaactggcggcgaaaggcattacctcagtgcgttcccgcgtgaccaacctcaccgagctgctgccggggatcacccatgagcaggtttgcgaggccataaccaaggcctttttcgcccattatggcgagcgtgtagaagcggaaatcatctccccggacaaaacgccagacttgccaaacttcgccgaaatctttgcccgtcagagtagctgggaatggaacttcggtcaggctccggcattctcgcatctgctggatgaacgctttagctggggcggcgtggaactgcatttcgacgttgaaaaaggccatatcacccgcgcccaggtgtttaccgacagcctcaaccccgcgccgctggaagccctcgccgggcgactgcaaggcggcctgtaccgcgcggatatgctgcaacaagagtgcgaagcgctgttggttgacttcccggaccaggaaaaagagctacgggagttgtcgacgtggatagcgggggcggtaaggtaactcgctgattaaaataccaaaggaagggaatatgatcgatctggaaaaccaggagcgggagattatcaatataatgttaagccagcgtatttcctggctagccgccgtgcgtatcaggcataaattatcgcttgctgaagtaagtaaaatgttaggtatctcgattaattctctaaaatagatcgaaaagacggaacggtttagctcaaacatcaaaagcaaaatggcagaaatttatggttgtccaccagagttgctgatatgcccttcctggatgacggctgaacataaatgaatagattcgtgaatagatacttgaatagattttattttctatccatatgaaaaataatagtaaatctataaatcagttgctattgatgaatagatactaaaaagccggagcagtctcccactccggcttcacacgacaatcgcttttcagcgaaacacaattactctttatcgcccagcagaacggattccagtgcgattttgatcatgtcgttgaaggtggtctgacgctcagcggcagtggtctgctcgtgagtgcggatgtggtcagacacggtgcagatggtcagggctttcgcgccaaattctgcagcgacgccgtagataccagctgcttccatttccacgccgaggatgccgtatttttccatcacgtcgaacatttcgccgtccggagagtagaacaggtcagcggagaacaggttaccaacgcgagcatcaatgcccagtgctttagccgcgtctaccgcgttacgcaccatgtcaaagtcagcgatagcggcaaagtcatgatctttaaaacggatgcggttaactttggaatcggtgcaggcacccataccgataacgacgtcgcgcagttttacgtgcggcagaactgcgccacaggaacccacgcggataattttcttcacgccgaaatcggtgatcagttctttggtgtagatggagcaggacgggatacccataccgtgacccattacggaaattttgcggcctttgtaagtaccggtgaagcccagcataccgcgaacgttgttcacttcacgggcatcttcaaggaaagtttcagcaatatacttcgcacgcagcgggtcgcctggcatcaaaactacgtcagcgaaatcgcccatttctgcattaatgtgtggggtagccattgttttatccttatcaacatgttttcaccctctccctgagggagagggccggggtgagggcatcaagccgcacccattatcagaacatggctttgccatattccatatcagaagtaccaaaatattttgccagagtctgaccaatatccgcgaaggtttcacggtgacccagtgagcccggttttactttcgggccgtaaaccagtaccggaatgtgttcacgcgtgtggtcagtaccggtccaggtcggatcacaaccgtggtcagcagtgaggatcaggatgtcgtcatcgcgcagcagagacatcagctccggcagacggcggtcgaacagctccagacccgcagcataaccggcgacgtcgcgacggtggccccaggaagagtcgaagtcaacgaagttggtgaagacgatggtgttatcacccgcttctttcatctctttgatggtggcgtcaaacagcgcgtccaggccagttgctttcactttcttggtgataccgcagttggcgtagatgtctgcaattttaccgacagaaaccacctgaccgtgtttttcatcaaccagtttctgcagcacggtcggtgctggcggctcaacagccaggtcgtgacggttaccggtacgctggaagttaccggctttgtcgccaataaacggacgagcgataacacgaccgatgttgtagccgccgttggtcagctcttcacgggcgatttcgcacagttcgtagagtttatccaagccaaaggtttcttcgtggcaggcaatctggaacacggagtcagcggaggtatagaaaatcggcttgccggttttcatgtgctcttcgcccagctgatccagaatgaccgtaccggaagagtggcagttaccgagataaccaggcaggttagcgcgttcaaccagtttatccagcagctcttgcgggaagctgttttcgtgatcggagaagtatccccactcaaacagaaccgggacaccggcgatttcccagtgaccagacggggtatctttaccggatgacatttcgtgcgcccatgcgtacgcgccgataacttcagcgttgccgtccattcctgccggaatgaaaccggtagaaccttcatgtgctttcgccagccccagacgggtcagatttggcagattgagcgggcctttacgaccgttatcagcttcgcctttggcacaggcttctgcgatatgacccagggtgtcagccccgacgtcaccaaagcgttctgcatcttctgtagcgccgatgccgaatgagtccagcaccataataaatgcacgtttcatatgttctccgtactcagtgcttcaaatttaaatgatcagatcagtataccgttattcgctgatacggcgatagacagttggtgtgctttccggtgctttatcggcaagtttaattgccgctttcaccgctttcgccgcgtcctgccagctgttttcgtctttcgcgtggataacagccagcggacgctgaccgtctacctggtcgcccagacgcgccatatcagtaaagccgacgctgtaatcgatggtgtcagatgcctgacggcgtccgccgcccattgcaaccactgccatccccagcgcgcgggtatccatttcactgacaaaaccttcggtatcagcatagactgctttcgtcagcatcgctgtcggcagatacttcgcgtagttctcaacgaagtcggtcgggcctttttgtgccgctaccatacgaccaaagacttctgccgctttaccgttgtccagcaccgcctgcaatttcgcgcgcgcttcggcgtcatctttcgccagtttgccggagatcagcatctccacgcacagcgccatcgtgacatcaaacagacgcgggttacgatattcacccgtcaggaactgcaccgcttcacgaacttcaaccgcgttacctgcactggaggccagtacctgattcatgtcggtgagcagcgcggtggtgcgcacgccagcgccgttagccacgccaacaatcgcttcggcaagggcttcagagagttcgtaggtcggcataaacgcgccgctacccactttcacgtccatcaccagcgcatccagaccttccgccagtttcttcgccaggatcgaggcagtgatcagcgggatggagtccacggttgcggtaatatcacgggtcgcgtagaaacgtttatccgccggagccagtgagctggtctggccgataatcgctacgccgacgtctttaataatttcgcggaaacggttgtcatccgggaaaatgtcgaagccagggatggattccagtttgtcgagcgtaccgccagtatgaccgaggccgcgaccggagatcatcggaatatagccgccgcaggctgcgaccatcggccccaacatcagcgaagtcacatcgccgacgccgccggtggagtgtttatcaacaatcgggccattcagatgcaggcttttccagtcgagaacggttcctgaatctcgcatcgccatggtcagcgagacacgctcaggcattgtcatatcgtggaagaaaatggtcatcgcgagggcggcaatctgcccttcggagatagtgttgtcgcgaataccgttgataaagaaacgaatttcttcatcgcttagcgcatgaccatcacgttttttacgaataatttcttgtgcgagaaacaaggtaacctcccgaggaaaagagtatgaggcggcttttgccggatgcgtctacgccttatccggcctacgggtagatacgtctcgtaggcctgataagcgcagcgcatcaggcgtaaagcatcttacttagtagctgctggcgctcttaccgtcgccgtggcccagcgctttcagcaggcttgccagcaggctggaagcaccaaagcggtagtgacgcgcatcagcccagtcagcaccgaacagttcatctgcgatggcgagatatttctgcgcatcttccgcagtacgcacgccgcccgccggtttgaaaccaacggttttttctacgcccatatcacggatcacttccatcatgatgcgcgcgctttccggcgtcgcgttcacagccactttaccggtagaggttttgatgaagtccgcacccgctttgatggagatttcagacgctttacggatcagcgcttcgtctttcagttcgccggtttcgatgatcactttcagcagtacattcgctgccgcgcaagcctctttacaggctttcaccaggtcaaaaccaacctgctcgttacccgccatcagcgcgcggtacgggaacacaacgtcaacttcatcagcaccgtaggcgattgccgcacgggtttctgccagcgcgatttcgatgtcatcgttaccgtgtgggaagttggttaccgtagcgattcggatttccggggtgccctgctctttcagcgttttgcgagcaatcgggataaagcgaggatagatacagatagcggcggtattgccgaccggagttttggcctgatgacacagagcaattactttctcgtcggtgtcgtcgtcattcagggtggtcaggtccatcaatttcagtgcacgcaggctgcttgctttcagatcagtcatttcattctcctggcttgtcgccaataaaattcaccttgcgagtttgttagtattctaacatctactccgcaacacacttcgatatacatcacaattaaggaaatctacttacaagtttgcatcactgtaatgcgatctggttcaaataattcactttcaaatgaatgcgtcagtggtggcaaacgcatcaggatcaaagtgaacatcacgaaacttcttacaatggcgcatcaccttcggcataaaaggaaaagaagatgcccacttctcatgaaaatgcactgcaacaacgttgccagcaaattgtcaccagcccagtgcttagcccggagcagaagcgccattttctggcactggaagcagaaaacaatctgccttacccacagcttcctgccgaagcccgccgcgcgctggatgagggtgtaatctgcgatatgtttgaaggtcatgcgccgtacaaaccgcgctatgtcttacccgattacgcccgttttctggcgaacggttccgaatggctggagctggaaggcgcgaaagatcttgatgacgcactctctctgctgaccattctttaccaccacgtaccgtcggtcacatcgatgccggtctacctggggcaactggatgcgttgttgcaaccgtatgttagaattctaacacaagacgagatcgatgttcgaataaaacgtttctggcgttacctcgacagaaccctgccagacgcctttatgcacgccaatatcggcccgtctgattcgcccattacccgcgcgatcttacgtgcagacgcagagttgaagcaggtttcaccgaacctgacctttatctacgatcctgaaatcacccctgatgacctgctgctggaagtggcgaagaacatctgtgaatgtagcaaaccgcacatcgccaacggtccggtgcatgataaaattttcacaaaagggggctacgggattgtgagctgttacaactcactgccgctggcgggtggtggcagcacgctggtacgccttaacctgaaagccattgccgagcgcagcgaatcgctggatgacttctttacgcgcactctaccgcactactgccagcagcagatcgccatcatcgatgcgcggtgtgaattcctctatcaacaatcacacttctttgagaatagcttcctggtgaaagaagggctgattaaccctgaacgttttgtgccaatgtttggcatgtatgggctggcggaagcggttaacttgctgtgtaagaaagaagggattgccgcgcgctacggtaaagaagccgccgcaaatgaagtgggttatcgcatcagagcgcaactggcggagtttgtcgccaatacccccgtgaaatatggctggcaaaaacgcgccatgttacacgcacagtcggggatcagttccgatatcggcaccacgccgggcgcgcgtttgccgtatggcgatgagccagatccgatcacccatctgcaaactgtcgccccgcatcatgcttattattattccggcatcagcgacattctgacgctcgacgaaaccatcaaacgtaacccgcaggcactggtacagctttgcctcggtgcctttaaagccggaatgcgtgaatttaccgccaatgtcagcggtaacgatctggttcgcgttaccggttatatggtgcgtttgtcggacttagaaaaatatcgcgccgaaggttcacgcaccaacaccacctggctgggcgaagaagccgcacgcaacactcgtattctggaacgccagccgcgcgtgataagccatgaacagcagatgcgctttagtcagtaagattatccccttctcctgcgttgacgggccaggcagtcgtctggctctgtttttgcagggctgcaatctgcgctgcaaaaactgtcacaatccgtggacgatgggacgttgcaatgactgtggggagtgcgtgccacagtgtccgcatcaggcgttgcagattgttgacggcaaagtggtgtggaacgctgtggtttgcgagcagtgtgatacctgcctgaagaggtgtccgcaacatgccacgccaatggcgcaatccatgagcgtggacgaagtgcttagccatgtccgcaaagcggtgctgtttattgaagggataacggtaagcggcggcgaagccacgacccaactgccgtttgtggtggcgctgtttacagccatcaaaaacgatccgcaactgcgccacctcacctgcctcgtggacagtaacggtatgttgagcgaaaccggctgggaaaaattactcccggtgtgcgacggcgcgatgctcgatctcaaagcgtgggggagcgaatgtcatcagcaattaaccggacgcgataatcagcagattaagcgcagcatctgtttgctggcagagcgcggtaagctggcggaactgcgtttgctggtaattccagaccaggtggattatttgcatcacatcgatgagctggcgacgtttatcaagagacttggcgatgttccggttcgcctgaatgcgtttcatgcccacggcgtgtatggcgaggcgcaaagctgggcgagcgccacgccggaagacgttgagccgttggctgatgcgttaaaggtgcgcggggtgagccggttgatatttccggcgctctatttgtgacatgccggatacggcctacggttcggcacaaacctgtaggcatgataagacgcgacaagcgtcgcatcaggcattatgcgccgactgccggatgctgcctacgaagggcaaactacccactaacgctaaacaccgcatacgtattattaagcaacacttcggcaatctcatccgccggttccgagcgcaactcgcacagcacggcaaatacccgggcggcctgttccgggcggttagcctgcccctgaaaaccattgagcggcatatccggcgcgtcggtttccagcaacaacgatgccagcggtaattttgcgatgacatcgcgggttttactggcgcgtggataggtgatagtaccgcctacgccgattttgtagcccagctgtacaaaccgttcggcctgttgcaggctgccggaaaaaccgtgaaccacgccagtgcgcggtaaatcgtggcgtttaagatgcatcgccagtttgtcgtgtgtgcgccgtgaatgcaggatcaccggcagatcgtagcgtttcgccagtttcagttgttcgtcaagtaaccactgctgcctctcaaattgcggatcgtcgccgaagagatccagaccgatctcccccaccgccaccaccttcgccggacgcctttccagcgcctgctgtagctgatcaagagacacatcgctatgtttttccaacatccccggatgcaaccccaatgcggcatacagcggttgatatttttccgctaacgcctgcacgcgggcaaaattttccgcctctgtcgccggaacaatgatcttgcctacgcccgcttgtgccgcgcgttgcaggctggcctcttcatcgccactaaacggcgggaaatcaaaatggcagtgggtatcgataaaacggcaaatcaagccagatcctcattgttaaatgtcgggtcgttcgcctgcggagcatcgctcacttcggcaaccagcgtatcgttggcgactggcgcaggcggaataacgatcgattccggcgtcaccactggcaccagatggcgggtaagcggcgctttttcagttaatagcttgccaaccgtggcgaggaaataacgaccgcataaacgcccaagtttatagtcttcacgcagcgccggaatccgactgccaagcgcgatactatgtaatggcttcggtggataaatttcgaatatccgcagcttgcccggtggtttctcaataaattgctgaatgtcacgatagctggtttcatgatgctgcaccagattgaccagcggctgcaggctactgtcacccagccagcgttccatgcgtttgaaccactgcggcgtgtagtacatttgtgacggcacagtgcggatgacgaccaacgttttagcgccctgccttgccgcctctttaaccggaatcgcatcactgatcccgccatccaggtagttaatgccttccagcgacactccgctacgataaaagccaggtatcgcactggaggcgcgaatcacatccagccagttttgtttggttggtaaaaagtaattaggcgcgtagtcatcctgacgacaggcgcacatataaaacgatttgccgctgtcaaacaaccgcgcggcggtatccatttgcaacggcatctggcttgcggtggcctccaccagccagtcgagatcgataagatttcctccacggacaaagcgcaatggatcgaaaaattcgcgttttgtggtatagcgcatgatgactttgcgcgcgtaaccgggctgattgcagataaacgccgagaggttctgcgccccggcagatgtgccgagataaagatcgaaaggattaaactgcgcgcgcataaactcatccagcacgccagccgtgaaaattccacgctgtccgccgccttcgcacaccagagctattcgtccaggctggaacggccttagcgacaacggcgcaatattaccaagcgttacaggtattcgctgccccacctctgccttcctgtttttgttgtgaaagaatgacaaagtaacgcaatttattattcgctaaaaccgcaaaagccagtccgctggactggctttggataaaattttcttaatggtctgaaatctagggtcgttttcggcccatgaacaaactcaccaggaacagaataatcccgacgacaaagacaattttagctgcgcctgcagcggtaccggccagaccaccaaacccaagtgcggcggcgattaacgcgataaccagaaatatgatgccccaacgaaacataagcgtctcctttaccatagttaatgtcaccgcttgatatgagcgtgaaaatcactcaatgcgatatttttagtgtggtgcacatcgcgcctcccgacaaagttcgggaggacgaattacgacgaattacttagttttcagatcatttttaacgcttttcacaccatctaccgctttggcgatactttcagcacggtcactttgtgcctgagaatctacggtaccggagagctgaaccacgccatcggtggtttcaactttcacatgacgggaagggacgatatcgtccgccagcagtttggctttgatttcactggtggtggcggtgtcacccgcgtagcccttcaccgagccttctttagcgtcgcgaacgtgcagtttgtcgctcacagaggtcacgccttcaacgcctttcgccactttcactgcctcttcggcctgggcctggctttcaacgaaaccgctcagggtcacgactttttgatcggtttttacagagatatcggtgctcttgatgttgtcatgatccaccagggccgccttcactttcgcggtgatggcgctgtcatccatgaaattaccgactttattcatagagctatcgactttttgccctgcgctttcattggtagtctgtgcgttgttttccgcgtaggcagagccggtcgcgacggcagaggtcaacattacagccagcagagttttcgaaatcttcagtcttgtcatagtcatcgatttattcctgtatgtttgctcgtaatttgagcctggcaacacgaggttgcattgctgaatagggagagacttcaccctctacagaagtcaatggtcgccatcacaaaagcgatgggtgatgaataacgaccattacagcctctgaatcagttattaatatcggtagaatgacaatcgacggctttagatactgatatctacgcattgaacggtatttaacgccgtcagaaatgtcattactttgttaaatatagatcacaattttgaaaccgctcgggatatcagcgaaaacataagcaaaagtgaatgttttaagaacattccgtaagcggctaataaggaagggaaattgacagggcgaggcggttgccgcgccctggaggcaagaattaatgctcgcgggtctggtggaactgaacgtccggataacgttcctgtgccaggcgcaggttaaccatgctggtagcgatgtaagcgagattatcgccgccatcaagcgccagttggctttcgttcttacgcttgaactcttcaaatttcttcgcgtccgcacattctacccaccgggcggtggcaacgttgactgattcatatactgcttcaacgttgtattcgctcttcaggcgcgataccactacatcaaactgcagcacaccaaccgcaccaacgatcaggtcgttgttggagatcggacggaacacctgcaccgcgccctcttcggaaagctgtaccagccctttgagcagctgtttttgcttcagcggatctttcaggcggatacgacggaacagttctggtgcgaagttcggaataccggtgaacttcatcatctcaccctgggtaaaggtgtcgccgatctgaatggtgccgtggttgtgcaggccgaggatatcgccaggatacgcttcttcaacgtgcgaacggtcgcccgccataaaggtcagcgcgtcggagataaccacatctttcgcagtacgcacctggcgcagcttcatgcctttttcatatttaccggatactacacgcataaacgccacgcggtcgcggtgtttcgggtccatgttggcctgaattttaaatacgaagccggtaaatttgtcttcgttcgcctctacggtacgggtatcagtctgacgcggcatcggcgcaggagcccactccaccaggccatccagcatatgatcaacgccgaagttacccagcgcagtaccgaagaataccggagtgatttcgcccgcaaggaacaattctttgtcgaactcgttagacgcgcctttcaccagttccagttcgtcacgtagctgctgtgccagatcttcaccaaccgcagcgtcgagatccgggttattcagccctttaacaatacggacttcctgaatcgtgtggcctttaccgctctgatagagataggtttcgtctttataaaggtggtaaacgcctttaaacagcttgccgcagccaatcggccaggtgatcggtgcgcagccgattttcagctcgttctcaacttcatcgagcagttccatcgggtcgcggatatcacggtcaagtttgttcataaaggtgaggatcggcgtgtcgcgcagacgggtaacttccatcagcttacgggtacgatcttcaacaccttttgcagcgtcgataaccatcaggcagcagtccaccgccgtcagggtacgataggtatcttccgagaagtcttcgtgccccggggtgtcgagcaggttaaccaggcaatcgtgatacggaaactgcatcacagacgtagtaatggagatcccacgctgcttttccatctccatccagtccgacttagcgtgctggttggaaccacggccttttactgtaccggcggtctgaatggcctgtccgaacagcagcaccttctcggtgatggtagtcttaccggcgtccgggtgagaaataatggcaaaagtgcggcgcttcgccacctcttgcaaataaggagacaacgtcataattctttcttcttgagtaagcggcatcgcgccgcgcttgttgaaaacgaaaaattgcggctattttacccatcaacgggggggaggcaatcagtgtttacacaggagctgctccagttcatgcaacgaagaaacggtccaggtgggcgcgatgccttctggttgctcgcgatggtgtgcattcagccagcaggtcgcaagcccggcgttgatgccaccgagaatatcggactcggcagtgtcgccaaccatcagcacgcgtgaacggtcaggattgcccgcctgttccagcgcataatcgaaaattttcttattcggtttagcaacgccaacttcttcggaaatcaccagcaaatcgaagtaatcacgcaggcccgtccgttccagacgcacttgctgcaaggcgctaaaaccgttggtgatgatgccgattttagcgttgccacgaatggcgttaagcagagaaaccgcgcccggcaacggcgtacagatttccgccatcgcattaataaaggcatcgttaagcaagcctgcttcaactttcagccgttcggcccagctctcaaaccgcccgtgctgaagctgtaatgaagtgatcgcgccgttttgataatccacccacagtggcttgttaacggcctgatagtcctgaaaatcttcagcggtaaaggtgacgctgtaatcaagaaacatccgctgcaggccggtgaatgagtcaaaggtaaacagcgtttcatcggcatcaaagaaaatccagtcccacttcattattccaccttgtcttacatactgattggcaacgccatgatgatggcgtcttcgcgaccgtccgtggtggggtagtaattgcggcgaatcgtcgcctcgttaaagcctaaactttcgtacagggcaatggcggcagcgtttgaagcacggacttccagccatagtgtcgccacgccgcgtttttccagttcgtcgatcagatgttccagcagcgcccttcccaatccctgacgctgatagtcaggatcgaccgcaatattgaacaatgtagcttcatccagcaccacttgcgtaatcgcaaacgccgccattttgccgttttgcgttaactgaaagttgagataacgctcgccctggttgctggcaaaggttttttcactccacggaaaggcgtgggcgcgttgttcaatgtggtaagccgctggtaaatcagtcgtttcgagggaagaaatcgtgttcatatgtgcaaatttgttgccataacgcggcgcgtgccgttgggtttgcccgtaaatcggtgagcgccggtgatgccacctgagcgccttccagtgatagcggttcgtcagtacccaaccgccagctgttgcagcgactgccttgcggcagcatcgcgattttttctggcgtcagttgcagcacctggtcggggctgacggttaatgcgcgcagaacatcgctcactaaaggatcagtcagggcgggaagatcgtttgccaccatcaccagacggacgtgtgccgggatcgcaatggcaatctccccctgcaacgcgccagggcgacgcagcgaccactgggtaatgcccagttgctgtaactgccagtctcgtcgggatgtcatagcgaatcgctcctgttgtcaggggcgcaaatatagcaaattcgtcgataccgcgccaacatatggctataatcgccgccagtatcaattgaggagcattccatgtctgcatttaccccggcaagtgaagtcttgctgcgtcacagtgatgatttcgaacaaagccgtattctgtttgccggagacttacaggatgacctgcccgcgcgtttagataccgcggccagccgtgctcatacccagcaattccaccactggcaggtattaagccgccagatgggggataacgcccgtttcagtctggtcgccacggcggatgacgtcgcagattgcgatacgctgatttactactggccgaagaacaaaccggaagcccagttccagttgatgaatttactttctctgctgccggtggggacggatatttttgtcgttggcgagaaccgcagcggcgtgcgcagcgccgagcagatgctggcagattatgcgccgttgaataaagtcgacagcgctcgtcgctgtggcctctattttggtcgtctggaaaaacagccggtatttgatgccgataaattctggggcgaatacagcgtcgatggcctgacggtcaaaacgctgcctggcgtgtttagccgcgacggtctggatgtcggtagccagttgctgctctcgacgttaactccgcacacgaaaggtaaagtgctggatgtcggctgtggcgcgggggtgctttcagttgcctttgcgcgccattcgccgaaaattcgtctcaccttgtgcgatgtctctgcgccagcggtagaagccagccgcgcaacacttgcgggcaactgtgttgaaggtgaagtctttgccagcaacgtcttttccgaggtgaaaggtcgttttgatatgatcatctccaacccgccgttccacgatgggatgcaaaccagcctggatgcggcgcaaacgctgattcgcggcgcggtgcgtcatcttaatagcggcggcgagctgcgaattgtagcgaacgccttcctgccttacccggacgtgctggatgagacatttggcttccatgaagtgattgcgcaaaccgggcgtttcaaggtgtatcgcgccattatgacccgccaggcgaagaaaggttaattatctcgccgaataccgtgtcggatgcggcgtgaacgccttatccgacctacaaaacctgcacgttagcccttcgtaggccagataagacgcgccagcgtcgcatctggcatctgcccccgcatgcctaccaaacctgcacgctagtttcctgatggacatttttccagcaattacacctccggcgataattaactattgacgaaaagctgaaaaccactagaatgcgcctccgtggtagcaattctttttaagaattgatggtatgcgaaggtggcggaattggtagacgcgctagcttcaggtgttagtgtccttacggacgtgggggttcaagtcccccccctcgcaccaaaaaccacgttgatattactcgcactgggcgaaggtggcggaattggtagacgcgctagcttcaggtgttagtgttcttacggacgtgggggttcaagtcccccccctcgcaccaaacgaggcgatatcaaaaaaagtaagatgactgtgcgaaggtggcggaattggtagacgcgctagcttcaggtgttagtgtccttacggacgtgggggttcaagtcccccccctcgcaccaattatctttacttcctttcttgtttcttccttgatttttcatccctgattcaaattcattatcatcagcatgatgccagcaataagcgccaggcacgatggtagcaaaacgtaatgccgtaactgtttgtgatacagcatcaccggcgtcaatactaatcccatcagaatgacaatccgccattgatcaggcgataaatccgcatacatcagccctgcaatcagcaatcctggcagcaacactccccagccactgcccagcgtacgttgcaacatggtttcatctctttcattgataatgataaccaatatcatatgataatttttatcatttgcaagccagagaaatcccttgctatcggataaacctatcgctaggattagcaatcattatcatttagattactatcccgattatggcctatcgttccgcaccgctctatgaagatgttatctggcgaacgcatctccagccacaggatgctgggcttgcacaagccgtacgtgcgacgatcgccaaacatcgtgaacatttgctcgagtttatccgcctggatgaacccgctccgcttaacgccatgacgctggcgcaatggtcatcaccgaatgcgataagttctctactcgcggtctattccgatcatatctatcgcaaccaaccaacgatgatccgcgagaacaaaccgctgatctcactatgggcacaatggtatatcggcctgatggtgccaccattaatgctggcgctactgacgcaggaaaaggcattagatgtgtcgccggaacatttccacgttgagtttcacgaaaccggccgtgccgcctgtttctgggtcgatgtgtgtgaagataaaaacgcaacaccacattcgccgcagcagcgaatggaaacgttaatcagccaggcgctggttccggttgtgcaggcactagaagcgaccggagagatcaacggcaaacttatctggagtaataccggttatttgatcaactggtatctcactgagatgaagcaactgctcggcgaggcgacggttgaatcgctgcgccatgccctcttttttgagaaaacgctcacgaacggtgaagataatccactctggcgtaccgtggtactgcgcgacggcctgctggtgcgccgcacttgctgccagcgttatcgcttaccggatgtgcagcaatgtggcgattgtacgctgaaatgaaagcactgccggggaagtaaacccggcatcatgcggattaatagggatgcaacacattacttgcttcgcaatgccgcatacataacagaatatctgcggcctccaacaaccctgcatcagaactgacgcccagtttcgacatcacattaaatttatgtgcacggatcgttttgatattgcgtttaagctgctcggcaatttgtgtcattgagtagccacgcgacataaagcgcaatatttctctctccgtcgggcttagcgtccggctttggttaatgtaccactgattgttcagtcggtcggtcgcctgacgtacaccatttaatgacaaaaagagttcctgatgaaaaatctccagcgttgacgctttacttaatacaccgtccagcggtgatggcgacaatgaaccaatcagccgagcttcaatatcatcatccgcaataactaaacgccgggtacgcggaaacttaatcgccagttcagtcaggcaagataatccctctctgcgctcacttctcatggcagaaaaagaaaaaatgaccgccgcaaatgagatccgcgacatggcatcctgaaatgactcctgactggtataggtatggagcttataagggttacccgcaaactttctgaataaactctcaataccgatactgctcatgacgcatttttctatgagtgcgacatttctcttcttaattcggctgtgttccattctgcggcatctccataaacagaaggcaagttaagttctcttgcaccctgcgcgctatttatccatgcatacatttcagcgttgctgtgaattgccagtcgacgcatcgcactgtttttttgggcgctgatagttttattacttttcttaagcaacgaagctatctggttgatgccccatcctttacctaatagccgcagtaccttgcgctctgaaagagtgagaatgacggagcgatagctaaaatcatgagtttcattcattgccggagaggtcagcatggcgctgatacgctctgcgtgcgtattgccggaacgtacggtcttgaccagattctcaatgggttcaacatcagacaataacgtcgccgtagggcacatgagcaattctactgcctgggaataccaggagcgtgacaccatgaaaacccagtgaatttcccgatattgtgagattaaagaataataatgttcacaaacagaacgaggatcttcactttcaccggctaaatcagcaatgactaatccggaacgacgtaattgtaataaggtaaggtcctccgcagaggcgctggatattatttcatattcagggaagtgagtcctcatgacctcttttaaccctgcttgcataacaggtattttactgataacaattccatttttgcagcatcctggcaacatatttcctccacatccactgtctaaaaatcatgatggtttattcaggatattcattccttaaatgtttccagcaaattaatagattaagcgaataaattatccttagcattcactttcatatcagcatactcctgctgcacaacaactccactgcatgtgtcagaaggttagcatcaaatgataacctggtgaaatagcctggagacatttaaaatatctacattaagttgttaggaatacttaatgaaaaacagaaatcacattcatttaatttataattaaatgatatcccttcccgcagaatgaaaaatcacacaaccaatatttattcaatgaaatctgatggttttaacttgttaacattaaaaaacgtgcccggttatctattatcctgattcgtaaaggccaaacaataaattcattatagtgataatattcatgtgatagtttgtttgcggcgagagataattcgctttttatcaccgagcttgtcccgataaccaggattaatcagcgcaattttgatcttaacctaccgcaaaacaaccgtgcttcatgatacaaatggattctcattatctgaacaatacgcagcacgtctatgacaaagggcgagttatgcaaactgagcaacagcgagccgtaacacggctttgtatccagtgtggattatttcttttgcaacatggtgcggaaagcgcgttggttgatgagctttcctcacgactgggtcgggcgttggggatggacagcgtcgaaagttctatctcttcgaacgccatagtgctgacaaccattaaagatgggcaatgcctgacatcgacacgtaaaaatcacgatcgcggcattaatatgcatgtggtgactgaagtccagcacattgtgattctggcggagcaccatctgctggattacaaaggcgtagagaaacgatttagccaaattcagccattacgttacccaagatggctggtagccttaatggttggcctttcttgtgcctgtttctgtaaactcaataaaggtggctgggatggtgccgtcatcaccttctttgccagtacggccgcgatgtatatccgccagctgctggcacaacgtcatcttcatccacaaatcaacttttgccttaccgctttcgccgccaccaccatttccggattgcttttgcaacttcccactttcagcaatacacccactatcgcgatggccgccagcgttctgctgctggtgccgggatttccgttgattaatgccgtcgccgatatgtttaaaggccacatcaataccggactggcacgctgggcgatcgccagtctgctgacactggctacctgcgtcggcgtagtgatggcactgacgatttgggggctacgcggatgggtgtgatcgaatttctgttagcgttggcgcaggatatgatcctcgccgccattcctgcggtcggctttgcgatggtgttcaacgttcccgttcgggcgttacgctggtgtgcgctgcttggcgcgattggtcatggttcacgaatgatcttaatgaccagcgggctgaatattgagtggtcaacttttatggcttctatgctggtcggcaccattggtattcaatggtcgcgctggtatctggcgcatccgaaagtgtttaccgtggcggccgttatccctatgttcccgggcatatcggcttataccgcaatgatttcggcggtaaaaatcagccagttaggttacagcgaaccgttgatgattaccctgttaaccaactttcttacagcttcatcgattgttggtgcgttatccatcggtctttccattcctggattatggttgtaccgcaagcgccctcgcgtataaaattgcctcgcttaagcacacggatgagagacagcctcctctcctccgtgtgttactataaaagttatctcccttctcgttcatcgttccatatttgagaaacagtatgtcttccagagttttgaccccggacgtcgttggtattgacgccctggtacacgatcaccaaaccgttctggcaaaagctgaaggcggtgtggttgccgtatttgctaacaatgccccggcgttttatgccgtcacgcctgcacgcctggctgaactgctggcgctggaagaaaagctggcgcgtccgggaagcgatgtcgctctggacgatcaactctatcaggaaccgcaagccgctcccgttgctgtccccatggggaaattcgccatgtatccggactggcaacccgatgccgactttatccgcctggcggcgctatggggcgtggcgctaagagagccggtgaccaccgaagaactggcctcattcattgcctactggcaggcggaaggtaaagtctttcaccatgtgcagtggcaacaaaaactggcgcgcagcctgcaaatcggtcgtgccagcaacggcggactgccgaaacgagatgtgaatacggtcagcgaacctgacagccaaattccaccaggattcagagggtaacgatgaaaaacgttggcgacctgatgcaacgcctgcaaaaaatgatgcctgcccatatcaaacctgcattcaaaacgggtgaagagctactggcctggcagaaagaacaaggagcgatccgctccgccgctctcgaacgtgaaaatcgggcgatgaaaatgcagcgcacctttaaccgctccggtattcggccactgcatcagaactgctcctttgagaactatcgcgttgagtgtgaagggcagatgaatgcgttaagcaaagcgcgccagtacgtcgaagagtttgacggcaacatcgccagcttcatcttttctggtaagccaggaaccggcaaaaaccatctggcggcggcaatctgcaacgagctgctgctacgcggtaaatccgtattgatcatcaccgtggccgatattatgtcggcgatgaaagataccttcaggaatagcggtaccagtgaagaacaactgcttaacgatctgagcaacgttgatctgctggtgatcgatgagatcggcgtgcagaccgaatcgaaatacgaaaaagtgatcatcaaccagatcgtcgatcgccgctcttcttccaaacgcccaaccgggatgctgaccaacagtaatatggaagagatgaccaagttgctgggcgaacgcgtgatggaccgtatgcgcctgggtaacagtttgtgggtgatcttcaactgggatagctaccgtagccgggtaacaggtaaagagtattaatccccgtttctggcggtatactgcgacacaattccaccttgagtaatgatgatgaaaactgttaaacatcttctgtgctgtgccattgccgccagcgcattaatttccaccggggtgcatgctgcgtcctggaaagatgcgctctccagcgccgccagcgaacttggcaaccaaaacagcacgacacaggaaggcggttggtcgctcgcgtcattaactaacttgcttagcagcgggaaccaggccttaagcacagataacatgaacaacgccgcaggcattctgcaatactgcgcgaagcaaaagctggcgtcggtaaccgatgccgaaaacatcaagaaccaggtgctggaaaagctgggcctgaacagtgaagagcaaaaagaagacaccaactatctggatggcattcagggtttgctgaaaaccaaagatggtcagcaactcaatctggataacatcggaacgactccgctggcagaaaaggtgaaaaccaaagcctgcgatctggtgttaaagcaggggctgaacttcatttcctgaaccgcgaaacgccgcgttttagctgttacccggctgacgcggctctctcctgcccttttccctgctcctggacggttttccccctgttacacgggaagcgaccgcgatcaaaaaagtctgtttataaactaattcctaacaacatcgcatttttttgacactagaattgcagcaatatggcgacgccattacattgtgcttctcaaaaagcttaaacgttggctaaacggcccggtttagtgaggatcgcccgttgtcagaactactctctttcgccctttttctcgcctctgtgctgatttacgcatggaaagcgggacgtaacacctggtggtttgcagccacattaacggtgctggggctatttgtcgttttaaatatcaccctgtttgccagcgactattttactggcgatggtattaacgacgcggttctctataccttaaccaacagcctgaccggtgctggcgtcagcaaatacatcctgccgggtatcggcattgtgctggggctgacagcggtgttcggtgcgctgggctggatcctgcgccgtcgtcgccatcatccgcaccattttggttacagcctgctggcgctcttactggcgctgggttcggtagacgccagcccagcatttcgtcagataacggaactggtgaaatcccagtcacgcgatggcgacccggactttgcggcttattataaagagccgtcgaaaactatccctgacccgaaactcaacctggtttatatctacggcgaaagtctcgagcggacctattttgataacgaagctttcccggatctcacgcctgaactgggcgcgttgaaaaatgaaggcctggatttcagccacacgcagcagctgccaggaacggattacacgattgcgggcatggtggcttctcagtgcggcataccgctgtttgccccctttgaaggcaacgcctccgcctctgtctccagcttcttcccgcagaacatctgtctgggcgatatcctgaaaaactcgggttatcagaactatttcgtgcagggcgcgaatctgcgttttgccggtaaagatgtgttcctgaagtcgcatggcttcgaccacttatacggctcagaagagctgaaaagcgtggtggccgacccgcactatcgcaacgactggggattctacgacgataccgttctcgatgaagcgtggaaaaagtttgaagagctttcccgctcaggtcagcgattctcactgtttaccctgacagtcgatacccatcacccggatggttttatctcgcgtacctgtaaccgcaaaaaatatgattttgacggtaagccgaaccagtcattcagcgcggtaagttgcagccaggagaatatcgcggcgtttatcaacaaaatcaaagcgtcaccgtggtttaaagataccgtcatcgtcgtctcttctgaccatttagcgatgaacaacacggcgtggaaataccttaataagcaggatcgcaataacctgttttttgtcattcgtggcgacaagccgcagcaagagacgctggcagtgaagcgtaacacgatggataacggcgcgacggtgctggacattctcggtggcgataactatctcggacttggtcgtagcagtttatccgggcagtcgatgtcggaaatcttcctcaatatcaaagagaaaacattggcgtggaagccggatatcatccgcctgtggaaattccctaaagagatgaaagagttcactatcgaccagcagaaaaacatgattgccttctcgggtagccatttccgtttgccgctgctgttgcgggtttcagacaagcgcgtagaaccgctgccggaaagtgaatactcagcaccgctgcgtttccagctggccgatttcgctccacgcgacaatttcgtctgggttgaccgttgctacaagatggcacaactttgggctccggaactggcactctccaccgactggtgtgtctcgcaggggcagcttggcggtcagcaaattgtccagcatgttgataaaacaatgtggaagggcaaaacggcatttaaagatacggtcatcgacatggcgcgttacaaaagcaatgtcgatacgctgaaaattgttgataacgatattcgctacaaagccgacagtttcatcttcaacgtcgccggtgcgccagaagaggtgaaacagtttagcgggatttcccgtccggagtcgtggggccgctggtccaacgctcagctgggcgatgaagtaaaaatcgagtacaagcatccgctgccgaagaaatttgacctggtgattaccgccaaagcatacggcaataacgccagccgtcctattccggtacgcgtaggcaatgaagaacaaactcttgtgctgggcaatgaagtaaccaccaccacactgcatttcgataacccaaccgatgccgacacactggtaattgtgccgccggaacctgtctcaaccaacgaagggaatatcctcggacactcgccgcgtaagctcgggatcggcatggtggaaattaaagttgtggaacgtgaagggtaattcctgactgatgtgtaggtcgcataaggtgcgacctacacaccttctccggcctacaaaacatcattgagaaacagaaaaaaacagcgcccaacacttccccggacgctgcatggcaactttaataatctcgccttatcagaaagtaattacacccttaatcaactcacgattgttaatcacatcgcgctcgtaggtttctgccagcgtggcgaacggatagcgatgggttaacatcatgtcggcagtgattttcccttctgccatcagtcgaccgactttagcgaaatcttccggcgtggcgttgcggctgcccatcatcgtcgtttcttttttatggaattccggatcggagaactgcaactcacctttaaacaggccgacaaataccaccgtgccgccgtgacgaatcaaattcacggtgttattcatcgcatgttgattacctgtcgcgtcgatcactttctgcgccagcgaaccaccaaactgcgcccgtagctgcgcgtcaaaatcttcggctgacgggtccagtaaaggtaattccagacgcgttgccacatgttcacggcgcgccggactggtatccgccaccaccacctgtgcgccatcggctttagcgattgccgccgcgcccagaccgattggccccgccccgaccaccagcacctgctcgccgggagcaatggctgcgcgacgcaccgcatgagcgctaatagcgaaaggttcaatcaatgcggccgcctgcgggtcaataccgtctgcgggcaaaatgttcgccaccggcacgctcaaatactcactaaaaccgccatcctgatgcacgccaatgactgaaattttttcacagcaattggtacgcccgcttttacacgccgggcattgctgacaggcaacataagggatcacagcaacttgctgaccatttttaagatcagcaatatttttacccagcccaacaatctccccacatatttcatggcctaaaacacgtggataactaaaaaatggttgatttccaccccaggcatgaatatcggtaccgcaaatcccgacagacttaatttttattaatgcttcattgtcacccggaataggtatctcgcgttgtttccagactaattctttcggctgctggcaaattaaaacattcatcgtagacatgattcggctctccattttttgttgccttagatatcaatgaaaatgaaaaatggcagcggaacggaaaatctgttttgtgaaaacacacgcataaaaatgttttaaatcgggttttaatggactcacaaggaggaaaatatgagtcgttcacaaaatttacgccacaatgtgattaaccaggtcattgatgatatggcgcggggtcatatcccttccccacttccatcgcaaagtgcgctggcggaaatgtacaacatcagccgcacaacagtgcgtcatattctcagccacttacgcgaatgcggcgtcttaacgcaggttggaaacgactatgttattgcgcgtaaacctgaccatgatgacggtttcgcctgtactaccgcttcaatgagtgaacaaaacaaagtgtttgagcaggcttttttcacgatgataaaccagcgtcagttacgccctggggaaactttttctgaactgcaactggctcgggccgcgggtgtcagcccggtggttgtaagagaatatcttttaaaattcggccgttataatcttattcaaagcgaaaaacgcggccagtggagcatgaagcaattcgatcaatcctacgccgagcagctgtttgagctacgcgaaatgctcgaaacacattcacttcagcactttctcaacctgcctgatcatgatccccgctggctgcaggcgaaaaccatgctcgaacgtcatcggctactgcgtgacaacatcggcaatagctttcgcatgttctcgcaacttgacagagattttcactccttactgctttcagctgccgacaatatcttttttgatcaatcgcttgagatcatctcagtcatctttcattttcactatcaatgggacgaaagcgatcttaaacagcgcaatatcattgccgtcgatgagcatatgaccattctcagcgctctgatttgccgcagtgaccttgatgccacccttgcgctccgtaaccatttgaattcagctaaacaatcaatgattcgatccattaatgagaacacgcgttatgctcattaagtacggattaaaaacagcaaactattagcgggtgcacggttttatcaaaagataaataccgggaaattcccgcttacctatgctcacaatcagtcgactaaaaatttttttgtgagcggtagtaaagtcctaaaactttaacctgccgttaatgtcaaccttgcgtaattcacaattacgtaaacaattaaaattataaatacaggagtccggcgtggaaaaagaaaatatcaccctcgatccgcgttcttcatttactccatcttcgtcggcagatattcccgtgccaccagatggattagttcaacgcagtacccgaattaaacgcattcaaaccaccgccatgttgttattattttttgcggcggtaatcaattatctcgaccgcagttcgctgtcggtagcaaatttaacgattcgtgaagaattgggattaagtgccaccgaaatcggcgctttgctctccgtgttttcactcgcttacgggattgcgcaacttccttgcggcccactattggatcgtaaaggcccacgcctgatgctgggactggggatgttcttctggtcactgttccaggcaatgtctggcatggtgcacaactttacgcagttcgtgttggtgcgtatcggtatggggattggtgaagcgccgatgaacccatgcggtgtaaaagtcattaacgactggttcaacatcaaagagcgcggacgcccgatgggcttcttcaacgcagcttctaccattggcgttgccgtaagcccaccgattctggcggcgatgatgctggtgatgggctggcgcgggatgtttattaccattggtgtactggggatttttctcgccatcggctggtatatgctctatcgcaaccgcgagcacgtagaactgactgccgttgaacaagcttatctcaatgcaggtagcgtcaatgcccgccgagatccgctcagttttgccgaatggcgcagcctgttccgtaaccgtacaatgtggggaatgatgctcggattcagtggcatcaactacactgcgtggctgtatctggcctggcttcctggttacctgcaaacagcctataacctggatttaaaaagcacagggttgatggcggctatccctttcctgtttggggctgccgggatgctggtcaacggttacgttactgactggctggtcaaagggggaatggctccgattaaaagccgtaagatctgcattattgccgggatgttctgttctgccgcctttacgctgatagtaccacaagcgacaacatccatgacggcggttctgctgattggcatggcactgttctgtattcactttgccggaacatcctgctggggcttgatccacgtcgcagttgcttctcgcatgactgcgtcggtgggcagtatccagaactttgccagcttcatctgcgcctcttttgcgccgatcattactggttttattgttgataccacccactcattccgtctggcactaatcatctgcggttgcgtcaccgcagcgggggcactggcgtacatcttcctggttcgtcagccgatcaacgacccacgtaaagattaatctccttatgcccgataacattttgcttatcgggcattttcatggcgattaaaatgtttcccagttctcctcgctatctgccacggccattttacgcggcgcagctggcgtcacggtttttaccacagccgatgtttcacgctgctgttgctgctgttgctgaatccggaacactgccacagcttcggtcaggcgactggcctgctcttccagcgcggcggcggcagcggcagattcttccaccagcgcggcgttctgttgagttacccggtccatctcagcaaccgctaagccaacctgatcgataccacggctctgctcatcagaagcagaagcaatttcgcccataatgtccgtcacgcgggtcacggcgctgacaatctccgccattgtttccccggcgctttcgaccagcgtagagccaacatccactttccccaccgagtcttcaatcaggcttttaatttcacgagccgcctgagcgctacgctgggccagattacgcacttctcccgcaaccaccgcaaaaccgcgcccttgctcacccgcacgcgctgcttcaaccgccgcgttcaaagccagaatattggtctggaaggcaatgccgtcaattacgctgataatatcggcgattttctgcgaactggtggagatatcgcgcatagtctgcaccacgttatctaccactttgccgccccgttgcgccgtttcagaagcacttaatgccagatggctggcctggcgcgcattttcggcgttctgcttcaccgttgcggtcagttgctccatgctggctgccgtctcttccagcgaagcggcctgttgctcggtgcgcgaagagagatcgttattgccggtggcgatttcgctggcaccgctatagatggcattggccccgttgcgcacatcaccgacggtacgcatcagctctccctgcatatggcgcaaactctctgccagttgccccatctcattagagccatccacctcaatcggtttcaccagatcgccgcctgcaatatgacgaatgctgtcaatcaggcgattcattggcgctaccagcgaggctttaataccgaaccagacggcgaagatgaccgccagtacgacgatcatcacgcccaccagaatccacatcgcctggctgtaggaggcattgttatcgctgacggcgatatcatagagccgatcgttttgctccatgtaagccacatactgcttctcgaaaccgtcctgatatccctgggtcggctgatcaaagaactcgttgattttgcctgcacctaatagttggatcagctccgccagcgcattgtgataaatatcgtaattacgtttgatctctgccgctgcggcggtgctctgacgcgggtcacgcggcaacgcttcgtaatccgcccagtttttttccgcctgtttcagcgaaatactggcactctgcatcagctcagcaacggttgaaccgctaccaatattattctgatccatcatgtagcggatacccgcgcggttgagggtgttacgcgtctgcaacaacgcgacccagctgccattcagcgtggattgctgctggcgaatggtttgtaaaacagtgaaattttctttgtcattctttaaggcattaaagaacagaccgcctgatgtcagttgtaaaaggccaaaaacagccaaaaccagcagtaagctggtcacgatcttgatacgttttaacatggtttctctttcctgtggaccgatgcaagattttcggcctggaaagcaaaaactttatgaaaaggtgtaacccgccatccatggaaaaaccaggcgctggttatcagatactaaaaagttattcattatcgcccgggatgtcttcttgtcgggaattgcccagagcaataaattcctctaacagatgggttaactgttgcattttctcggcagtaaactgagcttcaatctgccgataggcttcttcaatctgtgtctgagcgcggttatacagcgcctgcccctctttggttagcgagatatagagcttccgctgatcattgatcggctttaatcgcaacactaaaccgtcgcgttccatccgcgtaaggatcccggtcaggcttgggcgcaaaatgcaggcgcgatacgccagatcgtgaaaatccattgatgggctttccgccagaatacgcacgatgcgccactgttgctcagtcaaattatgccgtttaacgattgggcgaaaataactcatcgccgcttctcgcgcctggagcaacgcaatggttagagagtcgtgcattatctttcccctgaaaaattcaaaatcattaatatagaaacagttaatcatcacgttaccgggactgcgctgcccctgcaattcttcattttatcaaaattgagcatgttttgttaacttgctgatatttaatattttattatctttaaatgtaaatagtttgttaattagatcacatttacatcacttacttttgccaaactacgcaatcgggaataaaagtaatcattaacatattaatgattaaaatgatcgaatccgaggagtggtaatgaaaggcactatcttcgccgtagcgttgaaccatcgcagccaacttgatgcatggcaggaagcgttccagcaatccccctacaaagccccgcctaaaactgcggtctggtttattaaaccgcgcaatacggtgattggttgcggtgaaccgattccctttccacagggtgaaaaggtactgagcggtgcgactgttgcgctgattgtgggaaaaacggcgacgaaagtaggtgaagaagatgcggcagagtacatcgccggatatgcgctggctaacgacgtcagcctgccggaagagagcttttaccgcccggcaatcaaagcaaaatgtcgtgatggattctgccccattggcgaaaccgtggctctcagcaatgtcgataatctgaccatctataccgagatcaacgggcgtcctgccgatcactggaataccgccgatttacaacgtaacgccgcgcagttgctgagcgccctgagcgaatttgccacgctgaatccaggcgacgccattctgctcggcacgccacaggcgcgcgtggaaatacagccaggcgatcgcgttcgtgttctcgcagaaggtttcccgccgctggaaaatccggtagtggacgaacgtgaagtgaccacgcgcaagagcttcccaacgcagccacacccgcacggcacgctgtttgccctcggcctgaactacgccgaccacgccagcgaactggaatttaagccaccggaagaaccgctggtgttcctgaaagcgccaaataccctcactggcgataaccagacctccgtgcgtccaaacaatattgaatacatgcactatgaagcggagctggtggtagttattggcaaacaggcgcgtaacgtcagcgaagccgatgccatggattatgtcgcgggctacaccgtgtgtaacgactacgccattcgcgactatctggaaaactactaccgccctaacctgcgggtcaaaagccgcgacggactgacgccgatgctttcaaccatcgtgccgaaagaggcgatcccggacccgcataatctgacccttcgcaccttcgtcaacggcgagttacgccagcaaggcaccaccgccgatctgatcttcagcgtgcccttcctgatcgcctacttaagcgaatttatgaccctgaatccgggcgacatgatcgccaccggcacaccaaaaggcttatctgacgtggtgcctggcgatgaagtagtggtggaagtagaaggcgtgggccgcctggtgaaccgaattgtgagtgaggatacagcgaaatgaaaaaagtaaatcattggatcaacggcaaaaatgtcgcaggtaacgactacttccagaccaccaatccggcaacgggtgaagtgctggcggatgtggcctctggcggtgaagcggagatcaatcaggcggtagcggcagcgaaagaggcgttcccgaaatgggccaatctgccgatgaaagagcgtgcgcgcctgatgcgccgtctgggcgatctgatcgaccagaacgtgcctgagatcgccgcgatggaaaccgccgacacgggcctgccaatccatcagaccaaaaatgtgttgatcccacgcgcttcccacaactttgaatttttcgcggaagtctgccagcagatgaacggcaagacttatccggtcgacgacaagatgctcaactacacgctggtgcagccggtaggcgtttgtgcactggtgtcaccgtggaacgtgccgtttatgaccgccacctggaaggtcgcgccgtgtctggcgctgggcaataccgcggtactgaaaatgtcggaactctccccgctgaccgccgaccgcctgggtgagctggcgctggaagccggtattccggcaggcgtgctgaacgtggtacagggctacggcgcaaccgcaggggatgcgctggttcgtcatcatgacgtacgtgccgtgtcgttcaccggcggtacggccaccgggcgcaacatcatgaaaaacgccgggctgaaaaaatactccatggaactgggcggtaaatcgccggtgctgatttttgaagatgccgatattgaacgcgcgctggacgccgccctgttcaccatcttctcgatcaacggcgaacgctgcaccgccggttcgcgcatctttattcagcaaagcatctacccggaattcgttaaacgctttgccgaacgcgccaaccgtctgcgcgtgggcgatccgaacgatccgaatacccaggttggcgcgcttattagccagcagcactgggaaaaagtctccggctatatccgtctcggcattgaagaaggcgcaaccctgctggcgggcggcccggataaaccgtccgacctgcctgcgcacctgaaaggcggcaacttcctgcgcccaaccgtgctggcagacgttgataaccgtatgcgagtcgcccaggaagagattttcgggccggtcgcctgcctgctgccgtttaaagacgaagccgaaggcttacgtctggcaaacgacgtggagtacggcctcgcgtcgtacatctggacacaggatgtcagcaaagtgttacgcctggcgcgtggcattgaagctggcatggtgttcgtcaacacccagaacgtgcgtgacctgcgccagccatttggcggcgtaaaagcctccggcaccgggcgtgaaggcggtgagtacagcttcgaagtgttcgcggaaatgaagaacgtctgcatttccatgggcgaccatccaattccgaaatggggagtctgatatgggtaagttagcgttagccgccaagatcacgcacgtaccgtcgatgtatctctctgaactgccagggaaaaaccacggttgccgccagggcgcgatcgacgggcataaagagatcagcaagcgttgccgggaaatgggcgtcgataccattatcgttttcgatacccactggctggtcaacagtgcttatcacatcaactgtgcagaccattttgaaggcgtctacaccagcaacgagctgccgcattttatccgcgatatgacctacaactacgagggcaacccggagttggggcagcttattgccgatgaagccttaaagctcggcgtgcgggcaaaagcgcacaacattcccagcctgaaactggaatacggcacgctggtgccaatgcgctacatgaatgaagacaagcacttcaaagtggtttccatttcagctttctgcactgttcacgattttgccgacagccgcaagctgggcgaggcgattctgaaagcgatcgaacagtacgacggcaccgtggcggtccttgccagcggttcgttatcgcaccgctttattgacgatcagcgagcggaagaagggatgaacagctacacccgcgagttcgaccgccagatggacgagcgtgtggtgaagctgtggcgcgaaggccagttcaaagagttctgcaatatgctgccggagtacgccgactactgctacggcgaaggcaatatgcacgacacggtgatgctgctggggatgctcggctgggataaatacgacggcaaggtggagtttatcacctagctattcccaagctctggcaccggtcaggttaacgctgttttcccgcttcccgcgtaaggacgttttatgccgcactttatcgttgaatgcagtgacaacatccgcgaagaagccgacctgccggggttgttcgccaaagtgaatccgacgctggcagccacgggtatttttccgctggcgggtattcgcagccgcgtgcattgggtcgatacctggcagatggccgacgggcagcgtgattatgccttcgtgcatatgacgttgaaaatcggcgcaggtcgcagcctggaaagccgtcagcaggcgggtgaaatgctgtttgaactgattaaaacgcacttcgccgccctgatggagagccgcctgctggcgttgtcgtttgagattgaagagctgcatccgacgctgaattttaaacaaaacaacgtgcacgcattgtttaagtagcgcgcagattgcccggtggcgctgcgcttaccgggcctacaaaaccccaaaccgtacaccgtaggccggataaggcgcagccgcatccggcaatgccacaggatatcgctatgttcgataaacatacccacaccctgatcgcccagcgtctggatcaggcagaaaaacagcgcgaacagatccgcgcgatctcgctggattacccggagatcaccatcgaagacgcttacgcggtgcagcgtgaatgggttcgcctgaaaatagccgaaggtcgcacgctgaaaggccacaaaatcggcctgacctcgaaagcgatgcaggccagctcacaaatcagcgagccggattacggtgccctgctggatgacatgttcttccacgatggcagcgatatcccgaccgatcgctttatcgtgccgcgcattgaagtggagctggctttcgtgctggcaaaaccgctgcgtggaccaaactgcacgcttttcgacgtctacaacgccacggactacgtgatcccggcgctggagctgatcgacgctcgctgccacaacatcgatccggaaacccagcgcccgcgcaaagtgttcgacaccatttctgataacgccgccaacgccggggtgatcctcggtggtcgtcccattaagcccgatgagttggatctgcgttggatctccgccctgatgtatcgcaatggcgtgattgaagaaaccggcgtcgccgctggtgtgctaaatcatccggcaaacggcgtggcctggctggcgaacaaactcgcaccgtatgacgtacaactggaagccgggcaaatcattctcggcggttcgttcacccgcccggttccggcgcgtaagggcgacaccttccacgtcgattacggcaacatgggctccattagctgccgctttgtttaaggagagaacgatggaaaacagttttaaagcggcgctgaaagcaggccgcccgcagatcggattatggctggggctgagtagcagctacagcgcagagttactggccggagcaggattcgactggttgttgatcgacggtgagcacgcgccgaataacgtgcaaaccgtgctcacccagctacaggcgattgcgccctaccccagccagccggtagtacgtccgtcgtggaacgatccggtgcaaatcaaacaactgctggacgtcggcacacaaaccttgctggtgccgatggtacaaaacgctgacgaagcccgtgaagcggtacgcgccacccgttatccccccgccggtattcgcggtgtgggcagtgcgctggcccgcgcctcgcgctggaatcgtattcctgattacctgcaaaaagccaacgatcaaatgtgcgtgctggtgcagatcgaaacgcgtgaggcaatgaagaacttaccgcagattctggacgtggaaggcgtcgacggcgtgtttatcggcccggcggatctgagcgccgatatgggttatgccggtaatccgcagcacccggaagtacaggccgccattgagcaggcgatcgtgcagatccgtgaatcgggcaaagcgccggggatcctgatcgccaatgagcaactggcaaaacgctatctggaactgggcgcgctgtttgtcgccgtcggcgttgacaccaccctgctcgcccgcgccgctgaagcgctggcagcacggtttggtgcgcaggccaccgccgtgaagcccggcgtgtattaatgccggatgcgctgcacttatccggcctacactcgcaccaaaccgtaggccggataaggcgtttacgccgcatccggcaaaaagccgtaccaaatcgcggaccggataaggcgtttgtgcgcatccgccataaaccttgtcgtaccctacaaaaatcccattagaggaagaaaaatgagcgacacctcacctgccataccggagagtatcgatccggcgaatcagcataaagcgctgactgccggacaacaggcggttattaagaagctatttcgccgcctgatcgtctttctgttcgtgctgtttatcttctcgttccttgatcgcatcaacatcggctttgccggactcacgatgggacgcgacctcggtctgagcgccaccatgtttggcctcgctaccaccctgttctatgccgcttatgtcatcttcggcattcccagcaacattatgctgagtattgtcggtgcgcggcgctggatcgccaccatcatggtgctctggggcatcgcctctactgccaccatgtttgccactggccccaccagcttgtacgtactgcgtatactggttggcattaccgaagccggctttctgcctggtattctgctgtatttaaccttctggtttccggcctatttccgcgcccgtgccaacgccttgtttatggtagcaatgccggtaacgacagcgttgggctcgatcgtttccggctacattttgtcgctggatggcgtcatggcattaaaaggctggcagtggctgtttttgctggaaggcttcccgtcggtattactcggcgtcatggtgtggttctggcttgatgactcaccggacaaagctaagtggctgacgaaagaagacaaaaaatgcctgcaagagatgatggataacgatcgtctgacgctggttcagccagagggagccatcagccaccacgccatgcaacaacgcagtatgtggcgggagatcttcactccggtggtgatgatgtataccctagcgtatttctgcctgaccaacacacttagtgcgatcagcatctggacaccgcagatcctgcaaagttttaatcagggcagcagtaatatcaccatcggcctgctggccgccgtaccgcagatttgtaccattctcgggatggtctactggagccgtcactcagatcgccgccaggaacgaaggcatcacaccgcccttccttatttgttcgctgccgcaggttggttactggcttcggcaactgatcacaacatgatccagatgctggggatcattatggcttcgaccggatcattcagcgcaatggcgattttctggacaacaccggatcagtccatcagcctgcgggcacgagcgatcggtattgcggtgatcaacgccactggcaacattggttcagcgttaagtccgtttatgatcggctggttgaaagatttgaccggcagctttaacagtggattgtggtttgttgccgcgctgctggtgattggtgcggggattatctgggcgattccaatgcagtcctcccgtccgcgagcgaccccgtaaggaacgacgatgtgtgaccgtcagattgccaatattgatatcagcaaagagtacgatgaaagcctgggcacggacgatgtgcattatcagtcgttcgcccgcatggcggccttttttggccgccatatgctgccacatcgccacgaacagtactttcagatgcatttcctcaatagcggacagattgagctacagcttgacgatcatcgctactcggtggaagcgcccctgtttgtcctgacgccgccgtcagtacctcatgcgtttattacggagtctgatgctgacggtcatgtattgacggtacgggaagatctgatctggcccctgctggaagttctttatccgggcactcgggaaaccttcggcctgccggggatttgcctgtcactggcagataaacccgacgaactggcggcgctggaacactattggcaactgatagagcgggaatcggtagaacaactgcctggacgggaacacaccctgacgttactggcacaggcagtgttcaccctactgctgcgtaacgcaaaactcgacgaccatgccgccagcggaatgcgcggagaattaaaactgttccagcgttttcatatgcttattgaaagccattttcatcagcactggacagtaccggattacgctaacgaactgcatatcaccgaatcacgcctcacggacatctgccgccgctttgccaaccgtccgccaaaacggttgattttcgacaggcagctacgagaagccaagcggctgctgctgttttctgataacgccgtgaacaatattgcctggcaactcggttttaaggatccggcttattttgcgcgcttttttaatcgcttagtcggttgctcgcccagtgcttatcgtgccaaaaaagtacctgtgacgtgaaattcccttagccttaacgggaaaccaggcaccacctgctattcccctttcttcgcctggagcaaggggatttagtaacgttaaaaatcgctaaaagcgacctcgatcacaaaaccgtacccgacctgaaaagtaccagccattgtcccaaaagtgtcttcccgtaatcgcccctgcaagcttcaattgaataacaaaaacaacacacaaaattaacaatcgtattccgattaatactgtagaggtcgacatgaaaccagaagatttccgcgccagtacccaacgtccgttcaccggggaagagtatctgaaaagcctgcaggatggtcgcgagatctatatctatggcgagcgagtgaaagacgtcaccactcatccggcatttcgtaatgcggcagcgtctgttgcccaactgtacgacgcgctacacaaaccggagatgcaggactctctgtgctggaacaccgacaccggtagcggcggctatacccataaattcttccgcgtggcgaaaagtgccgacgacctgcgccagcaacgcgacgccatcgctgagtggtcacgcctgagctatggctggatgggccgtaccccagactacaaagccgctttcggttgcgcactgggcgcgaatccgggcttttacggtcagttcgagcagaacgcccgtaactggtatacccgtattcaggaaactggcctctactttaaccacgcgattgttaacccaccgatcgatcgtcatttgccgaccgataaagtgaaagacgtttacatcaagctggaaaaagagactgacgccgggattatcgtcagcggtgcgaaagtggttgccaccaactcggcgctgactcactacaacatgattggcttcggctcggcacaagtgatgggcgaaaacccggacttcgcactgatgttcgttgcgccaatggatgccgatggcgtgaaattaatctcccgcgcctcttatgagatggtcgcgggtgctaccggctcgccgtacgactacccgctctccagccgctttgatgagaatgatgcgattctggtgatggataacgtgctgatcccatgggaaaacgtactgatctaccgcgatttcgatcgctgccgtcgctggacaatggaaggcggttttgcccgtatgtatccgctgcaagcctgtgtgcgcctggcagtgaaactcgacttcattacagcactgctgaaaaaatcactcgaatgtaccggcaccctggagttccgtggtgtacaggccgatctcggtgaagtggtggcgtggcgcaacaccttctgggcattgagtgactcgatgtgttctgaagcgacgccgtgggtcaacggggcttatttaccggatcatgccgcactgcaaacctatcgcgtactggcaccaatggcctacgcgaagatcaaaaacattatcgaacgcaacgttaccagtggcctgatctatctcccttccagtgcccgtgacctgaacaatccgcagatcgaccagtatctggcgaagtatgtgcgcggttcgaatggtatggatcacgtccagcgcatcaagatcctcaaactgatgtgggacgccattggcagcgagtttggtggtcgccacgaactgtatgaaatcaactactccggtagccaggatgagattcgcctacagtgtctgcgccaggcacaaagctccggcaatatggacaagatgatggcgatggttgatcgctgcctgtcggaatacgaccagaacggctggactgtgccgcacttgcacaacaacgacgatatcaacatgctggataagctgctgaaataacgcagcaggaggttaagatgcaattagatgaacagcgcctgcgctttcgtgacgcgatggccagcctgtcggcagcggtaaatattatcaccaccgagggcgacgccggacaatgcgggattacggcaacggccgtctgctcggtcacggatacaccaccatcgctgatggtgtgcattaacgccaacagtgcgatgaacccggtttttcagggcaacggtaagttgtgcgtcaacgtcctcaaccatgagcaggaactgatggcacgccacttcgcgggcatgacaggcatggcgatggaagagcgttttagcctctcatgctggcaaaaaggtccgctggcgcagccggtgctgaaaggttcgctggccagtcttgaaggtgagatccgcgatgtgcaggcaattggcacacatctggtgtatctggtggagattaaaaacatcatcctcagtgcagaaggtcacggacttatctactttaaacgccgtttccatccggtgatgctggaaatggaagctgcgatttaagctccagccccttcacgcattcgtcgaaggggcatttttattgtgatctcaatcacatatccacccgatgaataattcttgcccaaccgctcaccgccattcctgaccgcttacgtccctaaaataaccactcagttatttaccttactttacgcgcgcgtaactctggcaacatcactgcaggatagcggtcaatttacctcctcaaacgcaacgcaaacctagaacggcttcggcctatgattaacaaattactctatgaattttggtttgcaggaaggcagcaagtgagtgaatccccgggagcttacaacagtaagtgacaggggtgaacgaacgcaactgccgcacctgtaagccaaaagacgacgagtaaaatgccaggttttactatggatacgaaaaaactattcaagcacataccctgggtgattctcggaatcatcggtgcattctgcctcgcggtagttgcattacgtcggggggagcacgtcagcgccctgtggatcgtggtcgcctctgtgtcggtgtatctggtggcgtatcgctactacagtctgtacatcgcccagaaggtgatgaaactcgaccccacgcgcgcgacgcctgcggttattaacaacgacggtctgaactacgttccgaccaaccgttacgtgttgtttggtcaccacttcgccgctatcgccggtgctggtccgctggtcggtccggttctcgccgcacagatgggctacctgcctggcacgctgtggctgctggcgggggtagtgctggccggtgcggtacaggactttatggtgctgtttatctcctctcgccgtaacggcgcatctctcggtgagatgatcaaagaagagatggggccagtaccggggactatcgcgctgtttggctgtttcttaatcatgatcatcatccttgccgtcctggcgctgattgtggttaaagccctggccgaaagtccgtggggtgtcttcaccgtttgctcaaccgtaccgattgcgctgtttatgggtatctacatgcgctttatccgtccggggcgtgtgggtgaagtctctgtcattggtatcgtgctgctggttgcctctatctacttcggtggcgtgattgctcacgatccgtactggggtccggcactgacctttaaagacaccaccattaccttcgcgctgattggctatgcgtttgtttccgcattgctgccggtgtggctgatcctcgcaccgcgcgactatctggcaaccttcctgaaaatcggcgttatcgtcggcctggcgctgggtatcgtggtgctgaacccggaactgaaaatgcctgcgatgacccagtacattgacggtactggcccgctgtggaaaggtgctctgttcccgttcttgttcattaccatcgcctgtggtgcggtatctggcttccacgcactgatctcttccggtacgacgccgaaactgctggctaatgaaaccgacgcgcgtttcattggctacggcgcaatgctgatggagtccttcgtggcgattatggcgctggttgctgcgtccatcatcgaaccgggtctttacttcgcgatgaacaccccgcctgctggccttggcatcaccatgcctaacctgcatgaaatgggtggcgagaacgcgccgatcatcatggcgcagctgaaagacgttaccgcacacgcggcagcgaccgtcagctcctggggcttcgtgatttcgccagagcagatcctgcaaaccgcgaaagacattggtgagccttctgtcctgaaccgtgcaggtggtgcgccaacgctggcggtaggtatcgctcacgtgttccacaaagtgctgccgatggctgacatgggcttctggtatcacttcggtattctgttcgaagccctgttcatcctgaccgcgctggatgcgggtactcgttctggccgctttatgctgcaagacctgctgggtaacttcatcccgttcctgaaaaaaaccgactctctggttgccggtatcatcggtactgcgggctgtgtgggtctgtggggctacctgctgtatcagggcgtggtcgatccgctgggcggcgttaagagcctgtggccgctgttcggtatttccaaccagatgctggcagccgtagcgctggtactgggcaccgttgtgctgattaagatgaagcgcacccaatacatctgggtaactgttgttccggctgtatggctgcttatctgcaccacctgggcgctgggcctgaaactgttcagcaccaacccgcagatggaaggcttcttctacatggcaagccagtacaaagagaagattgctaacggtactgacctgacggcgcagcagattgccaacatgaaccacatcgttgtaaacaactacaccaacgcaggcctgagtattctgttcctgattgtggtgtacagcatcatcttctacggtttcaaaacctggcttgcggtgcgtaacagcgacaaacgtactgacaaagaaactccgtacgttccaatcccggaaggcggcgtgaagatctcttcgcaccactaaccgtgtttagccccgcttcggcggggctttgttcttatcagagtgaactatgtttggtaacttaggacaggcaaaaaaatatctcggccaggcggcgaagatgttgattggcattccagactatgacaactacgtcgagcatatgaagaccaaccatcccgacaagccgtacatgagctatgaagaattcttccgcgaacgccagaacgcacgctacggcggcgatggtaaaggcggtatgcgctgttgttaatggagagagcatgaacccgattgcagttaccctactcaccggttttttaggcgcgggcaaaaccaccctgctgcgccatattcttaatgaacaacacggctacaagattgccgtgattgaaaacgaattcggcgaagtctccgttgatgatcaattgattggtgatcgcgcaacgcagatcaaaacgctgaccaacggctgcatctgctgttcgcgctccaacgagctggaggacgcgctactcgacctgctggataatctcgacaagggcaatattcagttcgatcgtctggtcattgaatgcaccggcatggccgatcctggcccgattattcaaacctttttctcccatgagattttatgccagcgctacctgctggacggcgtgattgcgctggtggatgcggtacatgccgatgagcagatgaaccagttcaccatcgcccagtcccaggtgggctacgccgaccgtattctgctgactaaaaccgacgtcgcaggcgaagcagaaaaactgcgtgaacgtctggcacgcatcaacgcccgtgcaccggtctacaccgtcacccacggcgacatcgacctgggtctgctgttcaacaccaacggttttatgctggaagaaaacgtcgtcagcaccaaaccgcgtttccattttatcgcggacaaacaaaacgatatttcgtcgattgtggtggaactggattacccggtagatatcagcgaagtttcccgggtgatggaaaacctgctgctggaatcggcggataaactgctgcgttacaaagggatgctgtggattgacggcgaacctaaccgcctgctgttccagggcgtccagcgcctctacagcgccgactgggacaggccatggggcgatgaaaaaccgcatagcacgatggtgtttatcgggattcagttgccggaggatgagattcgggcggcgtttgcgggactcaaaaagtaaccagccctccaacatcacaatacctgagactttatcaccctcatattcctccagaatatgagggcattcgggcttaattatctctgaacgtgcaacacttcctgcgactccttatgcgcctccacatcctgcttcgttaaccagagcgacttacgaccaaaattttcgtacattttcagctgatcttcatagtgcttatcaactgttccatcgggagcaataaacccactctgaccgggtgcgaccacatcccaggcaagcacaggacgatcgcttgtcgttggtgagaaaacaatcatatcgttttctgttccacggttttgatactccgcctgatgacgcgtttcttccgctgcggcctgcggtacaccaaagaaattatttgcccggaacgttaaggccattgcaggtgttttccagttactcacattattgccatagcgtttggaaagagtctcccaggtatcttccagcgcagccaacacaacctcctgctgtggtttcccagcaaacagatcaaccgcctgtgggattggtgatttgtctccctgcaccgcctcatacaaaatttttgctccaacacttatattcagcgaaccagttgggccgtcctgggttgtttcgtagccactggcgctgtaccacttatcaaatggcataggtacggcagccactacggtacgcttcaacatactggtcagccaaacgttcaggatggcagagcctggctgctgccaggttttaccatcatcattaagcaaattgatgccatcccaacgtgttaatgtatccaccaactgacggcgcggatcgctctgtgtcaaaccagatgtcgctgcttgcagagtaggtaaaaaaagcctcaggttaagatcctgacgactggtttggcgaataacatcccatgcctgatcagcagttaagcgtggcttttgctcaagcagtcggtcgatctccgtaacgcgatctgccccccccacaaaaaggcaaacagatctgaagcgggataatctttttggggagaattgttccagttagcaatatatcccgactgggggttatacaccttagggttcatttcaaaaggcaatagccctttccagtcccattttcccgtaccaggaacgggtaatcgcggatcatggcctgattgacgatctggataagcaccagtatgaacataaccaatattgccgtttacatcagcatagtaccagttgatggtcagtgcttgtttcgctgcctgctgtgtccactcctgccaatttttggccttcatctgatgagtccaggccagcaaagacgccacctctttaccatcccatgcgcgggatttagcgtaagccgtttgtgtcgtctggtcagtttggagaatgttgccatgcaccgtacgccagacagtaaaggtctctgcctgaccatttttcaccgtaatggtttcctcacggcttaacattttcacccacttaccattatgcaagtagtagcctggtttctctgccgacagccgttcagcaaaaatatcgacatcatcgccgaaacctgccgttgatccccaggaaatcacaccattatgaccaaaaaccagcccaggataggcaaatggtgtattgccagtgacatcataaccagcaccgtgcagaccaataccataagtatacgcaggcgcataccagccaaactgcggaccatttaccatgattgctttcgcatcctgggctttgcttttgccgatcacccacatattgctggtcgttggataccccgccagaccattggcaccaccctgtgcaaattgtgcagcaatagtttcccggttcttccctgctgttaacgccagcagtgcgccatccgccccttttgctggtcggtcaagcattggtgcaggtaaatcgtagcgtggcaacagagctgctgtttgcgagttttgctgattaaatttaagtgggtagttactctcttgtacggcaatagtggttggcgctgatgggtttaccagccatttcaactgattaaataccgccatgccttgtgatacaccatatttatcttttaaagccgttagcagtgccagattatcaatttcgctagtgctatcagagaagcggtttgccatggtgcccacaaatatcatcgcgacatcaaacggttcccagcgcttaggagtaaagccaaatgtattaaactgttttggtaagagcgtctctggattggtatttaccttatcaatccaggcattcattccatcagcgtagccttgcagaatggacatatcctctggggaaagggcagcaatttgcgcccggatagcatccggccagtagttacgacggatatctttatcaaatttcacaaaatctttgccaagcacttccgcgacagtcccttgagtactgcgacgtgccatttccatctgaaaaaggcgatcttgtgctactacatagccatagccataaaataggtgccatgtatcattggcataaatatgcggcatgccgtattcatcgcgaacaatctttatctcacttgacgactgctcagccagtgcaggtaagctccaataatacatcagggaagcagtaacacagttcacgatcatacgatttctatttttcattgtatcctctggcaggtgtataattagcgaattgatactagcaacgaagcttcggttatctatttgcagagaattgtttcattatgaactgtgagcgcgataactaatttttgatacaaaaatttcattaatgtgatctaaaacgaatcgctttattcaccgctgatgattttgttctattcctttttgtgacagatcccccggacgcatagatgatgacccccagagagacagctcaggtcattatctgtatgtaaatcagaaaaatatgttgtaaacgacttttatggttggattttgtagcaattttgaatgcagacaggcagcatttgccaacacgccgcccatagttcactccacatcctccctgcgtaacccaatatccctcaaccgttcatcactcatctgctgtaacactcgtcgggtctgcatttgccgccgccaacgcctcaccgcatgccagagttgcacaagtctgataaacggcgttttggctttgttttcgtgaaattccatctgctgcctcctcatctttcagaggcttcatcatccaccttctggcagttcacaatacagatgcaaatattagttttatttaacatacagacaggttaaaacagcatctgcatccggttttttagcctcatctgtaccggtttttctttctgtatgggccaaataaggaatacagcatgacgcgttatcaacatctggcgactctacttgccgagcggattgagcaagggctgtatcgtcacggggagaaattgccgtcggtgcgcagcttaagtcaggagcacggcgtcagcatcagcaccgtgcaacaggcgtatcagacgctggaaacgatgaggctcatcactccgcagccgcgttcgggttattttgtcgcacaacgtaaagcccagccgccagtgccgccgatgacgcgtccggtgcagcgcccggtggaaattacccagtgggatcaggtgctggatatgctggaggcgcatagcgacaattccattgttccgttaagcaaaagcacgccggatgtcgaaacgcccagcctgaaaccgctgtggcgtgagctaagccgggtggtgcagcataatctgcaaaccgttctcggttatgacttgttagccggtcagcgagtgttgcgggagcagattgcccgcctgatgctcgacagcggctcggtggtcaccgccgatgacatcatcatcaccagcggctgccataactcgatgtcgctggcgttaatggcggtgtgtaaaccgggcgatattgtcgcggtcgaatctccctgttattacggttcgatgcagatgctgcgaggcatgggcgtgaaagtgattgaaatcccaaccgatccagaaactggcatcagcgttgaagcactggaactggcgctggaacagtggccgattaaaggcatcattctggtgccaaactgtaataatccgctgggatttattatgccggacgcacgcaaacgggccgttctctctctcgctcagcgtcatgatattgtgatttttgaagatgatgtctacggcgaactggcaacggagtatccgcgcccgcggaccattcattcctgggatatcgacgggcgagtgctgttgtgcagctcgttcagtaaaagcattgcacctggcctgcgcgtgggctgggtcgcaccggggcgatatcacgataaactgctgcatatgaaatatgccaccagcagctttaatgtaccgtccacgcaaatggcggcggcaacgtttgtgctggaaggtcactatcatcgccatatcaggcggatgcggcagaactatcagcgcaatttggcgctttatacctgctggatacgggaatattttccctgcgaaatctgtattacgcgcccgaaaggcggatttttactgtggatagaattgcctgaacaggtcgatatggtctgcgttgcgcggcagctgtgccgcatgaatatccaggtggcagcaggctcgattttctcggcttccggcaaataccgtaattgtctacgcatcaactgcgctttgccgctcagcgaaacctatcgcgaagcactaaagcaaattggcgaggccgtgtatcgggcaatggaataaattcgaattagtggcgaagcacctgatttcctctcacgaatcgcctgtaactcgttgtatctttgcagggtcatcgccacgttccagcatggcttaggcaaagtgtgcttcgttcataccggatgcggcgtgaacgccttatccggcctacaaaccgcgcaaattcaatagattgcagaggaaatgtaggtctgataagcgtagcgcatcaggcagctttgcgtttgtcatccgtctctgattagtattcgatccatggatcgcgcttgatttcaggcaagggctgctctaatgcctgcatttgctctgtcgaaagtccggtaatcttttgtatccattcaggatctgccccattctgcaacaacaatctaaggaggcgttgttccccttcttctttccccttttccatccccaacagccatccatcattataaattcgctctgcaatcgtcattattcgctccctgtgttgtggcattcgacgggtaagttcgctgataaacgccttaaaacgcgcttcatcgccagtcagtaaaatgtaatttaacagcgcagttatctggctgtcattagcacactctgtaaccagtaatactaccagttggtcaataagccccatcagatcgcgctggcgaatatgcttttggatcaactccaacagggcgactctgcgatgctgcacaatctcgtcgtctggcacgacagtgacatccaccagcgggaacgctgcgctataaagtttccgtgcggtggtcggggcggcaaattcgtccagccagcacagggaccaggggtaaggactacggctaccgtgataaaacagcatcgggataaccagcggtagcggccggcgtttatcatgctcgatatggcgctgcatcaccgccatggaatatcgcatcaggcgaaacgccatatgaatatcctcgcggctctgatgttcaatcactacgtaaatataaccatcaccttcacgggtctttaccgaccacagaatatcggagtgtagcgcccgcaatttttcatcgacaaagctggcggattccagttttaagctgtcgagatcgcacagttcacgtaaatctttaggtaagtggatctccataaaatcccgcgcggtgccagggtgcgtgagaaaggacttaaataatgcgtcatgcggcgtgctggtcgagaagtttgtcatggcgatccgtcacctgtagataagatggcccgactttagcggctaacaaaaccattctcacccggcaatttcccgttccccgaggcgctttccaggctatttttattcttctgcaaacgatacattttttcggaaacaggctcgcgttttacatttcctgtacccggcagatattcccctttccaccgcactcttttgattaaccgcaaattttaattacacttaaggtgtatattttctatgcaacccatcaattaaagaggtgtaatgtgctgatgactatttgtaatcgttatacattctgacctggagtcagaaggtatttctctgtctgtgtgttcacaggcagtgtggttgattacatgaaattcagtacatttgtccttctcgcctgcctttcgtcattaccgacggtattgaatttcgttttccccattggggttctccggacaaggagttgtttgttatgccacgtttttttgcccgccatgccgccacgctgtttttcccgatggcgttgattttgtatgactttgccgcgtacctgtcgacggatctgatccagccggggatcattaatgtggtccgtgattttaatgccgatgtcagtctggccccggcagccgtcagtctctatctcgcgggcggtatggcgttacagtggctgctggggccgctttccgacaggattggccgcaggccggtgctgattaccggggcgctaatatttacccttgcctgcgctgcgacaatgttcacaacgtctatgacacagtttcttatcgcgcgtgcaattcagggcaccagtatctgttttattgccaccgttggttatgtcacggtgcaggaggcgttcggacagacaaaagggatcaagttgatggcgattatcacctccatcgtactgattgcgccgattattggcccgctttccggcgcagctctgatgcactttgtgcactggaaagtcctttttgccatcattgcagttatgggttttatctcatttgttggcttactgctggcgatgccagagacggtgaagcgcggcgcggttccatttagcgccaaaagcgtctttcgcgattttcgtaatgtcttttgcaatcggctgttcctctttggcgcagcaaccatctctttaagctatatcccaatgatgagttgggtggctgtctcgccggtgatcctgatcgacgcgggcggcttaacaacttcgcagttcgcctggacacaggttccggtgttcggcgcggtgattgtcgcgaatgccatcgtggcgcgtttcgttaaagatccgaccgaatcgcgctttatctggcgtgctgtacccattcaactggtcggcctcgcgctgttgattatcggcaatctgctgtcaccgcacgtctggctgtggtcggtgctgggcaccagtttgtatgctttcgggattggtttgatcttcccgaccttattccgctttacgcttttttccaataacttaccgaaagggaccgtctccgcatcgctgaatatggtgatcctgatggtgatgtctgtctcggtcgaaatcggccgctggctgtggtttaacggcggtcgcttgccgtttcatctgttagccgtcgtggcgggcgttatcgtcgttttcaccctggcaggattgcttaatcgcgtgcgccaacatcaggctgccgagctggcggaggagcggtgatttttgcgcgatcctgccgtcaggctctattcttaacgttatgaataaactcattgaactcagacgcgccaaaatgttggcgctctctttactgcttatcgccgctgctacctttgtcgttacgctgtttttgccgcccaatttttgggtgagcggcgtgaaggcgattgctgaagcggcgatggtcggcgcgctggcggactggtttgcggtggtggcgctgtttcgccgcgtgccgattccgatcatttctcgtcatacggcgattatcccgcgtaataaagaccggattggcgaaaatctcggccagttcgtgcaggaaaaatttctcgatacccagtcgctggtggcattgattcgacgtcacgaaccggtgttgctgattggcaactggtttagccagccagaaaacgcccgccgcgttggtcagcatctgttgcagatcatgagtggttttcttgaactgaccgatgatgcgcgtattcagcgcctgcttaagcgcgcggtccatcgggcgattgataaggtcgatctttccggaaccagtgcgttgatgctggagagtatgaccaaaaacgatcgtcatcaggtgctgctcgatacgctgatcgcacagttgatcgcccttctccagcgcgataaatcgcgcaagtttattgcccagcaaattgttcgctggctggagagtgagcatccactgaaagccaaaattctccccaccgaatggttgggcgaacatagcgcggagttggtttctgacgcggtgaattctttacttgatgatatcagccgtgatcgtgcgcatcagatccgtcatgcgtttgatcgcgccacttttgccctgatcgacaagttgaaaaacgatccggaaatggcagcgcgagccgatgccgtaaaaagttatctgaaagaagatgaagcttttaaccgctatctcagtgaattgtggggggatttacgggagtggctgaaagcggatatcaacagtgaagattctcgtgtgaaagaacgtatcgcgcgggcgggtcaatggtttggcgaaacgttaattgccgatgatgccttgcgggcgtcgttaaatggtcacctggaacaagccgcgcaccgcgtcgcgcctgagttttccgcattcctgacgcgccacatcagcgatacagtaaaaagctgggatgcgcgggatatgtcgcggcaaatcgagttaaatatcggcaaagatctgcagtttatccgtgtcaacggtacgctggttggcggttgtattgggctaattttatatttgttgtcgcagctcccggccttgttccccctcggcaatttttagaaatccatgaaaaactaagtggctaaccgcgagagagatcaaataaaccacactaaaagaatggtaataatgtggcctcttttcattatctcccgtggtacggggaaggaaaatcatgtcacttatcaccgatctacccgccattttcgatcagttctctgaagctcgccagaaaggctttctcaccgtcatggatctcaaggagcgcggcattccgctggttggcacttactgcacctttatgccgcaagagatcccgatggcagccggtgcggttgtggtttcgctctgttctacctctgatgaaaccattgaagaagcggagaaagatctgccgcgcaacctctgcccgctgattaaaagcagctacggcttcggcaaaaccgataaatgcccctacttctacttttcggatctggtggtcggtgaaaccacctgcgacggcaaaaagaaaatgtatgaatacatggcggagtttaagcccgttcatgtgatgcagttgccgaacagcgttaaggatgatgcctcgcgtgcgttatggaaagccgagatgctgcgcttgcaaaaaacggtagaagaacgttttgggcacgagattagcgaagatgctctgcgcgatgccattgcgctgaaaaaccgcgaacgtcgcgcactggctaatttttatcatcttgggcagttaaatcctccggcgcttagcggcagcgacattctgaaagtggtctacggcgcaaccttccggttcgataaagaggcgttgatcaatgaactggacgcgatgacagcccgcgttcgtcagcagtgggaagaaggccagcggctggccctgcgtccacgcattttaatcaccggctgcccgattggcggcgcagcagaaaaagtggtgcgcgcgattgaagagaatggcggctgggttgtcggttatgaaaactgcaccggggcgaaagcgaccgagcaatgcgtggcagaaacgggcgatgtctacgacgcactggcggataaatatctggcgattggctgctcctgtgtttcgccgaacgatcagcgcctgcaaatgctcagccagatggtggaagaatatcaggtcgatggcgtagttgatgtgattttgcaggcgtgccatacctacgcggtggaatcgctggcgattaaacgtcatgtgcgtcagcagcacaacattccttatatcgctattgaaacagactactccacctcagatgtcgggcagctcagtacccgtgtcgcggcctttattgagatgctgtaaggagtggcagtgacatattcgattggcattgattctggttctaccgccaccaaagggatcttactggcagacggcgtgattacgcgccgtttcctcgttccaacaccctttcgtccggcaacagcaattactgaagcctgggaaactctgcgcgaagggttagagacaacgccgtttctgacgctcaccggctatggacggcaactggtggattttgccgataaacaagtgacggaaatctcctgtcatgggctgggcgcacggtttcttgcgccagcaacgcgcgcggtaatcgacatcggtggtcaggacagcaaagtgattcagcttgatgatgacggtaacctgtgcgatttcctgatgaatgacaaatgcgcggcgggcaccgggcgtttcctggaggtgatctcgcgcacgcttggcaccagcgtcgagcaactcgacagcattaccgaaaatgtcacgccgcacgccatcacgagtatgtgcacagtgtttgccgaatcagaagtgatcagcctgcgctcagcgggcgtcgcgccagaagcgattctcgccggagtgattaacgcgatggcgcggaggagtgccaatttcattgctcgtctctcctgtgaagcgccgattctgtttactggtggcgttagtcattgccagacgtttgcccggatgctggaatctcatctgggaatgccggtaaatacccatcctgatgcgcaatttgctggcgcaattggcgcggcggtaattggtcaacgagtgaggacacgccgatgaaagagtttttatttttatttcactccacggtcggcgtcatacaaacccgcaaggcgttgcaggcagcgggcatgacttttcgcgtcagcgatattccccgtgatttacgcggcggctgcgggttatgcatttggctgacctgtccccccggcgaggaaatacaatgggtgatccctgggcagactgagtcaatttattgccagcaggatggtgtctggcgctgcattgcacattacggggtttctccgcgttaaggattcattaaggtcgctacgtatacttctcgatatcttattgatttgccttaaagggattaccgtgacaaaaagtatttcgttaagtaaacgcatctccgttattgtgattctttttgccattgtggcagtgtgtactttcttcgtgcaatcttgcgcccgtaaaagcaatcatgcagcatcatttcagaattaccacgccaccattgacggcaaagaaattgcaggcataacgaataatatctcttcgctgacctggtcggcacaaagcaatactctttttagcactatcaacaaacctgccgccattgttgaaatgaccaccaatggtgattttatccgcacaattcctctggattttgttaaggatctcgagacgatcgaatacattggcgataatcagtttgtcattagcgatgagcgcgattacgccatttatgtgatttcactgaccccaaactcggaagtaaaaatcctcaaaaaaataaaaatcccgctgcaagactccccaaccaattgcggttttgaagggttggcttattctcgccaggatcacactttctggttttttaaagagaaaaatccgattgaggtctacaaagttaacgggctgttaagtagcaatgaattacacatcagcaaagacgaggcactacaacggcaatttactttagatgatgtgtccggcgcagaatttaaccagcaaaaaaatacgcttctggtgctgtctcatgaatctcgcgcactccaggaagtaaccctggttggcgaggttatcggtgaaatatcactaaccaaaggtagtcgaggtttgtcgcataacatcaaacaggccgaagggattgcgatggatgcctctggtaatatttatatcgttagcgaaccaaatcgtttttatcgctttacccctaaatcatcgcattaacaggctggcatatttcacctttttgttattaacttgttaacaacaaaaatgacatacaaggttaaacatgccttcgtcctcgcatcccgtagaacgcttttctttcagcaccgcgcttttcgggatgctggttctgaccctaggtatgggattaggtcgcttcctttatacgcctatgttgcccgtcatgatggcggaaggggcgttttcatttagccagctctcgtggattgccagcggcaactatgcggggtatctggctggcagtctgctattttcgtttggcgcatttcaccagccgtcgcgcctacgcccatttctgttggtttctgccctggcgagcgggttgttgatcctcgcaatggcatggttgccgccatttattctggtgttattgattcgcttcctggcgggtgtcgccagcgccggtatgctgatttttggttcgacgctgattatgcagcacacgcgccatccttttgtgctggcagctttgttttctggcgttggcattggcattgcactgggcaacgaatatgttctggcaggcctgcattttgccttatcctcgcaaacgttatggcaaggcgccggggcgctttctggcatgatgctgattgcacttacgcttttaatgccctcgaaaaaacacgccatcgcaccaatgccattggcaaaaacggagcaacagataatgagctggtggttactggctattctgtacggcctggcaggatttggttatatcatcgtcgcgacttacctgccgctcatggcgaaagatgcaggctcaccattgttaaccgcccatctctggacgttagtcggcttatcaattgtgccaggctgctttagctggctatgggcagcaaaacgttggggggctttgccttgcctgacggcgaatttgctggtgcaggctatcagtgtgctgcttactctcgccagcgactctcctctcttgcttatcattagtagtatcggttttggcggtacctttatgggcacgacatctctggtgatgactatcgcccgccaactgagcgttccgggaaatctcaatcttttaggctttgtgacgctcatttacggcattggacaaatcctcggcccggcgctgaccagtatgcttggcaatggaacatcggcgcttgccggcgccactctctgcggcgcggcggcgttgtttattgctgcgcttatcagcacagtacaattatttaagctgcaagtggtcacttcatgaggagtgtttcccttaccactcaagaaattcgaccgcaaccgttgatgtcagccagactccgttttccgcttgccagaaagggatgcctcgtttcgccatttcctgtgctttgacggttaagataaccggcgatccgtgtcttgctcacactttgcgtgccgttgcttcatcagcagagagatgcacgtaatgacgctcccctgcaatcagcccctgtttttttatctcgtcaaggaaacggcttgccgtaccgtggtaaagaaactgtggcggtgttttttcggcaaaggaaatagcgacctgcgaagtcgaatgcccctgaaccgcgcggatgcacctaccatcactggaataactaaaacgctttttatcactggtggcgaccacggtatccagcaatgtacgggttaatcgcttgcccgctttttgggcacaaagtatgagcttatcgatatccgcccatccttcacggtcaagtacgataccaatcgcctccggtttgtgtcggaggacaaaacttaaaaacttgctcgtatccgccaactctttttcgttgtactttgccatctcgttttcgtccctggattttctgtttttatttactgatgtcattgtcactgggtttatgaattttctgcaactcaatcctgcgcagagccttttccacacagcataatttttccgctatgcaaaaaacgcatagccagaaacatacttgcattttccccatacccacatggctgataaggtttttccgctccaggaattttcctggctcaagcaacacacaaacacaaaaaaacaatggggattgttatgacacaacaaggggatgctgtagccggggagctggcgacagaaaaagtgggcattaaagggtatctggctttttttctcaccataatctttttttccggtgttttttccggaacagacagctggtggcgcgtttttgatttttccgttctgaacggatcgtttgggcaactgcctggtgcgaacggagccaccacctcatttcgcggggcgggtggcgcgggggctaaagatggctttctctttgcgctggagctggcaccgtcagtcattctctctctggggattatttcaattaccgatggtcttggtggattacgcgccgcgcagcagttaatgacacctgtgctaaaaccgttgttgggcattccagggatctgctcgctggcgctgatcgctaacctgcaaaacacggatgccgccgccggtatgaccaaagagctggcgcaggaaggtgaaattaccgaacgcgataaagtgattttcgccgcatatcaaaccagcggtagcgccatcatcaccaactacttctcttccggcgtcgcggtgtttgcctttctgggcacgtccgtaatcgtacctttagccgtcatcctggtgtttaaatttgtcggagccaacattttgcgcgtctggcttaacttcgaagaacgtcgcaacccaacgcaaggagcgcaagcatgacaactcaggtccgcaaaaatgtcatggatatgtttatcgatggtgcgcgccgtggctttactatcgccacgaccaacctgctgccaaacgtggtgatggcgtttgtcatcattcaggcgctgaaaattaccggcctgctcgactgggtggggcatatctgtgaacccgtaatggcgctgtggggattgcccggtgaagcggcaaccgtccttttagccgcattaatgagtatgggcggcgcagtcggtgttgccgccagtctggcgaccgccggcgcattaaccggtcacgatgtcaccgttttactgcccgcgatgtatttaatgggcaacccggtgcaaaatgtcggtcgctgcctggggacagccgaagtgaatgccaaatattacccgcatatcattacggtctgcgtgattaacgcattgctgtcgatctgggttatgcagcttattgtttaacaaggagttaccatgattgattataccgcagccggttttaccctgctgcagggagcgcatttgtatgcgccggaagatcggggaatttgcgatgtcctcgtcgctaacggcaaaattatcgccgttgccagcaatatcccttctgacattgtaccggactgcacggttgtcgatctcagcgggcagatcctctgtcctggttttattgatcaacacgtccatttgattggtggtggcggcgaagcaggtcccacgacgcgcacgccggaagtggcgctaagtcgcctgacggaagcgggcgtcacgtcagtggttggtctgctgggcaccgactctatctctcgccacccggaatccctgctcgccaagacccgtgcgctcaatgaagaaggcatcagcgcctggatgctgaccggcgcttatcatgtcccttcccgcaccattacgggttccgtggaaaaagacgtggcgattatcgatcgtgtgattggcgtgaaatgcgccatctctgatcaccgttctgccgcaccggacgtttatcacctggccaatatggcggcagaatcccgcgttggcggtttgctcggcggtaaacctggcgtcaccgtgttccacatgggcgacagtaaaaaggcgttacagcctatttatgacctgctggaaaactgcgatgtgccgatcagcaagctgctgccgacccacgttaaccgcaacgtaccgttgtttgagcaggcgctggagttcgcgcgcaaaggcggcaccatcgatatcaccagcagcattgacgaaccggtcgcccctgccgaaggtattgcccgcgccgttcaggcgggtattccgctggcacgcgtcaccctcagctccgacggcaacggtagccagccgttcttcgatgacgaagggaatttaacccatatcggtgttgcaggttttgaaacgttgctggaaaccgtgcaggtgctggtcaaagactatgatttcagtatcagcgatgccctgcgcccgctcaccagtagcgtagccggtttccttaacctgaccgggaaaggtgaaattctgccaggcaatgatgctgacttgctggtcatgacgccagaactgcgcattgagcaggtatacgctcgcggcaaactgatggtcaaagacggcaaagcctgcgtgaaaggaacgtttgaaacggcttaaacggttgtcagccgcccgaatggacgtagaatgcccgcaagggcggctgacagagtaaaacgtaatggatgactgtggtgcgattttgcataatattgaaaccaaatggctttatgattttctgaccctggaaaaatgccgcaatttttcccaggcggcagtcagtcgcaacgtctcgcaaccggcattcagccgccgcatccgtgcgctggaacaggcgattggtgttgaattgtttaaccgccaggtaacgccgctgcaactctcagaacaagggaaaatcttccattcgcagatccgccatctgttgcaacagttagagagcaatctggcagagctgcgtggcggcagcgattacgcgcaacgaaaaatcaagatagccgctgcacactctctttccctcggtctgttaccgtccattatcagccagatgccgccgctctttacctgggcaattgaagccattgatgtcgatgaagcggtcgataaactgcgtgaagggcaaagtgactgtattttttcctttcacgacgaagatttgctggaagcgccgtttgaccacattcgcttatttgaatctcaattgttccctgtctgcgccagtgacgaacacggagaagcactttttaacctcgcgcagccacactttccgttactgaattacagccgcaactcctacatggggcgattgattaatcgcaccctgacgcgccacagtgagttaagtttcagcaccttttttgtctcttcgatgagcgagcttttaaagcaggttgccctcgacggctgtgggattgcctggctgccggagtacgccatccaacaagaaattcgcagcgggaagctcgttgtactgaatcgggacgaactggtgatcccgattcagacctatgcataccggatgaatacccgcatgaatcccgttgccgaacgcttctggcgtgaactgcgcgagctggagattgtgcttagctgacattctccagcgtcgcactgcgccaaccgccattatcccagaccagatcaaacgttagcggttcatcgtcgtggtacagcattatctcaaggctgatcgccagagtgtggcagtacgcttctttaaaattaacctgcaacgccgcaatccgtggctcatgaaataacagtgcagaacgcagctgacggcaataccagctctggagatgtttgtcgctctggttatgcacttgccactcgggcatgcctgaaacaagtaatgacggtaatgccgaatgaggagaattaaaaagagtgaggagatcgctgcataccgatttacgcagcaatgacgttttattgcctgaaatttcaggtaaaacagcctgaagtgattggcgcatcattttgcgcactcctgacgtttagcaacatatgcggcttgccctgaacaccgggcaccactgtattgatgctcattttccatagccattcccttttgttcattacatccatgtcagtctgagacaggcctgaatcctgtcagcaaagtataaaaccttacttgcctatgaatatctactgacttttcaggaaaaaagtcatgatttgataaaaatcatcaaactcaaaaaaaaaccgctagtatattctgaatattccgaatagttatgtagatgaaaatacttgtcaccgccgctacttaattccggtgggaaattatttatttccgcataatcagccatgtattatttgaaacaattagtttgtaaataatataaattgataacatatcaaatacatcaaaaataccattcacaggcattattaatatagacatcaatatagcaacatcaaattccaattagtaataagatatgctttttaattgcatgcaaataattttaaatgagcgttttttgatactttagagtgtttcctaccctttaatatcaccatgtagagttgatatcactacaacagaaacatgcatgtcatttgtttacttcttttttactacagaaaaatttatctatttttctaaacatcagtgaaatactcataaaaggtaactattatgtctatgccattaagcaatgcccttcagagtcaaattattacagataatcacttccttcatcatccaaaagtcgacagtgagttaacacgtaaatatgaacgtgcacgcctggataaggaaaatatctatcttctgcctcttgctcgtggcaataaccataattacgatggaaaaagcgttgtcgaaattagaaaacttgatattagtaaagagccctggccatttaattatgtgacagaaacatgcagagaattcaatggtattacaacaacaggacgtatgctctatcgaaacttgaaaatcacctcagctttagacgaaatatatggtggcatatgtaaaaaggcgcatgctaccacagagttagcagaaggtttacggctaaatttatttatgaagagccctttcgatcctgttgaggactatacagttcatgaaataacattaggccctggttgcaatgttcctggttatgccggaaccacgataggatatatttcaacccttccagcttctcaggcaaaaagatggaccaatgagcagccaaggattgatatctatattgatcagataatgacggtaacaggggtagcaaattcttccggattcgcccttgccgcattacttaatgctaatattgagttgggtaatgacccaataattggtatagaagcctatcccggtaccgcggagatccatgcaaaaatgggatataaagttatcccgggtgatgaaaatgcaccactcaaacgtatgactctgcaaccgtcatctcttccagaactgtttgaattaaaaaatggtgaatggaattatattggtaaataactaccaggaagaatgagtactaacattcaggttatacagatagctaaacaataccctgcaatttacaaagtaatactcattgcgacttcttaatttaagaaagcgcaaggaacgtttacccttgcgcttattataataagtcaggcgtcgactttatccagcggccatgaatcaaacagatagccatcaaaataaatatcgtcaacgttcgagaattccagcagacgttgcttaacgttttccagatgctgccacattgccagcttcgccgctcgggcatcttttttgattaacgcggcgaggatctgtttgtgatcgcccaaccactctttgcgatacaggctgtcatccagatggctgtgcaactggatccacattggattgttttcccgccactgccaggactgacggaacagctccaccagcatgctgttatgcgttgcttcggcaatagcgagatggaactgcatgtcaccgctttcgctgctgcccggcgcactggaagccagttcacgctcttccagttgcaatgcctgacgcattttgacgatatcttcgcgggtagcctgcaaagcggcaaactcggcgatgttgctctccaataactgccgcgcctgtaacagctcaaaaggaccggcatcgttgcagacgttggcatccggactgtctgtgttctggctgcctgagttatcaagaacatagataccggcaccccggcgtacttccaccagccctttgatctccagcatgatcagcgcttcacgtaccaccgtccgcgtgacatcaagcatttctgcaatttcacgctccggcggcagccgttcgccaggattgtacggcgtctttatgatcagatcgcggatcatcgccccgacttcctggtaaggtctttgcgcagaggtggcagatttcatggtgttgtgtccgttaggtgcggttaatcaaatttttgccggatgcggcgtgaacgccttatccggcctacaacgggcaattttacggcccccgttaatctcaaactataccattagcactggaagttggcacgtacaggtgggcaaaaaaacgaaaactggtcaaccaaatatcagtttgattgaccagtaagtctgtagggtaatcagttagttacagcgcagccacacactcgcgcgcaccgcgttcgcacagctgctgatatgccgccgtcactgcgccaacaaagtcggcattctgcggcagatcatcggcaaaaataccgctcaggcccagcagcgctttcacgcggtctgcgccctgatactgcgcgttgatcttctggaactccgccagcatcgggtcgaccacgtcaatgacattaccctgctcatccacgccctgggtgtaacgcatccagccagccacgcccagcgccaggtgacgccagctaccgccgttttgcaggtgcagacgcaccggatccagcagacgctgcggtaacttctggctgccgtccattgcaatctgccaggtacggtgacgcagagatgggttgctgaaacgctcgatcagcagcgtcgcataggcgttcaggtccgtaccttccggcatcgacagcgttggcgcttgttcctgcatcatcagggcaaaggccgctttgcgataatccgggttagtcatggtgtcggcaatagtttcatagccgccgaggtaaccgaggtacgccaggaaagagtggctgccgttcagcatacgcagcttcatcatttcgaacggcacaacgtctgcaacgaactgtgcgcccactttatcccagtccgggcgaccattaacgaagttatcttcaatcacccactgacggaacggttcgcaggcaatggcgcacgggtcgtaaacacccagctggtcagcaatttcctgtaaggtttctggcgtcgccgccggaacgatgcggtcaaccatggtgcatgggaaggtgacgttctcttcaatccatgccgccagctgcggatcgcgtgcctgagccagtcccagtaccgcgaccttcgccacatgaccgttttcacgcacgttatcgcaggacatcaccgtaaacgctttcaaccctttttcacgacgcagacgcaaggcttcgacgatgtaaccaatcgcggacttcggcgcagtcgggttttccagatcgtgcttgatcagtgggttattgagatccagttgaccgcttgccgcatcagcgcagtagcctttttccgtgaccgttagagagacaatcgccgtttgcggacgcgccatcgcgttgagaataccttcgcagccatcgatttccggatgcagcgcttctttcatcgaaccgataattttcagctcggtgctctctgcgcctttttccgctacggtgtacagcagttgctgtgttttcaggttttcgatcagcacgcggtcgttgcctggcatcaggttaacttcgcagatgccccagtcgctgtcggtgctttccagcagatgatgggtatacagcgcctggtgcgcgcggtgaaacgccccgcaaccgagatgcacaatgcgtgattccagacgagaatgatcccatgacgggcgggcaaccggcagattgctgtcaacaatagtagtcatcgtaaactccagaatccgtcttcaaagagtgacggcaaggaagaaggaaccggcacggcgcgcagccatgccggtggatattaacggctaaagaaagcgcgctggatcgccagttcgacaccgcgaacttcggccaggcctttcagacgaccaattgcggagtaacctgggttggttttcttcttcaggtcgtccagcatctgatgaccgtggtccggacgcatcgggatcaggtcttctttgccttccgctttacgacggtgttcttcttcaacaatcgctttcaccacttcgtacatatcaacgtcaccgttcaggtgcgccgcttcgtggaaggttttcgggttatcttcacgcatggtggagcgcagatgggtgaagtaaatacgcggaccgaactgcttgatcatatcaaccagatcgttgtcagcacgcacgccgtaggaaccggtgcacatggtaaaaccgtttgccatgctgtttacggtatcaaccatccactgcatatcttcaatggtggaaacaatgcgcggcaggccgaggatcgggcgcggcggatcgtccgggtgaacagccatacgcacgccaacttcttcggcaaccggaataatcgctttcaggaagacggcaaagttttcgcgcagtttggctttgtcgatatctttgtacagctccaggtgcttacggaactggtcgagggtgtacccttcttccgcgcccggcagaccagcgatgatgttacgggtcagacgcgctttgtcttcgtcgctcatagtggcgaagcgttcagctgcctgagcaatttcttcttcggtgtaatccgcttccgcgcctggacgtttcaggatatgcatttcgaatgcagcgaattcgatctggtcgaagcgcagagctttggagccgtctggcagcacgtattcgaggtcagtacgggtccagtcgagcaccggcatgaagttgtagcacacggtgcgaatgccacactgcgccaggttgcgcagagtctgctgatagttagcgatccactgctcatagttgccagtgtgggttttgatatcttcgtgaattggtacgctttctacgacagaccacaccaggcctgcgtcttcaacgatcgccttgcgtttgaggatctcttctacggaccatacttcgccgttcgggatatggtgcagcgcggtaaccacgccagttgcgcccgcctgacggacatcagctaaagaaaccggatcgtttgggccgtaccagcgccaggtctgttccatgatttttcctctttcacatagtgggttccacagcaaagagacgcggaaccctggagttgtttaggtatccggatgaacaaccagaccgcagccgtggcgttgcatcggatgagatggcgtataagttctaccttttggtaagacatgtcaacccgaattctgaaattggttaaccacatcacaagaatttcactctcctggttgttgctgcaaattgcagcaaaaggttatcgatggttattgatcagaggatgtgacattcatcgcaacaatggttgaccaatttacataacatgtcgcccaaaataacaacggttcaaccaggtaaggtaaaacgttatgcatgtgcttaacattctctgggtagtattcggtatcggcctgatgctggtactgaatttgaagttcaaaatcaattcaatggtggctttgttggtggcggcgctgtccgtcgggatgctggcgggcatggatttgatgtcgctgctgcacactatgaaagcgggcttcggcaacacgctgggggaactggctatcatcgtggtgttcggtgcggtcatcggtaaattgatggtcgactccggcgcggctcaccagatagcgcatacgctgctggcgcgtctcggtctgcgctatgtacagctgtcggtgattatcatcggcttgatttttggtctggcgatgttctatgaagtggcctttatcatgttagcgccgctggttattgttattgccgccgaagctaaaattccgttcctgaaactggcgatcccggcagtagcagctgccactaccgcacattcactgttcccaccgcagccgggtccggtggcgctggtgaatgcttatggcgcggatatggggatggtttatatctatggcgtactggtgacgatcccaagtgtaatctgcgcaggtctgatcctgccgaagttcctcggcaatcttgagcgcccaacgccatcattcctgaaagcagatcaaccggtagatatgaataatctgccctctttcggcgtttcgattctggtgccgctgatcccggcgatcattatgatctctaccaccatcgccaatatctggctggtaaaagatacccctgcctgggaagtggttaactttatcggttcctcgccgattgcaatgtttattgcgatggtggttgcattcgtactctttggcaccgcacgtggtcatgacatgcagtgggtgatgaacgcttttgaaagcgcggtgaagagtattgcaatggtgattctgatcatcggtgcgggtggcgtgctgaagcagactatcatcgacaccggcattggcgacaccatcggcatgttgatgtcccacggcaatatctcgccctacatcatggcatggctgatcactgtgctaattcgtctggcgacgggtcagggtgtcgtttcggcgatgaccgccgccgggattataagtgctgcaatccttgatccagcaaccggtcagctggttggcgtgaatccggcgctgctggtgctggcgacggctgcgggttccaacaccctcacccacattaacgatgcatctttctggttgttcaaaggttactttgacctgtcggtaaaagacacgttgaaaacctggggtctgctggagctggtcaactccgtggttgggctgattattgtgctgattattagcatggtagcgtaaaagaacaccagagcctgccaatggcaggctcagttcggattgtcggcaaagtgcgctttgtttatgccagatgcgacgctgacgcgtcttatctggcctacaaagggctaacgtgcaggtttttagcttcaggtaatattgcgtacctgcattagcaatgccctgtgatttctttattgataaacaaaagtcacgccaataatcgattgcacattccctgcagtcacctgccctccggtacgtgcgtaatttgccgttaatcccagacttaccgccgaagttcctactgctcctaacgataccgtgttattcgctggaataatcgtaccgttgcgcgtcaactgtacgccgacgccctgcgctggtgaaaacgacgcggtattggtgaaaatcgagttgcccgcatctgcggttgtgccggagaggtaataccccaggttttggcttttcgcacaataaacggtaagaggaattggcactgaaccagggtagtccggcagagtaacggtgacatcacgagcagaaacatcgcagccgccagtaggcaccaccacatcattattggcgtaaatattccacacaaactggaaatcatcgctgttatagttgttagtctgtcgcaaaataagcacggcaattaatgagccagctttaatcgccaccccgcctgcactgctcacaggcgtcaaataaagcgccaccggccacggcttatccgttctcgaattataaacaacgcgcggcgtttcactggtggtcggaaatggatagctactgccactatattttacggtcccggaaaaattagataacacgccaccataagccgagcctcgttgcagtgtgacatagtctgtaatggtttctgggtaatcgttatggcaaaagatttgcgtcgaaagatccacgaccaggttttgccccacattcacggcgggcgcaaggtttacataaacattggcgctgccaccgccaatagggatagcggtaccattggcggttttacaggcgaatgaccaggcatttaccgaccagcccatcagcagtacagcaaacagggtaataactcgtttcattacaatcatctcttcgggttcagctgtaggtataggtgatgctaatcactgcctgaatggttccctgagtggctccgccatttaccgtcaatgctctgacctgtaacgggaagtgcgctgattgtgaggaatcatccacctgaactgttttggttgcgccagtattcaatgtgttgccactgtcatcctgtagctctaactggatgttttgcgcggtcccctggtttttataatatccggtactgtcggctgccccgctgaagctggcagtgaccctcgacgttcccaccggacaattagtcaactcaagcgcaacatcatgccaggccgatgccgccccggcagacatcagactgaaagaataaagatcgccgagatcaaccgtggcattggtggtggaaactgtgcacggtttggcgacgaccttaccgttcaccgtgatggtgacatcggctgcctgtatcgtcgcacttgcgagcgccaatattgccgccaatacatacccacgtttgcaccatttcatgagcatctccagttactgatattcaagagtgaaggtagccgtggcattgatatgccctgcagtgacaggcacctgtgtcgccattagccgggcgtaaaaattcagcgtatttggtttacccggcgtcagggtcgtccacgaaagcgcggacgatggagcattaaggggtatttgattttgctgctcattcagaagctgtattcccagtcccgaagccgctgataccgtattttcaagtgcaagcaggttggcattgtggctatctgcaacgccggtaaacccaacctttacggcagaaacggcgttaccacagggtgacagcaaaatacgaaatggaacgacaggagtcgttgcgccaatgttgttaaattgcttcgccgcgttttccatcagatcaacagtaaaattggttgattcagcggccacactacagccgttatctctgacatagccgcggatagtaatcgtgctatccgcagccaaaacgcgacttaccgccagccacaaaaaagcgcacagaagataaaaaggtttgtttctcatcacgcccccttaacgacattcagctgatagctgggttaataactgctgctgactctctggtggcagttgataattggcgatacagtgagcattttcctcttctccccatttcacctgaacttttcccgctaaaggcattccgctgaggtaaacctgaccattatccgcaacaatgccgctactctggctactctctgatgtcaccatcgccccaaacggcagcggcttattattgtggcttagcgtcatgagcagttttatcccaacgcgcgctttaaactctgctcgcacgatcgccccacgagtgggaacaacgttagcgaccgcgttatctaaatcgacgttatcagccagggtattggtatccagcgccactctattttcccgatattcagtggcataaggcagcacggcataaccacgccagtcggtacgcacccccgtctggttttcgacttttgcatcttttgcgccaggcgctttaacaagcaccaccgtatcgtttaacggctgccccagcgttacgccattggcatgagccagtaccccaccgctgactccgtaatagagctgcttaatatcatcactatggctgtaaccgatattggcattgccgtaaccaccgcgataattcagcgtggcgtagcctgtgcttccgctattaccatcgcctcccccggcatagccggtttgcacgctatagctgaggttgttgtcttccagcaacgtaccgtatacaccagccagattggtcattcgaccgttgagatcgtgtgacatgctgtagctggcactggcatgtcgccactgagatttactgtcagaacgcagccagtggctgaaaggaatattgacgttaagcgctaacatctgatcacgtcctttttgccaggcgtttttcgtcaggctatagctgagcgtccagttgatatcttcgaacgcagtatttaatccagcctggaattgctcatcgacattactcgttccccaataagtttgatggctaccactcaaatacagtgttgatgagcgcccgagttgctgagtaacggtgagctgtaatttcccgcgtttgttataagcgaggttgtaatagtcggtgaatttcggcttaacctgaataactccatcctgtgtttcgatgttgtagccattcattcgactgtatgttgtatcagcgaaattaaaatatccgctggtcgaataacggtaacccactaactgaatattcgtgcctgactcattgagcgatttgttatagagaaaacgcaccgattgtccgtcatgctgactgtcatcgggaagtgtggaattagcctgcgtcatatccacagacagagcgcccagtgcccccatgtttttcccgataccgaaattaaaagcacgataacgatccgccagttgcgttccaccatatattgtccagccagccggaaggccgtggagtaatgtactctggaaaaagcggggtttttcctgctgcgcatttccactacggtattctcctgccgtaatggaataacgagtatgcccttcacgttgcaaaagcgggactgacgaatagggtacagtaaaaatctgcgtgctgccgtcagcctctttgatcgttacctgcaagtcaccactattacctgcggcatagatatcgttgatggtaaaaggccccggtggcaccgtactattataaatgtcatacccattttgtttaatagtgacctgtgcagtaccacgagcaataccgtggatcaccggggcaaatcctctttggctatcgggtaacatattgtcatctgaggccaattgtacgccgcgaaagttaataccatcgaaaatatcgccctgagtataaccatcacccagcgtcagccgggaacgtaacggtattatgtctcgctcaagccaggtattgatatgctgccatttatttttgctacctgatgatctgtcgctactgttataactccaggtggtattgtcgcgtaaacgccacgcaccaatatttaacccactctgtaggtttaaatatgcataatggctgttacccccaatccgattctgtacactatttccgctgaaattataattgagcaatccggcattaataccgggatcccataactcaggaggaatataaccacgcgcgcgattactcataaatgcctgagggatgagctggccccctgaaataccagacagtagatgtatcttaaaataagagataggcttggatatatgtctaacactagttctaattttgagatggctggcgttttgttaggaaaagaggtgcgtaaa

SEQ ID NO: 30 - DNA, 94634 bp, Escherichia coli
  source 1..94634: mol_type = genomic DNA
tctgagacaacatctggcaaggctgggacggaagtcactgtcgttctcaaaatcggtggagctgcatgacaaggtcatcgggcattatctgaacataaaacactatcagtaagttggagtcattacctgagaataatacctcctgggtaagtgagcagatactttcagcgcctccgaaagatgtaaatattcgacttggagtcggttctttagaaggtacaaccgtctcacatgttcagcgattgcatcattcgttaatcgcagctggtttggaaagtaacctcactgtctataccggtggtcacgattatgcctggtggcgcggagcaattattgatgaattagcaaattataattgcaggaaggtatcaaataataactctgtgtaaaatatcgttttatcgtcagataactctttctgcaatattattatgggagactatctcatttatttagtgatgtccttcatttatgtgatgaaggacattatattactcataacatttctcgttgaaaatttcagcaatacgctacaattgtttcccgttgttttttaattttctcatcaaaacctctgcaatctctgcaggactgggttgttcagccatttcagcggctacctgatctgaacagaagcgtagtgaatcatcataaagaaggcgatttaccaaatcactggtcagtccatgcttgtccggaataatcccacacccacgcttcgcaacaatttctgcattaacagagcgatctgcaccttcgccaaacacaatctgtggtattccactatacagcgctgtcagggtattacctgcgccaccgtgatgaataaatccatcagctccattaaggaatacacccataggtatccagtcaaccagacgtacatttgatggtagttttcgtaaaccagtacgagcatttattgcaagttgcaaaatgatatcagcatcaacttcatttgcagaatccataacccatgaaatcagctccagaccatcaaccattggttttacagtgccaaggctgataagtaaacgtttccgatcagaatccctgtcccaccatgtttcctttacagcacctccgttataaggaatatatctcattgagataaccggttctccagcatttttaagaatgctcatacttgggggagcaacatcaatccatgctaaatcacatagtggaccgctgactccatgccgcctgtaagcattgcttaaagaacggtttaacatctgaatatgggcagatgtatgcgcgaatccaacagccagcatcactgaaggaattctatatttagcagcaaccaatgggcctgccggatcaagagggggatagactattaaatctggcctccattttcctgcaaaatcgatgaggttatctgccatttcatcgctaaaaaaagagaaatgaccaataatattactttttttcctcaactcttcctgatggcgatatccagcctctgaatctaaacctggaactgcatcaaaaacaaccagtccagcttctgctgctttattcgcgaatttgccagcgctactaattactacatcatgtccaattacacgaaaggcctgagccagagaaatcaatgggtataacaaaccgtacagcggtgggccaataaaaagaatacgttttcgcattaaaaaagtccgtcttctgcttacctgtttatttttctatctctaagaaaacataattaatattatttttatgtgagcttatgcacaaaaataaccaagtatattatcttctggtagagattcaggatacagtttgtaggagctttcttttttgaacaatgatttgcaggacagttatgctaaactagcggaatcagtatcacaacaataaatgactgatcatacctgaaatttgaattaacaggcatcatgaatgtcaatagtctaagcggtgactacttatatcgcttgcataaatactaaacactgactagaaaagtattggataaccccgtcactaaaagtaacgcttcggttatttgctcggaatgtattaacgccaagattgttagccgttacgccttatatcactggcgctgacaaatgtttcttttctaatttactgaaccggcgcagacacgcaggaaagcacgccggcaccggtgtaatgccagttctaatcaataagaatggaatgacgaatcagtcaggaagggataacaacccgctgctgaacggaaggtatcagcaggaagatgaacgggaatatcgccagcaccaagggcagggccgggttccacaataccagcgctggcattttgcacattgccagcgtaccggcattacaacacgtttcatgctgctgccccccaggattcctcgattcgttgctacatccactgctctacttcacttccactgctccacttcacttttgtaccagcggctgctgcgccccagtttgatgggtttagggaaatggccttcactgatcaacttgtaaaaccatttgtcggtcataccggtgaaactggtgatatagttcatgtcgatcagggaattatcggcacgcagaaatacgctgtcgtggcttgttgtagtcaacatggtcagaatgtcctgtgagatttatgaagattgtgcgaatgcgggaaatctactgagctgtgctttcagaactggcctgttacgggataccagggattaccggcggggtaacgggcttccggatcatacacaccacgattatcgcggacaaaatcactgaacgcccatatcacctctttaagtatgtcttcgcagtccggtaaatgacgatccagcgccacatcccgggtggtacagctttgatgcgcccggtgacacaaagcccggattgttccagacatcctgaatcaaacgccccagattaggggcgtcgaaatatgcctctctgaccattatattccggcgtataggtagcaggtctgaagtgacaatgcgtcacctgacgttaaaagtcacccaagatgaccccagtgggggcaacaagtataaaaccgttttttgattaagtggtcggatatgaaaaggggaaggtttatgtgaaaaatacctgtgttttctttgaaaacacacaacagtatcaggttatttatgtttatacagtgcgttccaaactgacctgaataattacgcaagttgcaacaataaaacatttttgccgtagtgtgaggtactccggtaaattgcttcccaggtgcagacaatgactaacgaagaactacaggcaatcgcattatccatgcttgagcgccagcgcgaaaaagtacaccagcaacgagagtctttgcttaacccatctccattcaccaggccaaaacgattggagcttgaagcattcttggacaaatacccacggcggcttaaatcaggcaaaaccagaccaccaggctgatagctcacagtttgttctccgattcaataaaacggataagaaccatcagcgcggtagcgtaaggcactacagcgcattgctttacgagtaataacaatggatttatcaccagaagacgcaaagtttttacgagaactgcaacatcgtatgctcagagaagccattatcgaacagcaaacgggcatgagcgccatagacccattgcgatacaaacgggcctcatctcctttagttgacgacaattccaatgcggataaaacacgtccaccacactgattacatttttcattagcacagtggtgtgatgcagcatacgaggaaaaccggatgaatgagaacaaaataaaaaggctggagcaactgttacaggcacgccaacgggagtttgccacggctttgttgaataaataagatttcgtgcgaacgaccctgtagctggctggattttcaggcaatacgcacgctttctggcatcccagcctttgtcatcctgttcaacgcacgcaccatggccatagctnnnnnnnnnnnnnnnnnnnnnnnnnnnnnnnnnnnnnnnnnnnnnnnnnnnnnnnnnnnnnnnnnnnnnnnnnnnnnnnnnnnnnnnnnnnnnnnncacggctttgttgaataaataagatttcgtgcgaacgaccctgtagctggctggattttcaggcaatacgcacgctttctggcatcccagcctttgtcatcctgttcaacgcacgcaccatggccatagcttccgctacctgaccatcgtagtcacgcagcgtcagtgaatctcccaacaactgcttcattctgtacattgccgtttccgctatcgagcgacggttatattccgttgtccatttccaccgtgcattgcttccgctcagccgctgattagcaacggcacggttgcggtctgcgtactcaccgggccagtaacctgctccttttcggggaggaataagcgcgctgatttttttgcggcgcagttcatcgtgacagagccgggtatcgtaagccccgtctgccgcggctgccctgatttttctgtgagtctgccggataaggcccgggaaggcttctgagtccgtgacgttattcagcgacaggtctgcacagacaacttcatgtgtgttgctgtcaacagcaagatgcaactttcgccagatacgacggcgctctttgccgtgctttctgactttccattcgccttcaccaaagaccttcagcccggtggaatcaatcaccaggtgtgcgatttcaccccgggtggacgttttgaaactgacattaaccgactttgcccgcttactgacactggtgtaatccgggcagcgcaacggaacgttcatcagggcaaaaatggaatcaataaaaccctgcgcagcccgcagggtcagccggaatacgcgtttaatcaccagaacggtggtgatggcgagatcagaatagcgctggggccttcctcgtgatgaaggcgttgccgactcataccaggcctgaatcgcctcatcatccagccagaaagtgagggagccacggttgatgagagctttgttgtaggtggaccagttggtgattctgaacttttgctttgccatggaatggtctgtgttgtcgggaggatgcgtgatctgatccttcaactcagcaaaagttcgatttattcaacaaagccgtttgccactaaatggggacgtgccgcgctgccacatgaacgcctaacctattttccacttgaagacctcattaaaaataatggcaaaaaaatcaggtctgataagaaacacttcttagaatgcaatgaagacaaataacaacaatctgcatattgccaccaaccacagatgtggcatcgttatcagcgcacttgattttctttatatccactgacgagtttgccggtcattctggtatcatgcagatatttacggcgtacaagcacactagcatgacattgtaataaggcctgagcctaacgctttaatgtgtgtcatacactcagtggcgtaatcgttgacaatatggtgcatgtaatcgtaagcgtccagcgaaatccatctggtcataatctgaagcatccgacaaagtggtgtccaccaaataagtgatctgcgcccaatatcctgagccggaactttgacaaaggccaacgaaaaatgggagcggatgttacagagttcccggtacaggggaaaagtggtacctgtcgccagttctccgatctgtttaaccgggaaattatctcctacagcttgtcagaaaggtcggtgatggagcatcgttaatacgatgctatacgatgcattcacagtgcccggccagaggatgccccgtcgctgcatatggatcagggttggcaatatcgaattgcaggctataggcaaagttaaagccccatggagtagcacaaaatatgccgcacaaaggaaacggtctgaataacgcagtgatgaagaacttcttcagcacactgctaaaacgcatagtgatcgagcgctgattctggcgaacaactgaactaatacatcagaatctgcattatgttaaataaatataaaaagatggtttaaataccccgttacttttgacttacactatacggtatcgcatcgtttaatattcgcaccggccagatttttatttctattagttgtcacaatactgaatgcgtacgaccacagtattctggctcctgtgtggttatgctttaattctgcgttccgggcagataagcagttgcttgcaggaatccttcttgtgttaatgtcagttccccttttaccagtgctgatttccacattccgtccaacagagcttatagcctttccctggattatagcattgtccggctgaagttctttttgaataataatagaagcactgctggcagatccagtccgtttttcataacccactgtactgataaccataatctaatcagtagaaattgagtcgaaaataagcactactccatacaggataattagaggtcagtttgattattcacaattcatcatcagcattttctatttctgacgaaatcaatatgaaaataaccatatatgataattattataataacggctttaattggaatacatatattacaacgtattatatataattggtattctgggaactatattctcaaaatacagtagaaacgaggtatgtttctggtggaaaggacagtgggattaaaaagtaagaattgataaaaaaaacgccagcaacacatagtgccggcggagggaataccccatggagaaaatgtgatgcctagagcatcatgaatatataattaaaaatagttagcgttgtcaatactttcacaaaaataattttcgtagtatagaaagatatttttatgcatgacctacctgaatttgctccgggtagaggttataaataaaaattgaatcacgacaaacacaatattcatagtatggcgatgcctacgccagcaagaatagcgccaataatattgggaatataatagacaccagacgcacaggcatctcactccttaacaaacaacaatcaggatatttacttttaccaagctaactgtttacacccaaagtacacacaattaaccattcaataacaaatggcaatatccatagccatacgactttaccttgtaatgttcggtatttctttataattattctgggaaatctaacatttatttttaaaatcaaattatcttgttgtttaaaaataagttcacatactttatcatcttcttccgccatcaacatctctgcatacttaaacatttcagaacgttcctttagcacagaagagtaattatatgtccagttcccaggcaataatgcttatggatatttaattcataatttagagaatattttgcaataatatttggcagtattcagaaatacctgaaaaatcatactatacagccctagggaatggataaagattctaacaaagcatttcaacaatatatacttgttaaaaatccatatcgaaatgccgttgcagcattaatatatgcctcattcataaaatgtaaaagagcaagctcgtaccagtaggggggaaattcattgacatgtcctgtcaatacgtacagagccctgccatgcttgccagcacgtaacaattccgcccccagtaaccagcgtgttccctgattattctcagggttatatgttagtattttatcaatgagtataacggcatcctgatgacgctgtaaatgaacattcgccagaattgcagcataaagagcgcaaatgcatatgccagatgagcgtgaatatcaatgatgtcaggagcatgtcaggcaagacgcctgagtttgttgacgtaatttgtttcgtttatttcatcactatcgtatgcgtcaagagttttttcaaactcatcccgaaatgggccaagcctggtttcaggaaataagaaatacccttggttattgttcacttaaaagtataatttgtaattcaaatcctgagcctgtaaagcggggagtaacatattctattctgaagagaataaaagtcgtgatgcgatgtatcaagcccggattgtaatcccagattaacatagatcacaaaacaacttattcttcactaacgtcaagataaatatcgttgtatgccttatcacgactacgaataccagcaagatacaactgacatacggaaagataccacgttttttactcccgaaaataacgctaaaaagctacttccccatcgtttgtccttagtattgccagcgccaacaatgtgggctgacatgataaagctgtctaggaaattgttcgcctcctcagcggacaatccaaatggtgattgtctctgttaaacgtttattttgaaggtcgactgaataaggtgatgacgctgtagaatttttcacgtgccacagaattttgaacgctttctcttacaatatttcaatgtttctatcagtattcgccggaagaagtcatcgaccaaatcatcccagtcgtctcgcatcactgaccattcatggttgacatgtggtggaaatccgcttctacagtaaccattttttattcgcaaaaccgaacacgccatacggatagctgttaactggcatgccgaggcagtcgttatttatatttggttttgtcaataatctttattttttgtaaaaggcaaatataaattattctcattattgtttgtatttgtgtattgtcttgccggttaacatgatcggagattagtaatatgcgaataaccactctggcttccgtagtcattccctgtctcggattttcagccagcagcatagctgctgcagaggatgtgatgattgtctcggcatccggctatgagaaaaagctgactaacgcagccgccagtgtttctgtgattagccaggaggaattgcagtccagccagtaccacgatctggcggaggctctgagatcagtagagggtgtggatgttgaaagtggtacgggtaaaaccggagggctggaaatcagcatccgaggaatgccagccagttacacgctgatactgattgatggtgttcgtcagggcggaagcagtgacgtgactcccaacggtttttctgccatgaataccgggttcatgccccctctggccgccattgagcgtattgaggttatcagggggccgatgtccacactgtatggctctgatgcgatgggcggtgtggtgaatatcattaccagaaagaatgcagacaaatggctctcttccgtcaatgcagggctgaatctgcaggaaagcaacaaatggggtaacagcagccagtttaatttctggagcagtggtccccttgtggatgattctgtcagcctgcaggtacgcggtagcacacaacagcgtcagggttcatcggtcacatcactgagcgatacagcagccacgcgtattccttatcccacggagtcacagaattataatcttggtgcacgtcttgactggaaggcgtcggagcaggatgtgctctggtttgatatggataccacccggcagcgttatgataaccgggatgggcaactggggagtctgacggggggatatgaccggaccctgcgctatgagcgaaacaaaatttcagctggctatgatcatactttcaccttcggaacatggaaatcgtatctgaactggaacgagacagaaaataaaggtcgtgagcttgtacgcagtgtactgaagcgcgacaaatgggggcttgccggtcagccgcgggagcttaaggaatcgaaccttatcctgaattcattactgcttacccctctgggagaatctcatctggttacggtggggggcgagtttcagagctcgtccatgaaagacggagttgtccttgccagcacaggtgaaactttccggcagaaaagctggtcggtatttgctgaggatgagtggcatctcacggatgcacttgcgctgactgcgggcagccgctatgaacatcatgagcaattcgggggacacttcagtccgcgtgcatatctggtctgggatgtggcagatgcctggacgctgaaaggcggtgtgaccacgggatataaggcacccagaatggggcagctacataaagggattagtggtgtgtccgggcagggaaaaacaaatctacttggtaaccccgacctgaagccggaagagagcgtcagttatgaggctggggtgtattacgataaccccgccggtctgaatgccaatgtcacaggttttatgactgacttctccaacaagattgtctcttattccataaatgataacaccaatagctatgtaaacagcggaaaggcccggttgcacggtgtggaatttgccggcacattgccgctgtggtcagaggatgtcacgctgtcactgaattacacctggacccgaagtgaacaacgtgatggtgataacaaaggtgcgccgctgagttatacccctgaacacatggtgaatgcgaaactgaactggcagatcaccgaagaggtggcatcatggctgggtgcccgttatcgcgggaaaacaccacgtttcacccagaattattcgtcactgagcgctgtacagaagaaagtgtatgatgagaaaggagaatacctgaaagcctggacggtggtggatgcaggtctgtcgtggaagatgacggatgccctgacgctgaatgctgcggtgaataacctgctcaacaaggattacagtgacgtgagcctgtacagtgccggtaagagtacgctgtatgccggtgattacttccagacgggatcatcaacaacaggatatgtgatacctgagcgaaattactggatgtcgctgaactatcagttctgataataacaaaacgctatcactgacggtagaatacgttgccactgcaactcctggcggaacagtggcaacgtattaggttaagtgcatttccgatccgctaatgagatttcgttaccaacaactaatatcgtcacaggaaatgcacggattatttttaacttatcatttacatacttgtccagagtgtaagcgcaccgtgaaggacgtggggtaaaaattagtttacagagagagtgacgttccagggcaacaactctttcatgcggttggcaggccaggtgttgattacactgatcacgtggcgtagccacgtttccggctcgattccgttaagttttgcagctaccgatcaggctgtacatcactgccgcactatcgctcgtcatctcaaagtccggtctcgtcagcaggaaggtatcattctctcccgccatttttccaggggcccggtcagataagtccctttgtctatcgctgactcctgactcataacccggttagcagaatgcagggtcaccacctcgccacgaccaaatccaaataagtcaattgcaccttctcaatcgccattttgtcagtaagcgtacagcctgaactgatggtatcttcaccatcaatgacaacggtgatcgcaattttactgacgttcgccggaacacgatccagtgctatctcaatgctggcctgctgcgaaccggtaacgagcctgactgccccctcaggagaagacaaattattataaaagataaagtcagaatcgccactgacctttccctgagcattaagcatgaacaggcaggtatcgggttcgcctttaaagccggatttggcagggtactgaagattcagcctgatcgtagattgctgaaggggtatgttttgtccggattgtaaattcatattaactctcctgatttttgattattattaatgcgcagcgtttatatatgttccctaggcttagttctggacgctggatattcggtgaggcgtaaatatggtatgacaccatttttcataacgctgaagtttctatacctgttgaatttgaattttcattgaccgggtatcttattttccagggcccgttccttcataagtcgcaaaagtaacatatatccgaagggcatgctgttgatatcagacacggaatactggctttaaccagcaaccacagataaacccggggcctgcataaaaggttcatgccagaattaacatagctctgctttctgccccccccctttcccatattcacccgttgatagcggatcgatacccaaaaaaaaccccggcattgccggggtcagactcagcgtcttttagacattgacgccgtgctgggaagcaagcgctgacagaccaccggcaaaaccctggccaacagctttaaacttccactcagtaccatggcgatacagttcaccgaagaccattgcggtttcggttgaggcgtcttcagacagatcgaaacgggcaatttccgtcccgttgtcgttgttgtaaacgcgcatgaagctgttgctcaccatgccgaagttttgtttacgcgcttctgcatcatagatggtaacggcaaataccagttttttgatgtctgctgagactttggtcagatcgattttgacctgctcatcgtcgccgtcgccttcaccggtacggttgtcgccctggtgctctactgcgccatcagggctggttttattattgaagaaaatgaaatgggcatctgacagtactttaccgtcttcacctactgcgaatacggaagcgtccagatcaaaaccctgaccatcggttacacgggcatcccagcccaggccaaccatagcgacattcatggttggtgcttctttggtcagagatacgttgccgccttttacgagagaaactgccatttttagctcctgcaaacagttgaatgaggctgaattaacagccccagatatgaaaagttacttttcgatcaggacgcgttaatgccgtactgagcacatacagatgccagaccaccagcataaccctggcctactgcgcggaatttccactcaccattgtggcgatacagctcgccgaacagcatggcagtctcagtggacgcatcttcggtcagatcgtagcgagcgacttcagtctggttatcgtcattaaccagacgaataaacgcaccggatacctgaccaaagctctggcgacgagcctgagcatcgtggatggtcacaacgaagatgatcttgtcaacttcagacgggacggcgtccagtttaattttcagcgattcatcatcaccatcgccctcaccggtgcggttatcgccggtgtgcgttacggaaccgtcggatgacgtcaggttgttatagaagatgaaatctgaatcgccgcgcactttgccgtttgaggccagcaggaatgctgaagcatccaggtcaaagtcctgaccgtctgttgaacgcgcatcccagccaaggcccaccaggacatttttcattgacggagctgctttactcagggagacgttcccgcctttggaaagagaaacactcataaaataacctcttcgattagtaattgttcaggttaacacttaaggggattaactccccttttcctcagattcaggtttgcccgggaacatgacgcttgcgagaatgcccagcgccagtacacccagtacaacatacaggctggttgttgccgcgatgctgtaaccatgatgccagatgtgatcggtcgcattcaggccgagttttgccgcgatgaagaacagcagcacgataacggccttctccagatgaaccaggtactgtttcagtgcctcaaggacaaaatacagagtacgcaggcccaggatagcaaacatcatggcactatagacgataagcggttcacgactgacggcaatgattgccggtaccgagtcaaacgcgaacattacgtccgagagttcaaccacagccacacacaggaacagcggggtcgcatacagcgccgcttttttaccacggccaatggtgacatcgctgttttctggtttcgccagttcagcatccacttccttctggttaagtaggaaggcatgccctctgagcttcggccagatagggaagaagcgtttaaccatacggtaagccagatgctgggagtaatcctcaatttcatcatcgtcatcaccgcttttaagcatcatgaccgccgtccaggcaacgataatagcgaagacaacttcaacgtacggccccagactcagcaggctcgtaccgatggcgacaaagatgcccctgaagacgatggcaccaatgatcccccagtagagaacacggtggcgataacgatccggaacggcgaaccaggagaagattgccatcatgacgaacaggttatcgaccgacagcactttctccagcgcataacccgtgacaaacagactggcaacctcagcaccgtggtggatatagaggaaaccggcaaatgccatcgcaaccacaacccagaatacggaccagagcgcagcactcttcagcgagattggcttgtcatcacggtgcataaacaggtcaataaagatggcaccgactgaaagcgcaataaaaacaatgaccgtttcagtcgggaagccgatgtgtgtggaaaccatattttacccttagggatgtggatcagaggccaaattcagccgggtcgaagcccaacgcgatagcgatctcgcgggaggccagtttctcgtcctgatcgaagttaccgtcacttttcgcaacggcaataccaacacgtaaggccagctgagcggcctcaggctgatctttcagcgccaggatgtatttcatggtttcgcccttgccaatttcaacatcgaaatcgaagcttgaaaccagtttattgaagaactcaatcacctcattggtatcgaagaccttcagctcttctgaagagcgcagaaagcccatcattttctgcttttcttccgaacttacgccgtcactcgatacggcaatacgggcacatacagcaacggtgccctgcatgaattttttgtttttgaaacggccaacctggcgggtcagttcgtcacggcctgagttaatggcacctttaactttgtcgaaaaagctcatacctgtttcctttgttgctgtgttatttagaaccggcgctccagcgaaatccccagccaaatgcccggtccatttcgtcctggcctttgaagtactggttaattcgctcgactttaattgcgccgttttcgtttacgagtctggcaatggcgcacaatgtgcgacggttctcaccttcggtcaggcgggtctcaatgggcggttgatccggcacatgaatggtgactacaccatcagtcttgtcccagctgggaacaccttcataaataaaggcgtaaatcagcacttcgcggatatgcttccattcacgtccattgatatgcagccactcgccgtctgatacatcacccgtccggtcatcgcccttgagctgaacatacggttcatcgcgataatcaccgaatgcattaccgagcgcctgaatgaccgatttatacccgtcctgaagctcaacaaaggcccccagatccaggtcgattcctttggagccgaacatacctgcaaagcctgatttgctactgccccggtgccagttcaggttgatccggatttcaccgaagttatcccgtttggtcaggctgattgcaggcttctcttttgtcagcgataccttgctcaggctgatttttgtctcaactggcggaggggttacaaccggaggagttggggctgcgggagccggttcgtcggcaatatttacgccgaaatgctctgccagcggtttaagtccaccgttgaacccctgcgcaacgaagcggaatttccagtcattattacgacggtaaaattcccccagaattaaggctgcttcctgacggccgctcagttcgacactgccgctaaccaggccggtagccccttgctccacgtcgatggaaagattacgaagaccggacaccgtctgcccaccgtcacaggtcacggtgaacgcaattttctggacatcaggtttcagccggttgagcgcgacagtaaaggttgagtactggccttcactgaccaggctgacggtaccatcatcgttacgtggctgaccataaaacaccatgtccgcatcaccctgcaccttcccgtcggcatacaggcgaaacgccgaagcatccacctggccgcccgaggtgatccggacccgcaactcctgggctggaacgggggcattgccccccggcgtcaggttcattagcgaataaccgctgaaacgatatcggagtgcatatcgtcaattgtgcggccgcgacaggcatggccaagggcggtaaagtcccagttgccgttattacggcgcagcgaagaaataacgatcccggtatgtgagccctgctcagtcagcttgtagcgagccagctctttgccggtttgatcgacaacgcggcagaaagcgttttcgacgtcattgaacgactgaccacggaagctgtttaccgtaaacgccaggtattcaacgtttgcaggcaggcgggagaggttgaccttaatcacttcatcgtcaccgtcaccctcaccggtcaggttatcgccactgtgcacaacagcgccgcaggtggatttcagtttgcggaaccagatggtgtcaattgttttacctgtgctgtccattaatacacagccagcatcgagatcgattgagtcgttgcctccaaacaatcctccaagaagaccttttttcttaaccggatcccaaccgagaccgaaatgaagctggcttaatgcagatgattctttgctgagtgataccgtctggttcttaactaatgaaaccatgttttattccttaaaatggtaatgaccgagacaatcaaaggtatatttagtaactgacgaagaaaatcatatcatgatgaagttctctgacaagggaaatttttgtggttttctgtaaaaacacaaaaagaaatccttttcagggtgttagtttttctatttttaatttaaatatcaatgtgttataaggaatccaaaaaacactgacgcactccataaccacaggagttattaatcatattatgattgacatgtagcttagacactcatagactcacttctcaatcataaatttgcatggcgttccggataattaaaaaaaatgaacaagaaaatttggtttatggaaggtttatcctcccagcgagatattattcagggggtaaaatcatttgcacaaaaaaataattttgccattaccgtttttgcctcccaccgtaacgaaagaaatgaaatcctttccgttgccgattattctttgactgaacctgaagatcctcaaaaacgtcttcagtttatccaggaaaccattcagacctacggcatccaccatattcatactggccgtaacagccagtggtttgaagaacaccgttcagccattgaaccgaccggtgccacccttactaccggtgcaacgggcgtcgactggttaactctggctgacgaaaaagttacttttgctcagtttatggagcaaaagggtctcccggtcgtaccatcctggcgggtgaatacgctggcagaattaaagacacacctcgcggccccgccgttcactgacagcccggtatgcgtgaagccggtgacgggtatctatggcatgggattctggcgctttgatgacagtgcttcgcctatggccgtctttaatcatcccgaacatcgtctggtcagtccgcaacagtatattgcagcagcatcagctgctgagtcgtttaaaccccttgttttgatgccgtacctgccaggcccggaattttccgtcgatatcctcgcggataagggcgaaatactcgcagccgtgggacgccgtaaggaaggggctatccagtatctggtaaacgaaggaagcgcctgggaactggcgtgtgactgcgcccgtgttatgaaggccgacgggctggtgaatgttcagacgcgaaacgatgtgaatggcaacccggtgctgcttgaaaccaacatgcgtccgtcagggggggtgggttatacccttcacagcggtgtgaaccttcctgggttatttgctgcctttaagctcggtctgatgtctgaagatatggtacgccagagcgctaaaaacaccttttctccggttgcggtgagatccattacggatgtaattgcatacccggaatcactctctaaccttctgaattaaggcgtatttatgtctgatatcctcgaagatatgatttatcgccgtaccctctcatgcggtacgattcaggtaacccgtgaccagggtgaagtttcgctcgatgacctgtttgacatcgctgaaagacgtaacccgaaacgcgcctttctgtttgtcagcaaagtactcggcaggcacattcccgtgccaccctcagtcatgcggcaggcctacagacagcttgccagccagttcccctcgacactgacaggacccgtactgtttatcggtatggctgaaaccgccgttgggcttggggccggtgtatttgatgaagtgcgccaccagcatcgtgaatctgtctatctgacctctacccgtcacccggttgatggcacgttgctttgcgagttcaaggaagaacacagccacgccaccgatcatctgatctatctgccagatgatgaagagaaaagacgtcgtgttaccaacgcacgaacgctggttttgattgatgacgaggcaaccaccggtaatacctttattaacctgctttctgccctgcgtaataccggcaagcttcaacatattgaacaggttatcgccgtaacgctgaccgactggagtggcaatgccctgtcggagcgcacccccttgcccgtcacttcggtttcgcttgtaagcggtcagtggggatggaccccattacctgatgcacctgtcccggacatgccgaaagtcaacgtaacttcacgaggagaatgggacatccaggggaaacagtcatggggccgactggggatgctcgcacctgcggccgatctcggccatgaggtctccgtccacaagggggaacgtattctggttctcgggaccggggaattcgtctgggagccgttcctgcttgctgaacggctcgaagctgccggagcacaggcattttatggatcgaccacccgctcccctgtcgccgttggttatgccattgagtccgccatttcctttacggataactacgggctgggcatccccaattttgtctataacgtcgcccaccagcagtttgaccgcattcttgtgtgtactgagacacccgcagaaagtattgacacgcagcttcttaaagcgctggctgaggttgcgcccgtcgtggagattgttacctatgaataaacccgttgttctgagcgaccttgacgacacgctctttcagacccgtcgtaaaatggtggacgagctggccctggagccattccgtaccggtgccgttgatcgcaccctgaatccacgaagctttatgacggaagaacagtccatgttggtggactggctcctggagcaggctgaactcatacccgttaccgcacggggaactgaagaaatcagccgcgtacggatccctttccactcctgggcaatcacaacgcacggggccgtcattctcacgcctgaaggcaaacccgacgaggagtggaaggcccatatgctcggccagctggctccctaccaggaaaagctgacatcgatgcagcgtctgatcactgaaatgatggacgcaaaaggaatcaatgcctgggcaaggctgaacttcgaatacggtgaaacggcggtttatatggtgatgaaacaccgcgacagcacccgccttgacgagctcaatgccattgcagatgagatagaaacggtgtttccgaccgagggcttctacatccaccgcaacagtaataacgtggcctggcttcccaccccggttgagaaagggctggcagtcagctggctgcttgaaaaacttcgggctgaacgaggagttttccccgtaattggtttgggcgacagcctgagcgatcatcgttttatgaaactgtgcagctggtttggcatcccgcgtcagagtcagtttgcagatgccatttcacagcgaatttttggagaaaattaaaatgcagccacatgaaacatttaccggctcataccagcccggtgacgtggaatttctgctaaagccggttgtcattgagatgacgccggttgagaaaaaagaagaactgattcagtccgggaagaaacattattcggacatgctcagccaggagccagcgcctacacaatggcatcttgatttgtttcaccgggcgctggatcggggcgcagagaggcttgcaaaagaagtcacacagctcgctattgctctggccgaacgcttcggtgatgagcccattgtactggccagtcttgtcagggctggcgttccgctcggcgttatgctgcaccaggccctgcgtgacatggggaaaacctcatggcattacggtatcagcattatccgggatcgtggaattgacggtgcagccctcgacgtcattgaagagcggcatggtaccagcggtattgtctttgttgacggatggacaggtaaaggcgcaattaccggagagcttgtacgcgcactgaaagatcgcccgggctatcctgagcagccgcgactggttgtcctggccgatccctgtggctgctcctggcttgcagccagtgatgatgactggctcattccttttggcatcatgggggcgccggtatcaggcctgatctcccggtcagtatggtcctctgaaggattacacgggtgcatggtttgcgagcatctcagtgaattcgaatgcagccggatgcttgccgataccgtcgctcatttccgtaagaagttaacaccgtcatccctcgctcccctgagctggaatacggaatcagcccgggtcttatggcagacaagtcgcgacgttatcgcgttcctggccgatgaatttaaagtggacagcgtcaatcgtattaaacccggtattgctgaagcaacccgggctgtattacgtcgggtaccggaccatgtatttgtgcgttctattgacgacccggacgttgccttgcttgtagggcttgctcgtgaaaagggaatagttgttacagaaatggggggaaccctcggccagtatcgggctgtaaccattatcaagaaggtactctgatgaaaaatcgtctttctccctggaatctgggagccacgctatacatgcctgcaacacgggaagatattgctgatgccgtcctgcacgggaaaatcccgggcttgcgctctctggtgatttgcctggaggatgctgtcagtgaagcagacatccccgtcgccctcaaaaatctggagcacctgctgcacgagctcagtaacagcatgagtagcctgggtaaaaatgactggcctctggtgttcattcgcccccggcatgccgaaatgggcagatggttaaaagcgcattatgatctttccgctgtcgacgggtttgtgctgcctaaatttaccctcagttcgttagctgaatggtgggatatcatggtcgggactcacctgtgcatgatgccaacgctggaaacagaagatgtctttgacgtggttcagatgcgcgagctggctacccgtctggaggaacatccctgccacgaccgcattattgcgcttcgaatcggcggcaacgatcttatgaacgttgtgtcgcttcgccgtccccgggacctgacgctgtatgacagcccgatgggctacgtcatcaaaatgctcgtttcggtcttcggcccgcgtgattttgccctgaccgcgcctgtatgtgagcatattgacgatcatgccgttatggccagagagctggctcttgatatggcacacgggcttgttgggaaaacggccattcacccgggtcagatagaggtcattcaaaacgcgctgatggtcactcagggtgagcattctgacgctctgcggatcctgaactctacccaggccgtgtttaagtcgcagggagcaatgtgtgaacccgccacacatcgccgctgggcggctggcattctggacagggctcgtttttatgggttacagaacgagcaaagcgctgatggaatcagattacttaccgtgacccagcatcattaaggaaatcataatggggttcaggttcagaaagtcgatcaacattattcctggcgttcgcctcaacctgagtaacggtgcaccgagcctgagtgtcgggccgagaggtgcttccgtttcttttggtagccgggggacctatgccaatctgggcttgcccggtaccgggctgagttaccgtacccggcttgaccgggccgcgcgttccagaggtgaaaaccggacggcaaccgacccggggctcagacaggcgcttgagcagaaagccgctgaactcatgtcagcggtaaccgcaatccgtaatattcacgagctgacgccggatccaaaaacaggcatcagctgggcagagctggaagcagtatacctgcataacagaacgtcgccttttcaggttccggcaccggtgcgtccagaaaagccagactaccttgtattgccggaaaagcctgccgagagcgaaggcattagttttttgggtaaatggtttgaatcggaatcagctaaagctgagcgccacgccgaaaatcttcgccggtggcagcaggagctgattgatgtggagcgtgagaatacccttcgacagcaccggtaccagcaacaacggacggcctgggccgaacagtatgcaaactggaagtttgaagctgaagaacatgaaaaacggctcgccacggctcaggcagatgcccggcagcagttccggacagacgccgcgtttttcgaatcatacctggcgggtgtgctggcagaaactgaatggccgcgtgaaacgcttgttgcatttgaagtaaagccggagctatcagcagtcctgctggacgttgatttagctgagattgaagatttccctgataagatttacggcgttaatgcccggggaacggagctgacggaaaaagccatgacgcaaaaagccgtacgcgaaaactatgcccaccacgtccatggctgcttgttccgcctggtcggtatcgttttacatacgctacctttcgacaacgtgattgtgtcaggctttacgcaacgggtcagtaagcggaccggctatctggaggatgagtatatcctgtcctgcaaatgcactcgcagccagatgtcgtcagtaaattttgcaggcataaaacacattgatccggttgaagcgttaggcgatcaaccggttattcgaaagatgagcagtaccttcatttttcagcctattgaaccactaaccctttaagcaggctaaatcttacgatgcaattaaataccagacaggcccggatttttaagcttgccaacttactgggcaccggcaagcccgtttccgctgccgacattataaccagtctggaatgctctgagccgacattaacccgggccctcaaagagctacgcgagtcatattctgcggagatcaaatacagcaaggcaggtcattcctatcatctcgttaatccgggccagttggataaaaagaccctccgccggatgaatgaagcgctcgcacagaatgctgaactgaaaaccggtgagtccacagggaaggtcgtactcgataaggataaaaaaacagccgtgtcattatcgctacgcatgcggattctaagaaaaattgaccgtctggctgcgctgagtgactcgacccgaagtgaagcggtagagaagctggctctgcactccgttgatgaactgataaaagaatacagcgctaaaaagtcctgacgctaaatctcagaccggggtgaaaactccggttttgtcatatttcacctctgtattggcgtgatgcaaaatggcatctgaatcgatcatggtttggcatccatttccgatcacagtttggcatcacaatcgatcacgatttggcatgcttccgctcattgattggcatcctggtgtcgttacggggaagtcatcttcacagggatcttcagtcagttagcattaccgacatccattcaccaacttaccggagataatcaatgtcaaaaccccgatggacgcttgatcagaaaaaacatcacgttgccgcatggcgcgccagcggccttacccgtgaacagtactgtgaactttacgacattccgtttaaatccctgcgccagtggccgcaggatgtcgcaaaagccgaaaaacgagccagagcaccagaaattattcctgtttcagtatctggctcttccggaatgactgatggcagaccattgtcggatgagcctgtcactctcttcctgcccggtggtatccggatgtgctgccagccttctcagttaaccgatgttttccgggctcttcgccatgctgacgcctgataacgtattcctggtcgtaaaacccgtcgatatgcgccggggtatcgacacactgacacagtacgtccagaacgaacttaacgctgcatggcatgacggtgctgcttttgtcttcaccaataaagtccgctcccgcataaaagttctccggtgggacaaacatggcgtatggctgtgtacccgacgactgcaccggggaagcttccgctggccccggaaaggtgatgccacatggcatctcacacaggatgagtttcactggctggtctttggggttgactggcaacaggtgaaagggcatgacctggcaaaatgggtataccaggaagaacccgaagatgctcagagcaacgcaataactcaatgaaatataatgaatatccatgcgtgatgtcatataatccaccgcatggatatctcgcttctcagtaccaccagtgaccctgaacagcttcgcgctctggcaattgccatggtgcaaaaagtcatggctgagaatgcagaacttcagaaccgtatccgcatcctggaagagcagatgaagctcgcacgccagcagcgtttcggtaaaaaatgcgaatcgctggccgggatgcagcgttccctgttcgaagaggatgttgacgcggatatcgcagaaatctcggcgcatctggacaaactgcttcctcagaccggggacgaagaaaaaacaacaacacgtcctgttcgtaagcccttgccttcacctcttccccgtgctgaaaaggttatcccgccagctgaggaacgttgtcctgactgtgatgcccccctgcacttcattcgcgatgaagtcagcgagaagctggaatatattccggcacaggtcgtggtcaaccgctatatccgcccgcagtacagctgtccctgctgtgagaaagtgttcagcggaaaaatgccggcacatatccttccgaaaagtgctgttgagccatcggtcatcgcacaggttgtcatcagcaaatataccgaccatctgcccctgtatcgccagcagcacattttctcccgaatgggggtggagctccccgtcagtacaatggcggatatggtcggtgttgctggcgctgcactggccccgctggcaaaattgttacgccacgagcttctgacacgggatgttattcatgcagatgaaacgtccctgaggctccttgatacccggaaaggcggtaaatcctgctccggctggctgtgggcttacgtcagcggagaaagagtaagcgtcaacggagcaccgtattgacgcttatttattggtgagtactacgttccatggcaggagttcatcaactcggttggaaggccattctggcagtacgctcaggatatggcgcagatacgcttccggatcgataccgttcagacggcaggtgccgatcagcccgtacaacagtgctccacgctcgccgccgtgatcgctgccaaagaacataaagtttttctttccgagacagactgcacgaagcgctctttccgcagcattattatccgcctccgccagaccgtcatcactgtaataacagagggcatcccactgattcagtacatagctgcacgcttcgcccagtctggattttttcgacagcgtaccattcttctccaccatccattcatgcagtgacgtcagtaacactttgcttcgctgctgcctgacggcaagacgctctgactccggtaatccccgtatttcatcctcgatggcgtacagttcactgattcgcttcagggcttcttctgccgtcgcacttttgctgctgatgtatacatcgtggatttttcgccgggcatgggcccagcacgcaacttctgtcagtgcaccaccttcacgttctgcactgaacagccgatcgtaaccgctgaacgcatccgcctgcaggataccccggaagggacgaaggtgttgtaccggatgttttccctgcctgtctggtgagtaggcgaaccagaccgccggtggctctgatgagcccgcattccggtcatcccggacatacgtccagatgcgtcctgtttttgccttttttctgcccggtgccagcacttttactggtgtgtcgtcagtgtgaaccttgcgggtgttcatcacgtaacggtacagggtatcattcagcagagtcattaactgacaacatgcgtcaacccagttggagagtaatgcccggctcagttcgatgccctggcgggcaaagatttcactctgacgatacagtggcaggtgttcgcagtattttcccgttaacacgcgggcaagtaatccggagcccgcgatgccgcgctctatcgggcgggacggcgctggcgcttcaactatacagtcacattttgtacaggctttttttacccgaacagtgcggatcactttcagggcgctactcaccagttccagctgctcagcactgacttcccccagataatccagctcactgccacactccgggcaacaactttcttcaggctccagacggtgtatttcacggggaagatgtgccggtaacggacgacgatgacgtgactgtcgcaactggcggggaacctgcgggtcatcctcacgcccactgtaacgatcgctttcctgttcgcgttgtttcagttgggcctcagcctgttcaacctcacgctgcagtttttcagaacgggtaccgaacaacatccggcgcagtttttctatctgggccctcagatgttctatttcccgctcctcctcttcgatcttttcctcggcacgtgccagtgcagagcgcaggaaggcctccgtctcttcaaccagactcagttgctgatctttctgacggagggcttcagcctgctcagagagcagcctttccagctcagtgatacgaatgaggtatttccgactcatgaccgtttttataatccggccatgacatttttacaacattgtcagtgcattaaggcgggatgttttgggctgacgccagtccagtttatcgaggagcattgccagctgcgagcgggtaatggataccttaccgtcacgcaccgcaggccagataaactggccttcctccagacgtttggtgaacaggcacagaccatcagcatcagcccacagaattttaatcgtgtcaccccgtcggccgcgaaagataaacaggtgaccggagaaggggttctcatccagcacatgttgtacctgttctcccagaccgttgaaggatttacgcatatcagtaacgccggcaaccagccagattcgagtgcctgatgggagcgagatcatcgtcccctcccggtcagttcacggatcaacaccgtgagcagctctggtgaaggattttccagcgtcatgttaccgtggcggaactcaactttacaggaactggcactgactgtgctttgtgaaggagtggataaaagcggagtaagagccgccataggctctttctgctcatcaggcgttatctcaacaggtaataattcaacgccagcgccagaagaggttgttaccggaagacgccgcgatatacgcctttcgttctgccagagcctgagccatttgaacaggaggttatcattgatatcgtgttcccgggcaatacgggcaacagaggctcctggttgtgaagccagtttaaccatttgaagtttaaactcatttgaaaatgatctgcggggttctgaggataatattttctgttccataacaggtgtccactagttgaaaaggtgggcacctacgttaccaatactggcttaatggctacatacggcggtcagtttacgcttacgagaaagaagcggtccgccggtcgtctgttttgactcgcagaccggacgggccctcagatatcctgaggcctggctgcagggctggtgtggcggtacgctggtgagtgacggatacagcgtgtacaaatctctggcggataatgaccccggtattacatctgcctgttgctggagccacgcaaggcgcggtttcgcaaatctgtataaggccagcagggagccccgtgcagccatggcgctgagaaaaatcgcgggtctttatcgcattgagaagttcatccgtgaacgtcctgtggaaaaaatacggcaatggcgacaacggtattcccggccgatagtgaatgacctgtttgcctggcctgaagagcaggagccgtgctgtccgcccgacggaccactaaacaaagcgattaattatatcctgaaccggcgcgatgaactgagctgcttcctgagtgacggagccgtgcccctggacaacaatatctgcgagcgtgctatccgcccggtggtcatggggcggaaagcatggttattcgccggttcactgatggccgggaaccgcgcggcacagataatgagccttctggaaacggcaaaacgtaatggtctggagccgcatgcctggctgacagacgttctgacgcgtctaccggagtggccggaagaccgactggaagagttgctgccccttgagggatttaccttctccggatgagtgatacctgccatcaggtgttcgtgcagcgggccataacccgcagtcgggagttgaacgcctgacgacaggaaatgagccagagcagcgaccacgcgggctgacagtgagtcagaacctgaatcagcccggagccattcccggggctgtacttcatcacctgccatcagtacccgtgtcagtacttcgcgacctgacgcaattacccgactcagttcttcagaacccgcctccgataccagcctggcggtcgcccctgtgcaacaaaataaatcaaccatcgtcagacggtgatcaatcgtatgcgctgccagtggctcgcctgaaaaatgcgtcaatatgagttcgccggaacaatacctcagttcttcagaacccgcctccgataccagcctggcggtcgccccggcgcaacagaataaatcaaccatcgtcagactgcgatcattcgtatgcatcgctgatgatgcgcccgaaaaacgcgtcaatatgagttcgccggaatattactgacgacacggtttgtagttacgttccttcggtgagtgagtacctgtgcgtcagggtaacgcaatcagttcaggtttagcggggtgtcaagtcggtttggctaaccgaccgcagaattaactgtacctttaaaggtcgcccccgatatatctgcctgtcagacatatcgccgattcggtatctcactacataaaactccttaaaaaacaatgcgattctgttggtacgaagctttcagtaagtcagtccggagaagcgccagtacgatacagaatgaggttgaaaaaaacgttcacgtctggtcacttcttcaaatgttaaaaaacatctcgtaaagagccagtttatgcgggttcgttgagtagacgtgcgagcgtcactttgtcagctttaacgctgacgaaagtgacgcccgcacagcttcaaactccacatgcacacgcaagcgaccaaatttcaaatggtcttatgccgtgcgcacagtcataagaagcgcatgcggaaagtcagaaaatatcttaagacgcagattttaaaggcgtttttatgccagtctgccgggaatacacagtagtccggttgtccggaagcaccacggtaatccgaaggaaaaatcaacgtacctcaatcaccgtagtgatatccgttcccagaggctaaacggatgtaccaccataaaggcatcctctttcaggctacgaggatattgcaatcacccgaaggcgtttctctcagattgctgaaacattggctggcagtcacccgaaggcgtccctctcagactgctggaacattggctggtcgcaaaagcgacagttaatgcaaatacaggttaacaaaaagggaaatctgccgtcaacccaaccatatgaacatgttgatttcattatgaatgtgatgttctaatataaattaatcagtaacttcataaaaagaatataagaaacagataatgcatgtatttacacacatatcagcacaatgatagattaccaccccagaaacacgataaaggtataattatggaattttccgttatttttttctgggttatcactggtcttattaccatcttattcttaaaatcaataataaccgatctaataaaaaaccggctttgttgaataaataagatttcgtgcgaacgaccctgtagctggctggattttcaggcaatacgcacgctttctggcatcccagcctttgtcatcctgttcaacgcacgcaccatggccatagcttccgctacctgaccatcgtagtcacgcagcgtcagtgaatctcccaacaactgcttcattctgtacattgccgtttccgctatcgagcgacggttatattccgttgtccatttccaccgtgcattgcttccgctcagccgctgattagcaacggcacggttgcggtctgcgtactcaccgggccagtaacctgctccttttcggggaggaataagcgcgctgatttttttgcggcgcagttcatcgtgacagagccgggtatcgtaagccccgtctgccgcggctgccctgatttttctgtgagtctgccggataaggcccgggaaggcttctgagtccgtgacgttattcagcgacaggtctgcacagacaacttcatgtgtgttgctgtcaacagcaagatgcaactttcgccagatacgacggcgctctttgccgtgctttctgactttccattcgccttcaccaaagaccttcagcccggtggaatcaatcaccaggtgtgcgatttcaccccgggtggacgttttgaaactgacattaaccgactttgcccgcttactgacactggtgtaatccgggcagcgcaacggaacgttcatcagggcaaaaatggaatcaataaaaccctgcgcagcccgcagggtcagccggaatacgcgtttaatcaccagaacggtggtgatggcgagatcagaatagcgctggggccttcctcgtgatgaaggcgttgccgactcataccaggcctgaatcgcctcatcatccagccagaaagtgagggagccacggttgatgagagctttgttgtaggtggaccagttggtgattctgaacttttgctttgccatggaatggtctgtgttgtcgggaggatgcgtgatctgatccttcaactcagcaaaagttcgatttattcaacaaagcctaaaaaacctaaacaaaacagacatagcgttatatatattggcatttttatcagccggatatacattccagtatatttacaatgacaatatattttcagaactatggggagttggcctgtttgttactctgatagtactgaatatagtatttaatctcttttttagactcttattcattctctcgaaaatgatattaatgtcacgacatataagaaagatgcaaaaaaaactaaaacagacgtctgtgcctgattttatttattattcaatagaaaaacacaacaaatatcccatatatgtattacacatgccatcaaacaatataattgaaataggctacaatataataaacaccgatctggtcattggcgaaaaaattcatttcaggacactaagcaatcgttctttatattttaacctcacccaacccccattaatcgccacaataaaagatgatgtgttttgcactcttcatgattactataaccacaataatgaaacgaaatccactattgacaattacatatcaaaaataaaggataatcataataccccatggttattaaacaacgaaaatgttcaggaataaaaaaaagagacaattcccgagataaaacaaaagagcataaacatatgaaccggaaattctatttcaaaaatatcctgtggggaatgtgccccattataatatccatattgcatctgatatatgacacaccaacagaagcatcgataaaagttgacttatttctgatactcagtggcctggcccttccttgttcaatatacctgacaaaaacaatcacactaaaatacacatccatatcattctggaaaaaacctcttttctggtcttatggtatatatcattttcatcttgtttatataatgacatgtatagttttagcaataccttctgcaattatcgttttattctttcacttttatcaaaacatcaccagaaactggaagtgacaaccgcaataatgaacataaaaaggcaaatcagaatggcagtaaatcaataaagtaccatttcatatgaatcatcagaaaaacggtggacgcgacatccagcacgaggcaaaacacagcaacaaaataagccggatatcgcgccctgtacttttctaactcaactcccggcattgtgcaagttttaatcgcaggtggattcagagccacgcccccattgattcagcctgaagacacgtatatccttggagaaagcaggaatctcattgctgtgaaattccttacagaatcttcagccccattttatggggctttttttggtgcccccacgctgttaccacactttcgggatgcgaataaaaaagcccacagtttttacactgcggacttttgttttttctttgtgatttgtgtgcaagggtgcgactttcgaccgaacctttggcaaccggatagcggggactgttgtccccgctgcggtttcttacggtttacactgcaagaacgccgcaatttccgaccacatgaagcttaccctgaattcacacggtgatgcgtgtaacacccagacggtcagcaacatggtcaggcataacatgcccacaatgatcgttttttgcggcatagcacttgctccttttacagagaggcgctaaccttccacttgctgaaggtagatggtcagggcctcgggttaacgtttaagttgactcggggcctttccacatccggccttcaggtaatccttccagccgtcagccgaaaggcacccgcgcgtaatgtactggttttcagagaggtccgcaatcttccggtgacgagatcatctgcacacgccccggtgggacgggctaacggtatattcaggtgcaggatctctctgtctggtgcgtttttaaattgtcaaacgcaccctggcggcaaaatcagccaccttttttcgcatcaacaaaacgcccaaaacgctgggtaaagcgtgcaacattaccttctgaagcgacagttctcagtttacctgtataaaacggatgcgacttagaagaaacgtcaattgtaacatatgggtaagttacaccatccagttcaattacccggtcagttttgatcgtcgaaccgatcctgaagtactcatcaatactggtatcgtgaaatactactgtacggtattccggatggatattcggtttcacaacagttttccccctttaagtgaaaattccgcataaaggtacatattcagacggtcagattcaactgtctgttcttataacctcactctctttcagtattacaatatgttatataattataaactggacttcccgaaaaaatccattaaataagaagcgagccgttgcggaggcttgctctctcctttaacctcatgtgcaatatccgtaacgcgctcacataaatcatcatctgataatataacaacacccattattttattctgacctaaaaacttcttatgaaataaacgtttacccgacgtatctgatcccgctgtttttacctgtatcctttaacatacttgagaagcccgctgaaaaaatataccgtaaaggcggttctctgtcttccataaacctgtcggataagaagggcattaaatgaaaaccaaaaaagttatgatgattgcactggtcagctctgcgctggctctttcaggatgtggagccatgggcacagcgatcaaaaaacgaaatctggaagtaaaaacccagatgagtgaaacctgaggtagcctgagtttaacggacactccttcctgaaatagaatggcatcagaaggagctaataatgagcagaaaaacccaacgttactctaaagagttcaaagccgaagctgtcagaacggttcttgaaaatcaactttcgatcagtgaaggcgcttcccgattatctcttcctgaaggcactttaggacaatgggttaccgccgccagaaaagggctcggtactcctggttcccgcacggtggctgaactggaatctgaaattctgcaactgcgtaaggcgttaaatgaagctcgccttgagcgagatatattaaaaaaagcagctgtagattcaatctgtcaatgcaacacccctttcaattatctctttcactgcccgcgacggtatcggttatcagtttgacctgctggctaacggtgaaaccgtactgcgtgatgcatccggcgaaaaacgcatcaagggtgaaaaagacggtcgtatgctcatgaatgttggcctgaatgcggaaattcgcgacaacatccgcttcggtctggagtttgaaaaatcggcatctggtaagtacaacgtggataacgcggtgaacgccaacttccgttattccttctgataaaaacaaggggccgcctgccggccctgatacagaggatgttgtgattacttacccagcatgccctgctcttcgataaaggcgatgatgttttgcagaccttcaccacttttcaggttagtgaacccccatgggcgttctccgcgcatacgtaaagtatcacgctccattacctcgagggaggcgcccacgtatggtgcaaggtcagttttattgatcacgaggaagtcggatttggtgatccccggaccgcctttacgcgggatcttttctccttctgccacatctatgacatatatggtaaggtccgccagttcggggctgaaggtcgcactcaggttgtcgccgccgctttccacaaagatcagatcgagattaccaaatttctcactcagtgcttccacggctgccagattcattgatgcgtcttcacgaatggctgtatgagggcagccccccgtttcgacaccgacaatgcgttccgcttccagtgctccggcctcagtgagaatgcgttgatcttctctggtgtagatgtcgttggtgactacggctaattgccaggtgtcacgcatggatttgcagagggcttccagaagcgcggttttacctgagccgaccggaccgccgacgccgacacgcagcggttgcttgattatgttcattttattttctcctaagaacggaataatcgggaatactgggtttcatgtcgcgcggaagcgatagatgcaagtggcgttgctgaaccaattgcgtgatccggggttgcaagggcactgtccatgttcgccgcatagcgggcacacaggcgcataattaactgctgggcagccagctggccgtagggtaccagcctgacgcccgccatcactgcgctttcaatccagctgtagccaaggctcagggccaggtctgaaacggatatttgccagcgtacgccgagccatgccataccggttaactggctttgctggcatagtttgcgccattcggccgggcagtcgggctgccagtcgaccagaagtctggtgaaggctgcaccgcggttacgttcttcatcgcgtagctcacgggtttccctgcaggccagcagataagcggtccagcgcccggcactgtcaggatcgcccgcttcacaggcccggtatagccgggcaagcagtggcaggtcgacggcaaaaaaactctgttccatctgcaactgctgccagtgttcaaaggcggcgctatcttctacccagcctgcttccactgcccactccagtccctgggaccagctgtagcctccaacagggaggctgttactggcaagctgcatcagccgcagacgtttttccggagtcggcattcagtggctgtgctcctgatcgtgattatgggcgtgcgacttgctggcgtaagcgccggcttccggctcaaacggaagatgtgcaaaatcaacatccagcccaaactggcgcagcatatcatcgaggacgtgatcgtgatggtagcgcagctctccgggcattatttgcagcggaacgtggcgattgccgagatgccagcaggctttcgcgagcataaaaggatctgcgcagcgcactacagaaacggcttcatcagcggcgatcaccttaatgaattcatcaccgttttcgttactgagaatatcaccatcgcgcagcagcagaccgcgtggcagcaacagtccagcctgacgtccatcgttaagggtgactttaatacggctttttacccgcatgtcaacagggagggtaacgctggcagttgtctgagccggggtctccacccgccgggtcaaataaagcatttgtgctccttaaaacaggaaataacgttgcgccattggcagaatgtccgccggttcactggttatcagttcgccgttgatacgcacttcgtaggtttgtgaatccacggttatatcaggcaacaggctgttgtggcgcatatcggctttttgtactgtgcggcagccttttaccacagcagttgtgctgtgcaggttaagctgttcagcgacgccatttgctgctgctgcctgcgacaggaaagtcacacgacagcggtgacgggcactgcccaatgcagcgaacattgggcgatagtgcaccggctgcggtgtggggatagagccgttgatatcacccatcggcgccatggctatcattccgcctttgacgatagtcgccggttttacgccaaagaacgccggggaccagagcaccagatccgccagttttcccacttcaatcgagccgacttcatgagcaataccgtgggttaatgccggattaatggtgtatttagcgatatagcgcttcacgcggacgttgtcgttatcaccactttcttccggtaacgggccgcgctgaactttcatccggtgtgccacctgccaggttcgtaacactacttctccgacgcgtcccatggcctgcgaatcggacgaggtgagggagaacgcgccaaggtcgtgcaggacgtcttccgcggcaatggtttcctggcgaatgcgcgattcggcaaaggctacgtcctcggcgatatccgggtcaagatgatggcaaaccatcagcatgtccagatgctcatcaatagtgttgacggtatagggtagcgtcggattggttgaggaaggcagaatattggggtgcgcgcaggcggtgataatatccggagcatgaccaccacctgcaccttctgtatggaaggtatggatagtgcgcccgccgatggcagtcagagtatcctcaacgaatcctgattcgttaagcgtatcactgtgtagcgcaacctgaacgtccatttcgtcggctacagtcagtgcgcagttgattaccgcaggtgtagctccccagtcttcgtgaattttgaggccgataaccccggccgcgacctgctcacgaagcgcatccggattggagcaattgcctttacccagcaacccgatattgaccggcaggctgtctgcagcctgcagcatttgataaatgtaccatggtcctggggtacaggttgtggcgttagaacccgctgtcgggccagtaccgccaccgatcatggtggtaatgccggatgtcagcgcttcttcagcctgctgtgggcagatccagtgaatatgcgtatcgacgccacctgcggtaacgatcctgccttctgcggcaataatttccgtggatacgccgattgggatagtgacgttgggttgtatatcaggattaccggctttgccgatagcaaatatccttccatctttgacgccgatatcggctttaacgatcccccagtaatcgatgatcagggcattggtcagcaccagatcagcgcagccggcggagagcatttgcccctgtcccataccgtcgcggattactttaccgccgccgaatttgacctcttcgccgtaggtagttaaatcatcttcgacctcgatccacagctcagtgtctgccagacgaattttatcaccggtggtagggccgaacatgtcagcataggcctggcgtgaaatattactcatcatttgcctccagctcacccattatatctccgcggaaaccgtgcacgatacgggcaccgctcagcgccaccagttcaacctcacgcttttggcctggttcgaagcgcactgcagttccggcggcgatattgagacgatagcctcttgccttctggcgatcgaacttcagtgccgggttaacctccgcgaagtgataatgggaaccgacctgaattggtcggtctccgtgattttcaacgataatactgcaggtagcccggccgatgttaagctctatatagccaggtttaaccttatattctccagggatcatctgttacctcagattatcggattatggacggtaaccagcttggagccgtccggaaaggtggcttcgacctggatatcggggatcatttctggtatgccttccatgacctgctcgcgactcaggacatgccgtccttcttccatcagcgcagcgacgcttttgccgtcgcgagcgccctccattataaaagcgctaatcagggccacggattcgggatagttaagtttcaggccgcgggccagacgacgctctgccagcagtgcagcggtaaacagtaatagtttgtctttttctcttggagtcagttccatagcgttctcttaagtcagccagatccggggaagtaccggtgatttgtcagtcagttgcggccgcataaattgccagatatcacgcattacctgctggcaacgcagattatcatcacttaaaaagcgaactgtcagtagaccatcggtgagcgtggctccggcgtagttttccagtggtgtgagtttttcgcgtatgtcttccagttgcgtttcattccccaggtagaacagcatcgttcccacccatggtttccgggcaacgcaggtaagttctccattggccacgtgcagacgctcaatcaacagcggagaaccgtcgacccatatctccagacggttagcgagtgttccgtggctgaaggtttctccgatgaccggacgtccaaggcacagaagatcccaggccagcagtgtactggaggacgacagatgaaacacggtatgcaacgtggcgtgagcgccgggaaaaaaaatcgaatcctgtggcaaccactccagcgttgcgttattgcacagcgtcaggttttgctgaaggtgcgcctgcgcgccgctgctgcggtaaaatttactggcaccaggcatggtgatcagcgtatggcaatcagagtcaattattgcgttgatgatgagttcgtcaccgccgacgataccaccgggtggatgaagcagacagaggtggcaggtttcttcttcgggataaaaaggacgctgaacagtgagcggaccgacatgatgacgggtggtgagcgtggttttcccgtgcagacgctgaaaacggagatccagcatggcctgccagccttttttattttgtggtaacgcggtactgagcaatcttacgcccctgataaataaagataaaacgacagtaaagagccggatttccttgttatataaaagatgatgcctttccagtgagttttcgtctgaataatacgaatgtttgttttcgtcatgaagcgttccggctcccggggctatacatcgccagaaaagcaatgcatattgtcgggattatccagagaatcaggcagaaagatccgacaatgggctgtgattatgccatctggctcagaatgatatcaaggtgttatggggataacttgctgatacaatagcagtatgacagattcattaatgcggaaactgctcactgaaacagagtgttcatgactgagcactggtcgggtcatgcagatgataatttccccttttcttggggaagcgacagtattttcatgcatgcctgtcttcagtcatacggggagagcatctgtgatacagtccatacatttgttgcggacgtcgctcctgagtcactgactggtctgcaaacagtttatctgtacacggcagggcttctgtgtgatatcgtttttcatatcgagggggggcctccagagatgaatggaataataatatttcctgatgatataataccttagagaatttctgtgtatgctattgtgaacatattttttattaaaaagatgttagtggtgttgtaaaataaaagaatcagtaactataaacgcctttattgacataaagttttgatgatgaagttgaagtttgacctggtataaatcagtattcactttaccaggttttataaaaatatatcacttttagatacggacaattatagactctaattaatgggggtaagatgattaaaaaaatcagtattaattttcttttcttgatgttaatgatagatgttgtttttgccacattgttcaatatccctgtctggatgcatctgtttaatattattaataaccttgatggtgtgaaacttggatttattatatctcttccagtctttctgatatctgcattaaattttgtttttacaccgttctcattcaggtatatatttaaaccttttttttgtattctgtttatctgtagttccattgttacatatgccaccatgaaatatggtgtgcagtttgataaaacaatgatgcagaatatttttgaaacaaatgcaggtgaaatgacatcatatttcaatatgtctgttgtactgtggtttttatttacgggtatacttccatgtggactattgttgttagtaaatatccgttatcctgagacatggataaagggtattatatatcgtttaatatcaatgtttgcatctctcttgattatatttgcgattgcgtttttcttttataaggattatgcatcagttggcagaaacaactcttcattaaataaagaaataatacctactaattatatctacagtgggtttaaatatgtaagggatttttttgtttctcctggcgagtttcgtcagactggaacggatgcatcccgcacaataaatgaaaaacaaaagccggtaattatgtttttagttgtcggggagacagcaagaagtcaaaactatgctctgaatggatattctcgtggtaccaatgattttacaaagaaatataatgaacttatatcctttcataatgtgcagtcgtgtggcacatccacagccatatctgttccatgcatgttttcagatatgaagcgaaaagagttcaattcccgcaaagcggtaaattcggaaaatgtactggatattctgtacagaacgggggtaaatttactctggattgaaaatgacgggggatgtaaaggtgtatgtaagcgaatccctacaattaatattgagccatcaaattcagataatacattatgcaagaaaaactcatgttatgatgaggttatgctaaaaaatattgatgagtatataaataataactcagaggataaacttatcgtatttcatttgatgggtagtcatggtcctacctactatctccgttatcctgagtcacataaatattttaaaccaacatgtgatcgtagtgatatcgaaaattgtacgcatgagcaattgattaatacctatgataatacaattcgctatactgattatataatatcaaaattaattgacaagcttatcgaatataaagatgagtatgatactgttttattatatgtctctgaccatggagaatctctgggagaaaatggattatacttacatggaacaccatataatgttgctccagctgagcaaacgcatgtgcctcttattacctggatgtctccggggttcgtttcctctaaaaaaattgatttgaattgtttgtcagaacatgctctaaacagaacagtaagtcatgataatatattttcatcgttactggggttatggaatgtaaatacttcagtttataataaagaagatgatattatatcctcctgcagatagatactgacatttttctgaggataagaggtgaatacctcttatccttaagtaaatattaaccaggtaactgtgaataatttagatgttgggcgttatgaaagtaataaaactccccatataatgatagcaactaaaatcgtaatcaacactgcggctgaacccatatcttttgctctgcctgataattcgtgatgttctgaaccaattctgtcaacaactgcttcaattgcactgttaattatttcaacaataattaccatcattgccgaaccaatgagtaatactcgagtaacagagtcaacatccagccaaaaggatattatcagtgctgacagaaccagaatgcactcctgacgaaaggctgcttcatagcgccatgccgcacataagcctttccatgaataacccgctgctttaataattctggtaacaccagtggtcgtattagccataaatacctcttatttaattatatgtctgaatatgcattataaaatatcagttaacattaacaggattttgtaataagccacatttattctttcgggaattaaaaaacataacgaaattttgcctcattctgcatttcattgaaatagtatgtttctcatcgaaagcaagtttgtcaatataaatttgtaacagaaatgactttccggggataaacaaaactgttcatggcaatggctttctctgtcgccaacatggatacattgttccggataaagcactgatgtcattgactgacgcagactatcaggccatctgatgctttcttttccttcaccggtattgatgatatgccttatgaagggggacttattcctgtaacccaatcacaggcactgtgattactggtttatgattgatgctgatttgagcagatatgcacagcagttgtggattcaggggatattttctgccagatattcataccagattgatgacctctttgctcagatgctcttcgttctgagccagccaggattttgtggccacatacattgttcgccgatggggaatcgagacaggcgattggctgtgatgcgattttgccgctaactgaggatgagtccgcccctcccggggaattcctgtaagttaagccgtacctgttgattagcactaaactgggtaatgaatttatctgccagtatgaatgatgccggggacggttttgaactcctgatgtcgggtaatatgcaggattttaatatttgttgtcgtcgggataatcattatcctgaacataaactgatacctttatcagagttatttgacgttaattatggactgaatcttgagctgaataaactggagaaagattcttcaggaattaattttgtttcaagaacgtccaaaaataatggcgtctccgccagggttaaattaaaagatggtattagtccatgccagcagctgtgttaactgtagcagcaggaggttctgttatggaatcgtttgtacaggattcaccattttatagtggaagagatctttattggttacgtcctaaagttgaactgactctggaagagaaattgtactactgctcttgtataagaagaaacagacacaaatacagctacgggcgtcaggcaaaccgaacgctgaagaatttactggtaccgtcattagattctgttccggcatgggtatatggtgtgacagggaaaataatatctgaattgtctgaacgttgagactaagagggccggaggccaggtgaatggccaccgggatatttatatcagagtatattggcgattgattttgccagctggtcttccagatgaggtttagcttcttcaaacttcagattaacctggttggcactggatacaacccgggtctggtatttatgctggttgccggtttctgtgcttgtctgaattttggagcctgatgttccctgacgcaaagctgcaacattatccgttctgacgctggttctggttcgctcggcaatctgaacatctgtaatcattgtgtaatttatatcttccaccattgcatccgcggccatgccaatcagaccggtagccagtccaacaccgagagtggtacctgccgacccggtattgtacgctgtgattccacctccaagagcagctccgactgctgcaccttcataaccgcgactcagccatccctgagattcacgcagatccattttgtctgctttgagaacgttagcctggatccagtagtaagctttatccggggaagtcatgatctgataacctctggctttgactgcatcggcaatttttccctgtagtccactcatgtctttatccgacgtgtttttgatctgcaggaaaacggtgcgttcgctcgcaggttcaagccagatggttgaggtgtactgacaatagcggacactaccatttgttctttttttaagcagccatctgatgatatttttccctgaaggctgccggggatatattccccagacgagagtgacgacgctgacgattgtagaaaatctcaatgtattcccgtattactgagatggcctcatcccggctcttaaaacgatagtggctcaggctctcatttttcagcgttccccagaagctttccatcggagcgttgtcgtaacagttacctttacgcgacattgatgttttcagaccaaactgctcctgtatgacccggtaatcgtatgcgcagtactgtgaacctcgatcagagtggtggattagcccggcaggtgggcgctggctcctgagcgccataaacagggctttacctgtcagctcttttgtcatgcgctctcccatggcgtagccgacaatttcgcacgtataaacatctttgatgccagcgaggtacaaccatccctcctgtgtggcaacatacgtcaggtccgccacccagacctgatttggtgctgtaggagcgaacgtctggttcagcagatttggcgcaactggcagattgtggttcgagttcgtagtcgccctgaacttgcgtttctgcttacagcgtagccttagctccttacgaagacgtgccagtcggtcacgaccaacgatgatgccattctctgccagctccgtctggagccgccgggttccatatgtttcgcgagtgcggatatgtgccaccttaatctccagttttagccgctcatcactttgttttctgtctgagggttcatgctgtacccagttgtaataaccgctcctggatacaccaaatacctgacacatcgcttcaatgggaaattgttgtcgccattgttcgattaacgcgtatttttcagcgactcctgtgcaaaatacgctgttgtagattcaattggtcaacgcaacagttatgtgaaaacatggggttgcggaggttttttgaatgagacgaacatttacagcagaggaaaaagcctctgtttttgaactatggaagaacggaacaggcttcagtgaaatagcgaatatcctgggttcaaaacccggaacgatcttcactatgttaagggatactggcggcataaaaccccatgagcgtaagcgggctgtagctcacctgacactgtctgagcgcgaggagatacgagctggtttgtcagccaaaatgagcattcgtgcgatagctactgcgctgaatcacagtccttcgacgatctcacgtgaagttcagcgtaatcgtaagcgtacagcctgaaccgtctggtcagaatctgacgaattagacaaagtggtgtccaacaaataagtagtgggaaccaaagtatcagatatgcagaaaaatgtgactcccggcaggcgaaaaggctgccctaattatcctcccgaatttaaacagcagctcgttgctgcctcctgtgaacccgggatatccatctcaaaacttgctcttgaaaatggcattaacgccaatctgttgttcaaatggcgacaacaatggcgcgagggaaagctgctattaccttcttcagagagcccccagctacttcctgtgactctcgatgcagctgccgaacagccagaatcgctcgcagaggacccggaaaccctcagtatcagctgtgaggtaacgttccggcacgggacgctccgcttcaatggcaatgtcagcgaaaagctcctgactctgctgatacaggaactgaagcgatgatcccgttaccttccgggaccaaaatttggctggttgccggtatcaccgatatgagaaatggcttcaacggcctggctgcgaaagtacaaacggcgctgaaagacgatcccatgtccggccatgttttcattttccggggccgcagcggcagtcaggttaaactgctgtggtccaccggtgacggactgtgcctcctgaccaaacggctggagcgtgggcgcttcgcctggccgtcagcccgtgatggcaaagtgttccttacgcaggcgcagctggcgatgctgctggaaggtatcgactggcgacagcctaagcggctgctgacctccctgaccatgctgtaaatctctttatcctggttgtcacagaataagcccggtaaaatacgggcttatgaacgacatctcttctgacgacatcttcctgctgaaacagcgcctggccgaacaggaagcgctgatccacgccctgcaggaaaagctgagcaaccgggagcgcgaaatagaccatctgcaggcgcagctggataaactccgccggatgaacttcggcagtcgttccgaaaaagtctcccgccgtatcgcacaaatggaagccgatctgaaccggcttcagaaagagagcgatacgctgactggtagggtgtatgacccggcagtacagcgtccgttgcgtcagacccgcacccgtaagccgttccctgaatcactaccccgtgacgaaaagcgactgttgcctgcggcgccgtgctgcccgaactgcggcggttcactgagctatctgggcgaggataccgccgaacagctggagttgatgcgtagcgccttccgggttatccggacggtacgggaaaaacatgcctgtactcagtgcgatgccatcgtgcaggcacctgcaccttcgcggcccatcgagcggggtatcgccggaccggggctgctggcccgcgtgctgacctcgaagtatgcagagcacaccccgctgtatcgccagtcagaaatatacggccggcaaggtgtggagctgaggcgttcactgctgtcgggctgggtggatgcatgctgccggctgctgtctccgctggaagaggcgcttcatggctatgtcatgactgacggcaaactccatgccgatgataccccggtccaggtactgctgccgggtaataagaagacgaagaccgggcggttgtgggcgtatgttcgtgatgaccgcaatgcagggtcagcgttggcacctgcagtgtggttcgcttacagcccggacagaaaaggcatccatccgcagactcatcttgcctgcttcagcggtgtgctgcaagcggatgcgtacgccgggttcaacgagctgtatcgcaatggtgggataacggaagctgcctgctgggctcatgcccgccgaaagatccacgatgtgcacgtccgcatcccgtcagcactgacggaagaagccctggagcagatcggtcagttgtacgccatagaggcggatataaggggaatgccggcagagcagcggcttgctgaacgtcagcgaaaaacgaaaccgttgttgaaatccctggaaagctggttgcgtgaaaagatgaagaccctgtcgcgacactcagagttggcgaaggcgttcgcgtacgcacttaaccagtggccggcactgacgtactatgcgaacgatggctgggtggaaatcgacaacaacatcgctgaaaatgccctgcgggcggtcagtctgggtcgtaaaaacttcctgttcttcggctctgatcatggtggtgagcggggagcgctactgtacagcctgatcgggacgtgcaaactgaatgacgtggatccagaaagctaccttcgccatgtgcttggcgtcatagcagactggccggtcaaccgggtcagcgaactgcttccgtggcgcatagcactgccagctgaataacacatccccgtcaatacggccctcgctgtacgcttacgcgtaatcggggcagacgctattacaaagctgttgatgctaataaccgagccaacagaatggcgaaaaggccaaaaccgtgcttactggatcaaaatttaccattgcgaaagcttgttctggaaaagctggagatgaaatggtctccagagcaaatatcaggatggttaaggcgaacaaaaccacgtcaaaaaacgctgcgaatatcacctgagacaatttataaaacgctgtactttcgtagcctgattaccactataaaaaggctgctattgagtatgttgctcagatgctcatatcaaatatcggtaatcttgaggaatacacatttgttcccgtaccaccatccaaatgccgtacagatgccgcttacgatgaccgtatgacagaaattctgcgaattgcgcaaacctacgaaccatggctggatttctgggaactggttgtgcaaaacgtatcaacaatagcctctcataccgcaacaaaccggcccttaccagaagcgattatggcaaactaccaactggatgaacaattactggaagggtgcaggccctagattgttatttttgatgacgttctcactgccggtagtcattttaaagcgatgaaaagcctgatactacaacatattcctgaagcctgtatactgggactctttgttgcccgaacaacccggggagctcaaattatttaaaaagggtaaagtactccttaaaattaaatcactgattcatcgccgtcagctataatcctgtaccccatcgctttataaccccgctgacgtttatcccacattctgagcagcacaggatacgcggtatccacaaaatcaatgatcctgacatcgcttttaccggtatgctctctgtgaagacgccctgcatactgctgtaatgtccctttccatgacacaggcatggcaagaatcagcgtatccagcggagggtggtcaaatccctcaccaataagtctgcctgttgacaacaaaattcgaggagaatcgggaggaagagcattcagcccggatatcagcatcgcacgcttttttttcgatagtcgaccatggagaataaagggagacaatttcagtgaattcatcactgatgctatctcatccagatgatctgtacgttcagtcagtaccagaacttttcgcccctgcccgaaagctttcatggcttcttcagctatcgccaccgttctgtcatgatccagagcaatttctctgaaaatatcctggattctcgcatccgatggtaaatgaccagatgtaaaacgggaacggatcagtacctccagattatgtgggctttccttcgggcggaccgctgtatggcgaatggcaccacagtacataaaaataatgggatgcagaccatcccgtcggattggtgttgccgtcaggccaagcagatatctggcattcgtttccttcagaatcgcagaaaatgaaaccgcgccaatatgatggcactcatccacaatgatttgcccataattcctgaccagaggttcaacttctccttgtctggatatggactgcaccaccgcaatatcaatattgccacagggtttatgtttacctcccccgataataccaatactgtcaccggcctgcagaaacaccgcgagacgctcctgccactgcttcagcaattcagtccggtgtaccagtatcagtgtattcactttccgcttggcaatcactgccgctgcggtaactgtcttaccaaaagccgttggcgcacaaagcacaccagtgtcataacggagtaatgccgaaacggcctcttcctgctccgctctgaggtttcccataaaaacggcattacattccgtcccggcaaatcgtttatcgattaattctgcagcaatattgttgtccctaaggaaagataatacgctgtccagacatccccggggcaacgcaatgtgttgcgggtaattctccgcacaacctataacacggggcttattccagactgacatacgcattgcctgagccttataaaactcagggttcggaaatgctgccagccgaataagtcggttaatcagcacctgaggtaattgcgctttttcgaaatagatctggtttgccagcgtgattttcagcggttctgcaatagaaatattcagtctgtttcctgatgattttttctcttcccacggcgtacccaggtcttcttcgttgataaaattcacatccagaggatggatactccctgtagcccgtaatatcgtcggttcaatatcctgcacattcatcggggtcaccgatacaagaaaagcccactgatcaggataaggctggagattcatatcaacaaaaacgcttccccccaattcacgcggtcttttttgcagaggtaacgctatgagattaccaaatcccccttttggcatagtatcctgattaggaaataatcggtcataagaccccaatcgcagctgtcgggtccgactacacgtatagctaataatagcagtccccagacggcgagcttcgcgggccgaaactcgtgaggcaaaaaatatccagacatgcgccccctgacgtgaacgggatatttccagcgcagcaggtacacccagctcatcacaggatcgcatgaatgcggatgcatccttctgccattcagcttcatcaaaatcaactgccagaaaataacaggaatcatcttccagcaacggatacatcccgacagtatgggtaccggccagatggtggtagatgacgagatcggatacaggaatcaactgacggtgagcgcagtccccacattttatccggggtttaccgcatattctcgcctgccattcgttagcgcaggcaggagagtaccctgatttgccgctggttttactttcccatctaagtgcccatacatcatcacgcccacgaaacaaccgacgaaataatgcaaccttctcgtcggtggataatacagaaacgcgctgcacaggagtctgcggtttacgtcgccattcaatcccatgagcttcaagtaatgagaccagacgggcattttctgccctcaatgcagctaattcatcactgtcagatttatgaaccatattcgttacctgtatccgatccactgaggcaccacggcagaaattcgggtcccctacactgatgacaaagcgccccgccctcttctgcctattaactcaagcacctcccaacaacttacagaaacttaattctaatacctaatacagctgtaattcagttatgtcgtggtcggccccggttacttttttcgggaagcctgctacgcctcagaataataccgtgttctttctgatcctgtttggccagatagctaagggcgtaacgtaagtcgtctaccgcagatttatcactatagtgaattacgtgatcgatacgcaccgggtatttgtctttagccctgcacaggtgaaaataaccctccccttccgtgatccgcctccagatatctcccagttgcctggatatccgataagatttgttgtgacgttgcccatccaggtagccgataaaatgaatatgaagtcccttgtttgacgtatattccattacccagtaatatcccgccagcatcgtttgggtttcactaagtaagcggtgcatttcaatacacatactgtgcctacaggaatgaccaaaactgggcgtgtctttcctgtaggcaaaatcaattctgaaaggtaacagtttagaaaaacgttgaaacagaccttccatgtgttcattcacatctttcagaatcatgaagtccatttcgtaattgggattagcattatacattttatagtccttactttataaaagttacaggaaggtggaattacataaatactgagagtacagaaacgccgtaccgcggcattaataaacgaggtaaccagcagcacagacaacctgataaaactgtttcgtattacctcattactccaaagaggtaatatttcagagtacagtaagactcacttaaactgaggaccagtacgaattacaatggtaaaaacacacctcatagaattgagtttaaggaagtaccattcaatcacttacaggaagtaatctgacattcacaaaagccagtatcgggtagccacaggcaacaccgctattaatacttctgtaccattaagtaaaaacagcgacccagcttgaggcctctacagatatttaacttcaccataaaaatgatggtatacagaccataccccacacaccataagaatattatttcatacaggaaagattatattttttcatacctataaactgtaacagagccataacatactctaatagtgttccggtacgtaaccagtgttaagtgcgtacaagacaacataacagatcacataacttccactaataatactaattaacctaaattatttattgaacacgaaaacaatgaaggccccacctcacctcagactaaagccgacaatatcctgagtaacactctatccaatagtaaatagtggttacaccagttatatttactgactgacctgtaccagagttttctaatacaacgctgacatggtaaagacattagtctcctccgcaagtagcagaggagactatatgtactcaacgattaagtcgttcagaggtcaaagttaggtgcgacacacaacgtttttccctcaataaccggtacaactctgttttgttcatacagtaaatccagtaaccagttgattttatcctttttccggaaacggttcggaccacgctgtaaaatgtcattttttttcatacagaggatccccttctcaatacaatagctttttatccagttgaaaagttcaagctcctctggaatgagtcgcacaggtacggtcagggcagagttgtcaaaagttaacggattagacaaccgcacatactcattaccgtaccatattgctaattctctcgccatttctgcagtgtaaggggaaatctccccctcttcaccgctcgaatggtaaataagtcctgccagtcttgccatatactctgcatttttagcagcatattcccggcaatgtcttaaaggccccaatccccccagcttcgattccacatcattgtaataatccgtccagattctggcagcctgaggagaaaagtgaaggcaacgtcgttcaccactcatcgccagactttcatcaataagctcattgatcctctcttcaaacaaatcctgatactgtgatgaataattatctccggttattatccttgtcccctgcgttgatgttggttgacacatcaaaaaccttgcatgatgtcctgacgttttcacaatttctttttttcgcgtacaaaaacctttgtggtaaacatcaggctgaatcatcaccgatatcgtcagtcttggctccttcaaattaattccgggagatgatttcctgtcgatgaaaagagaacctccatcccacaaagtgttaataattcccagtttactcatggcccggctgtcaaaaattacccccccttcactggatacaagagcaaaagagcgattgctatcggagtaatattttaacattccctctatcgttgtctcattaaaaattgttcgacgtatctgcggcggaacaggaggtttattcagatgcgtttcaagctctgattctgttgccttgtaatctttaccggcacgaatctctttatgaaattttgattccagcgctttttgtttttgctcccatatttccttttctgtactgtaattctcaaccagtttcgcgtattcatccgccagggcttcatccctgagataaaatgctttcataaacactttatccacggtcgttttcctttcaccggaatcagccagaatcagagagtaaagattaacaggcccatgtaaatttccaggtctgcacacgtcaatctgattctgacaggcaattgagatcgctgttaatgcggatgttgccaccatagccaaaggtgcctgtgtatttttttgagtttcaattattgcatttctcaccagcggtggtagtgcatatatcggataaggattttctggtgcaagtaagcacataaaagcctctcttttcattaatgggttagtaaaatagcagcaaatcccgctacaatagcgaaaatagctgctattcagacctgatgctctgagaaatacagagcatttgtagatctgatgtttaataaaccgataaggttaattcagtgaagactgtattattcaccacgaaatatcattcatatttctcattcttaatacctccggaaattatttcactaatacctttcccccggtcttttccctttctccagaaccatagtgtaaatattaacggccccacgtaaatttccgggactgcatacgtcaacctgattctgacaggcaattgacatcgctgttaatactgacattgcaaccagagtcagaggtacttgtttattgtattgagctttaattattgccttccctatcattgatggtcatgcatatactgaatacgacatatccggtttgatgtaaggcataaatgcttcctttttcgtaatacgtttcggttatagcagcaattaccgctacaatagcgacaatagctgctctttcaacaatgaatgctggaaattctgtttatcaattaaacttctggctaaattgttcttatgcttctttttcctcctgaggtgatcacgtgatgacaaaaacttatctgctcatggtcatatctgaagaaagcgtatgtctcacttcgtcattaacacctttgactgctgatctggcaggtacagtatgtaaagtaagccattcgtcaatagctgatgaacgccagcccacagaaccactaccaagacgtaccggcctggggaaggttgcatcgtagtatttcgataacggattcattttttcgtaaattgtcgaacgagatatacctaacaattggctcagttcaggcatccgtaagatgcgtgaaggagtcctgcagtgtccggattgatctggcattttatcccccatagtgtggtgaactgtcgttacagtttgtattccccgggtaaatttgtctgcgtaaaaaaatgggttgagaaaaaagacaataaataattaaaaatcaatatgatagaaaacgacagcattagtgttattttacttttcccttatcgctgtcgattctcattatcattcatggcaaaaaaacagcaaaagaggccctggtaatgactcctgtcagtagtacatgtgttttcgataaatgaaccaatggcttttcgtgaatttccagggagcgtaaaaagcaaatcgttttccgggcaggtcgtttgatgtgagtacgaagtgtcagattgttgcgctcaatgcgccgggtaaatatcttgccgacaagatgcttatcctgtggcatttctctggtataactgctccggttgtctctggttatcatgcctgcggagaatggcttcaggaattccggcaactcacggcatgtttcatcagtgcgaggaccaaaagtgtaagccagcacaccgtcagctttggtcttatacgcgtaccagtgccactgctgacgagctttgttttcgacaaaactccattgttcatcaagttcacagataagtgccacatcgacactggcggctggagatatggttactttacgtggtgagcgttttttaaagtgagaatgacggtgttgatatccaccttcagcgttctggagctatcgcgaaccccggctccgttatgaaccatttcaacaatttgctctttaatgcctggttttcgggtttcgtagatgtaattcagttgaaatacacgtttgcaggattagcactggaaacgctcatgatctgaggtgctgtgatcataacggtacactttataggaattacagcggggagaatatactgtaactgttgccatatggtctccagataccaatagaatacaacattaatctatcgtcagaaggcatcaccggggccttctgacataatctgttaatacgtgtactattaccctgttcagaaaatattgattcaaaaatgaaaaccagttaacagaaaagcaaaatgatataatgttaaaattttatatagtgcaataaaaggagaatgttatgtataattttatcactataatgtatgatgtcttttcatgttttggtgttctggctaaaaaccagaatagccgtgacatccgaaatattaaaaatttttcctcacatcaacattcactgggcgacatgtttgatgaattaataaacattattgataaagaacaagtattgagtaaagaacaacgaaaagttatatttaggagatatgaagatctctatgttaagctaatgcactattctgtttttacagacaaaacacatcaaataataaaacaaaaatattttaatgacattgtaccaatgattctcgcactcgacatcaggaacacatatcgcccggataatgagatggcattttactatcatattcattcttttctcactcagataccggataatgaggatgatatatatcatgctgcaaggacatatctgcgaaattacgttaagttatgtttatccggatacacgccagcgaatgcgcatttcaaagatatctttgatggcgtatatgaattcattcgtaatattcgcaaaaacagtacaccaggaaaaacaaaacttatcgcaactatcaacacatgcaaagaaacctgtaaacatctgctttatttaagtaatgaagacaaggaaaaaataatttctgacttagataaagttcaggttgcatgttattatctcactatattactggctttcgaaagacgaacttcattaacaagcatcctggcaactttatataaaatgctgataagcgaaagagaagtttcagaatatgaatgccagttattatatttaaccaacccaatagatgtaatgaatatactgaacaaatacatatattactttcctaatgagaactcaccattttatacactgaaaattgacagtgcattatcgtgggatgccattgacgcaatacgagactatagtatttctgatatttatctttatcctgaacaaaaaacaataaattgtgtcgttgagattgaaaacattgtctttggcggttacatttatacattgaacaacggcgtcacattacaaaacatagaaaactctttaaaagattcttcatgccattatgtcttaaatggctatacagaatttgttaactgtttgagacaacttacttcaggaaagactgaaagtgttcatcgcaccatcaataaactgaactatgagaaattaccttttggatttatcattgccgcgtttgctatactaaagatagcatttaaaataaaattcagtaaaaatcatgtaaatatccgagcattattaaatgacatcaattattttatgacttatcagggcgagtccattaaccttatttcactggatcacgaatacccagagtcctgtcttcaaaatgacacaaacacatatttattaggaagagtaatatttctgtataactcaatgatttataagttcataaactgtcaggaacatgaaaccaataacattcactcagctatgataaataacctattacaggaagttgatatagcccttggtaaaataaatgacattatagacagcagaaacatatcagccccccatgaactggcaaatatacttacccgcgaaaaaatacttacaacacgggaaaaaaaaggaaacctgataagcctgtttgatggattcactttattccattgtgttggaatgataacctttcttatccattatctcagaacacctgaagaaaaagttgaaaatatatttatgttatatggtgcagataaaaacaataaactacgcagaagactgatttatgacgcactaggaataattcagtctcagcaggagtgaagagttaaacaggcaaattattttttataaaaaggggattgttaagtaatcccctgttaatcaaaatacgctttcctgacgatctgataattatcagctcaatacatttgacataaaagcggtttcttaattactactgctacgatcacatatcaaatcatgatcgtacaatatacattttcactattatttattcacaatttgagacatcacataatccgcccatgcctgcatcatcggtacacgctgctccagtagatcagtacgatgatatgccgcctcaaccttatttttcagcgtatgagcgagcgccctttccgccagatcccgcgaatacccctgttcgctacaccagtccctgaatgttgagcgaaaaccatgtgccgtggcaactcgccccggaatgtcactgccggctttctttttacgcagaaaacttgtcaacaccatatcggaaaggatctgctgctttctgggtgaagggaacaccagttcatcatgcaggccacgtatattttccagaatgtaaatagcctgccgggataaaggaacacgatgctgtatcctggctttcattctttctgcaggtatagtccatacccgcttatgaaaatcaatttcagcccagcgcattcccctggcttcgcccgagcgagttgctgtaagtatcaccattaataacagtgcgcgggtaacattataaggttcatcggtatacacactggtcgccacaaaaagcggtaactgcctccagggcattgcgggttggtgttcatcacgtcctcttgtctgctgaggaagcaaatggtcaaccacatcaacaggatttgctacacaaaaaccgtgcgcccatccccactgcataacaacatgaatgcgctgtttaacccggcttgccgtttctgacaaggttaaccagactggacgcagtgtttctgccacgtccgcagccgtaatcgaatccagcgtttttgctcccagttgaggaaacgcgtaattctcaagcgtcgataaccactgccttacatgctttggattttcccatccaggagacagttctgcatgtacacgcctggctgcatcggcaaatgttgggatagcgactttctcagattcagcctttttaatctccagaggatcatcacctgcagcaagttgctctcgcattatccgggcagtacgtgcagcttcagcaatactgacctctgggtaagttcccaatccagcattacgtcttttttgtgtcaccggacttacataacgaaaaacccatttcccccgcccctttactgaagaaggatgaagggtcagtccggtaattcccccatggggcaatggtttgtcatcaggtttgatatgtcttgctttcgtatccgtcaatactgccatacgctaattcccgtcactctggtatgccatccagtatgccattagtctctcgcttcactaagaatacattagataatatcggacaacaaaaagtgtaatacattgtttataatgaaattatataacacccctggattaagtcagatttatttcaggcggtccccctcaccgccatatttaaagaagagctcgtacgaaagtgcgagcttttttttcgcattttatctgtctgtacggcagtgaacatggtgggcgggtggagtatgttacctgtgaatttctaagctgcctgtacggcagtgaacgcgttcgcaaaggttttaccgcaccccgtcgatttctaagctgcctgtacggcagtgaactcaaatactacacgtttagcccgttgttaataaagcaaaaccatcccattctcctgcagcacccttttttattcttaccttccagcagcactaattatcaacaacttaccttcacctccaaaaatagggttttcaccgttccaccccataaataaaaagtccgtaacccctgacgagattacggacttcaccaacctacctgacaatcagattaatgcgctgcttccgccttgtgcttttgtgcactctggaatccgtaagtcagctcatttttctctttatccagcgcgacggtgacctgaccgccgtccaccagcgaaccaaacagcagttcgttggcgagcggttttttcaggttgtcctggatgacacgcgccatcggacgtgcgcccattgcccggtcgtaacctttctcggccagccagttacgcgcttcctggctcacttcaagagaaacacctttctgatccagctgaacctgcaactcgacgatgaatttatccaccacctgatggatcacgtcagttgacagatgatcgaaccagataatgttgtcgagacggttacggaattccggtgtaaagatcttcttgatctcttccatcgcatcggtgctgttatcctggtggataagaccaatggatttacgctcagtttcacgtaccccggcgttggtggtcatcaccagcaccacgttacggaagtccgctttgcgtccgttgttatcggtcagcgtaccgttgtccatcacctgcaacagaatattgaacacgtccggatgcgctttctcgatttcgtccagcaacagcaccgcatgtggatgcttgatgaccgcatcagtcagcaaacctccctgatcaaaaccaacgtatcccggaggcgcaccaatcagacggctgacggtatggcgttccatatactcggacatatcaaagcgcagcagctcaatgcccaacgctttcgaaagctgtaccgtcacctctgttttcccgaccccggtagggccggcaaacaggaacgaaccaaccggtttatgttcgtgacctaaacctgcacgcgccatcttaatggcttcagtcagcgcctcaatggctttatcctgaccgaagaccagcattttcaggcgatcgccgaggtttttcagggtatcgcggtcactctgagaaacactcttctctggaatgcgcgcaatacgggccaccacggactcaatatccgccacattaacggttttcttgcgtttgcttaccggcatcaggcgtgcgcgagcgcccgcttcgtcgataacgtcaatggctttatccggcagatgacgatcgttaatgtatttcaccgccagctctaccgctgcacgcaccgcttttgcggtataacgcacgtcgtggtgcgcttcatacttcggtttcaggccattgatgatttgaacagtttcttcgatcgacggttcagtaatatcaattttctggaagcgacgcgccagagcacggtctttctcgaaaatgttgctgaactcctgataggttgtcgaaccaattacgcgaattttaccgctggagagcaacggtttgatcaggttagccgcatcgacctggccaccagacgctgcacccgcaccgataatggtgtggatctcatcaataaacaggatgctgttagtgtcctgctccagctgcttgagcaacgctttaaaacgtttttcaaagtcgccgcgatatttagtgcccgctaacagagaaccgatatcgagagagtaaatcgtacagtcagccatcacttccggcacatcgccctgaacaattcgccaggcaagaccttccgcaatcgcggttttaccgacaccagattcccccaccagcagcgggttgtttttacggcgacggcagagaacctgaatagcacgctccagctccttctcacgaccaatcagtgggtcgattccgcccacgcgcgcaagctgattcaggttcgtcgtgaaattctccatacgttcctccccaccagcttgttcttcgctgtttggctggctgccaggatcagaagactgtgtcggctcgtctttacgcgtgccatgagagataaagttcaccacatcgagacggctgacttcatgtttacgcaacagatatgccgcctgcgactcctgttcgctaaagatagcgaccagaacgtttgcaccggttacctcattgcgaccggaggactggacatggaagaccgcacgttgcagtacacgctgaaaactcagcgtcggctgtgtgtcgcgctcctcttcactggcaggcagaacgggtgtggtttgttcaataaaggcttccagttcctgacggagcgcaaccaaatccacagaacacgcttccagcgcctcccgggcagatgggttactgagcagcgccagtaacaagtgctcgacggtcataaactcatgacggtgctcgcgcgctctggcgaaagccatatttaaactgagttccagttcttgattgagcataggcacctcccccaatttttatgcctgcattcaggctttttctagcgtacacagcaatggatgctcattctccctcgcgtacttgttcaccatcgccactttggtttctgcaacctcggcggtaaagactccgcaaatggccttcccctggtagtgaacagcgagcatcaattgcgttgcacgttctacatcataagaaaagaatttttgtaacacgtcaataacaaactccatcggagtgtaatcatcattgactaatatcactttatacatagatggcggttttagcgcgtcgcgaactttttcttccgccagttgatcaaagtccagccagtcgttcgttttacccattgtcagttatcatcttcggttacggttatcggcagaacgccctgccgctgacaagagcttatttgcctgaccaatctactccacatgatagataactatcatctatcgttggcatcagcgacatctgtcacattcctgtcaatagcgttaactgcttcaaatttttgattcatacctgccccctggcccctgtcaaacgcttgacggctcgccctaattctctaaattgtatttctagagttggcgaggttttgaacagccccctctctgaccccggtttattccatcttacttgtataagatttgcgaaggatgtcgaagcatggaaaagggtactgttaagtggttcaacaatgccaaagggtttggtttcatctgccctgaaggcggcggcgaagatattttcgctcattattccaccattcagatggatggttacagaacgctaaaagctggacaatccgttcagtttgatgtccaccaggggccaaaaggcaatcacgccagtgttattgtgcccgtcgaagtagaagcggcagtcgcatagctcttctgtctcattgtgtacatcctaaaggcaaaatgccagcccgatcggctggcatttttatctcaaaaattactctcgtgccagagcatctactggatccagtcgtgccgcatttcgtgcgggtaaccatccaaataaaatcccggtgaccgtcgagcagagaaacgccagcagcagtgccaacggtgaaaaaccaatctcccagccgggtaagaaaagctgcaaggtgaaagcaattaacagtgacagtgttattcccaacgcgccaccgaccaggcaaaccagtacggcttcgatcaggaactgttgcaaaacatcgcttgctcgcgcacctacagccatgcgaatgccaatttcccgcgtccgctcggtcactgacaccagcataatattcattacaccaataccgcccaccaccagcgaaatcaccgccaccagcgtcagaaacagttgtaaagtacgtgtggtcttttcaacagttttcaagacgccgtccatgttccaggtaaagaaatccttctttccgtggcgcagtgaaagtaaacgcgtgagttgctgttccgcctcggcgctgtcaaatccttcttttaccctgacagtaatggagttcagccacgactggcccataactcgcccggacatcgtgctgtaaggtagccagacacgcagcactttactgctaccaaacatcgactgtttttcttccgccacaccaatgactctggcgggcatattgccgaccagaatcacctcgccaaccacatctgctttatgggggaaaagctggcggcgagtattactgtcgagaaccacgacctgcgcacgaccgttcagctgctcctgattaaaggtgtttccttcactgaaggtcatgccatagacattaaaataatcgccgctcacgccattggcactggcagcaacatcaacattgttataacgcaggcgcaggttttgcgagacggcaggtgtggctgaggcgacccacggttgtttttggatggcgattaagtcgtcgtacttcagcgcctgctgatattgcggatcgtcatcgccaaaatctttcccgggatagacatcaatagtattcgtaccaatagaacgaatatccgccagcaccatttgtttggcggcgtcacccaccacgacaatggaaaccaccgacgcaataccgataataatccccagcatggtcagtaaagtacgcattttattcgctgccagcgcccgccatgccatcgtcagcgcctcgttaaaaccgctgacaaactgccgccagccagacaccgtgttgacaacaggctccgtcccgccagcaacattcactttttcaatggcgggaggattgcgcacaatttcgccgtcgcgaatttcgatcacccgctcggcctgagcagcgacctgcggatcgtgggtgacgataatcaccgtatgcccacgatcgcgcagctgatgcaggatcgccatcacctcttcgccagaatggctgtccagtgcgccggttggttcatcggcaagaattacctgaccaccgttcatcaatgcccgcgcgatgctgacgcgctgttgctgaccacccgaaagctgtgccggataatactctgtacggtcttccagccccagccgttgcagcaactcctgggcacgaagcagtcgctgtttccgctcaagaccagcatagacggcgggtacttcaacgttctgctcggcggttaaatgcgaaagtaaatggtaacgctggaaaataaagccgaaatgctcgcggcgcagttgcgccagcgcatcggcgtccagtgtggcaacatcctgaccggcgacgcgataggtgccgctggtggccttatccagacagccgagaatattcatcagggtcgatttaccggaacctgaagcgccaacaatcgctaccatctcaccggcataaatatcgagggtgatgcccttcagcacctcaacctgctcatcaccggcaggatagctgcgacgaatatcctttaattcgagcaaaggcgtcattgtgcagctcctggtttggcctcaccaatcaccacttcatcgcccgcttcaagccctttgacaatctcaacatcggtatcgttacgtgcgccaatcgtcacttcacgctcgcgtgtttcaccattacgcaacaatttgactttataacgattatcgccaaccggatcgcctaacgccgacagagggatcgtcagcacatttttcacatcggtgagctgaatatgcacttgcgcagtcatatccagccgcagcaaaccattggggttggggacttcaaaacgggcgtaatagaaaatagcgtcgttaaccttttccggcgtcggtagtacatccttgatttgcccctcgtagcgcgtcagtggatcgccaagtaccgtaaaccaggctttttgccccggcttcaggtggattacatccgcttcagaaacctgcgcttttaccagcatggtgctcatatctgccagcgtcagaatgttcggtgcttgttgtgcggcaatcaccgtctggccttgcagagtggtgatttgcgtgacttccccggccatcggggcaacgatgcgagtgtaatcgagattggttttagccgtatcgagagaggcctgattgcgcttgatttgcgcgtcaatggtgccaatttgcgcctgtttcacagccatctccgtcgcggcggtgtcgagatcctgctgtgaaaccgcctgcgtttgtgccagacgttgctgacgggaatacgtcacccgcgccagtttcagctccgcttccgcctgctgccgctgcgcacgtagctccatcagcgttgcttcgacctccttaatctggttttcagcctgttcaggatcaataacccctaaaagctggtctttttttactttatcgccaatcgccaccgacagagttttcaactgaccgctgacctgcgcgcccacgtcaaccttacgcagcgcgtccagctttccggtcgccagcacgctttgctgtaaatcaccggggcgcacaatcagtgtctgataagtcggcacgggtgcgttaagaattctccataacgtaatcagtccggcgatgactatcaccagcgcaataacgtaacgcttcttcacggttttccgctttttcataaatattctgaatactccatatgccaatccgggtcattaacttcaacgaaatatcaacaaaaccctaaaatttacgttagtaatcacactattgatgtttggttaagatacgcaatggtgaaatcgacgtcatgtataaccattgatttcatgaatatgtcgcagctaactgaacggacctttacgccatctgaatctctcagcagcctgtcactttttcttagtctggcacgtggacagtgtcggccgggtaaattctggcatcgccgtagttttcgccagaaatttttgctgcgctcgttgattatgccgcgtttaagcgttgagtggatgaacgaactttcccactggcctaatctcaatgtgttgttaacgcgccaaccgcgactgcctgtgcgtctgcatcgcccttaccttgcggcgaatcttagccgtaagcaattgctggaggcgttacgttaccattatgcgttactccgcggatgtatgtcggcggaagaattcagcttatatttgaatacccccgggctgcaactggcgaagctggaaggcaaaaacggcgagcagttcacgcttgagctgaccatgatgatctcaatggataaagaaggtgacagcacaatcctgtttcgcaacagcgaaggtattcctctggcagagatcacgtttaccctgtgtgaatatcaggggaaaagaacgatgtttattggcggactgcaaggcgcaaaatgggaaattccacatcaggaaatccagaatgcgacgaaagcctgccacgggctatttcccaaacgcctcgtgatggaagcggcctgtctgtttgcccaacgtttgcaggtagagcagattattgccgtcagcaatgaaacgcatatttaccgcagcctgcgttatcgtgataaagaaggcaagatccatgccgattacaacgctttctgggaatcggttggcggcgtatgtgatgctgaacgccattaccgccttccagcacagatagcacgaaaagagattgccgaaatcgccagtaaaaaacgggctgaataccgtcggcgctatgagatgctcgacgctattcagccacaaatggccacgatgtttcgcggttaatccgcgcgaccgcgcgccagccacagcacgcgtgagaacatttttttcagcagcgtcggtacggagtccacaccacgacgtccggcctccattgccacttcaatggcaagatcgggtttggaagagcgatggatcgctttcgagataattttgcgcagattcatcggtacattttccgggatttgcgccacgcggtggaacacatcggaaaatccctggcgatacataaaatgttccatatccagcgccggtaacgccgttaaatgttctcgttcggcttcccgatcgttattcaacaggctgcgtaccgtagcggcatatttcttccctgcttcatcgccatcgaccagtacatgccattcaatccccattcggcgggcaaatttaaccagtggctttagcccggactgggcaaactcaatgaccttgatcccttcggcatcaaaatgatgtccgcactgacgcgccagttcattgataacccaggtttccgtttccccttccaccagcaaccagcagcgagcaaacagcgatgacggacggttaaaacgaatgtgaaaggatatgcgtcggctatcttcggtactcaagccactcggccccagacgccaggcggcaacgcgcgaggactcacgtaccagtcggcaaacatgctctaccggcgttaacgaaagcaactcacccgagttggtggtggcaatgcgctgcaatggcagaagattcaacagatgccaggcaactgaaagcataatggggtgtaaacgggtttctggatcttcgatcagcaacaatggacgcgcgtctttatccagtctcaatgtgccttttgcctgcaataaagtagcaaacaggccgagcaaaataacccgatacgagcgccctccaggtcggtcaatcatccggttgatgatgtccagatagcgccagcttcgttgctcattgctggcccgccgccgcattaaacgatatcgcgcctgtccggccccctgctcagagaaataatgctcaagcaactgcaccattgcggaaagtccctgacgaatctgtccatcagagagattttgcggatgtgaggacaactcacgggcgaggaaatcgagctggcgcgcggtgacttccacattgggaacatttggcaccgtgccgttacgaatacggcgcataaaacgggcatcacgcaagcgcagcaccggcattaaacgcaccagatggcgtgcctgatcgttaatatcctcgacatcaatcggatgtccgtctttatcgagaaaactgcgcagtgtcatcacgctgccgtcttccgcactctccccttccagacgataaaaaatacggtgatagccatcggtgcatggcgtccagcacgcttccagcggccgataacggcgaacccgatgtcggcctggcagcgattcgcggaaggtcaaaataatatgcagatgatgttctcgcccgttgatatctcccggcgggaaccagaaatcgtcgcgctcaaaatggtagagatctgattctggcgatagcagcagggttaaggcgtccagcaagctggatttaccccacgcgttctccccaatcaggacgttgttttgttcgagcatcaacgacaaacggttgataccgcgaaaacccacaatttcaacgcgctcaagaatcatatcccctccagaaatatgtgacttatcctttacgctggcagtataacgggaaaggccttgctaatacgtgatgacatcacatttaagcatggcaaatgtctgaaaaatgagcgaataatcgcgttatactccctcttgctgataagtctgcaaaaacaacaaaatcaaataattagcatgataaattattttttattacgcctaaaggattaaatcttttgcttgcactacactgtcaatcagacaaatgactatatggggcaacccgctgttgccctaaatcaaatttactggatttatttatctggtgaatgactcgccttcgtttttaaaatagccgcgcattatttccgtcgtcacttttttacgacgaccctataaaacgaccatatttttcacagggtcaatttttaattgaggtggatatgttcagaaaattagcagctgaatgttttggtactttctggcttgtttttggtggctgtggtagtgctgtactggccgcaggcttcccggaattaggcattggttttgccggcgtggcgttggcgttcggtctgaccgttctgacgatggcctttgctgttggtcatatttctggtggtcattttaacccggcggtcactattggtttatgggctggcggacgttttccggcaaaagaagtcgttggctacgtaattgcccaggttgtcggcggtattgttgcagcggcgctgctgtatttaattgccagtggtaaaacgggttttgacgcggcagccagcggttttgcttctaacggttatggcgagcattcaccaggcggttattccatgctttccgcgctggtagttgaactggtattgagtgcaggtttcctgttggtgatccacggcacaaccgacaaattcgcgccggcaggttttgcgccgatcgctattggtctggccttaaccctgattcacttaattagtattccggtgactaacacttctgttaacccggcgcgcagcaccgcggttgctatcttccagggcggctgggcattagaacaactgtggttcttctgggtggtgccaattgtcggcggcattatcggtggtctgatttaccggaccctgctggaaaagcgtgattaattaacgcagaaggcctggcgtaatgtcaggcctttttttaagatgttgttatatgttgattcatcatcttgttgcgctcctttcatgagctaagccacatattgccactggcgcaaggagcgcgcagggggcggccaatcgccgccgccccctgcccccccgggctctggcgaacaaaatcgccgctgcgcggtgccctcgacttatcccttacggctaccgggtcgggcgcgaggtaacatccctgtaaaacgcgccctcagcccacatccatgtgggctgccccggccttcagggaacgcctcggcgattttgacgccaccaacatcggtgcagtttgtaattaaagcgcaagaatatctttaaatgaaaacgaatactctactgctccttatgcataacatttccttttaattgcaactttactcgtccttccgctttcagtagtgtgtcatcgcgcatttcgacttcatctttgcaaggactgggttttcatgttttctgggctgttaatcattctggttcccctgattgtgggttacctcattccgcttcgccaacaagctgcgttaaaagttattaatcagctattaagctggatggtttaccttattctcttttttatgggtatcagtctggcgtttctcgataacctcgccagtaacctgttggcgattctgcattattctgccgtcagtattaccgttattttactgtgtaatattgccgccctgatgtggctggagcgaggcctgccgtggcgcaaccaccatcagcaagaaaaactcccgtcgcgtattgcgatggcgctggagtcgctaaaactgtgcggcgtagtagtgattggttttgccattggtctgagtggactggctttcttacaacacgcgaccgaagccagtgaatacacgttaattttgctacttttcctcgttggtattcagttgcgcaataatggcatgaccttaaagcagattgtccttaatcgccggggaatgattgtcgccgtggtggtggttgtcagttcattaattggtggtttaattaacgcctttattcttgatctccccatcaataccgcgctggcaatggcctccggtttcggctggtattctctttccggtattttattgaccgaatcttttggtccggtaatcgggagcgcggcgttttttaatgatctggcccgtgaactgattgctattatgttgatccctgggctgattcgccgcagccgctctactgcactgggcttatgcggtgccacatcaatggatttcaccctgcccgttcttcaacgtactggcgggctggatatggtcccggcggcaattgttcacggttttattcttagcctgttagtgccgatcctcatcgcctttttctctgcgtaatacctctctggcggtagatccctgccgccaaaattgcgctaaatcaatctcccttaaagttgcatgaaaaatcccttttatccccgcgttaagcgtcttaaccttaaacatgcatattaaatataactttaaaaggtgtgatcatgttttgtgtgcaatgtgaacaaactatccgtactccggcaggaaacggctgctcatacgcgcaggggatgtgtggtaaaacggcggaaacttctgaccttcaggatttactcatcgcggcgctgcaagggctttctgcctgggcggtaaaagcgcgtgaatacggcatcatcaaccacgatgttgacagcttcgcgccacgtgcctttttctcaaccctgaccaacgttaacttcgattctccgcgtattgtcggctacgctcgtgaagcgattgccctgcgcgaggcgctgaaagcgcaatgcctggctgtagatgccaacgcgcgcgtcgataacccgatggctgacctgcaactggtgagcgacgatctcggcgagctgcaacgtcaggcagcagaatttacccctaacaaagataaagcggcgattggcgaaaacattctcggcctgcgtctgctgtgcctgtatggcctgaaaggtgcggcggcctatatggaacacgcgcatgttctcggtcaatacgacaacgatatttatgcccagtaccataaaatcatggcgtggctggggacctggcctgccgatatgaacgcgcttcttgagtgttcaatggaaatcggccagatgaacttcaaagtgatgagcattctggatgcaggcgaaaccggtaaatacggtcacccgacgccaacccaggtcaacgtcaaagcgacggcgggtaaatgcattctgatttccggtcacgatctcaaagatctctacaacctgctggaacagaccgaaggcacgggcgttaatgtctacacccacggcgaaatgctgcctacgcatggctacccggagctgcgtaaattcaagcatctggtcggtaactacggcagcggctggcagaatcagcaagtagagttcgctcgtttccctggccccatcgtgatgacctcgaactgcatcatcgacccaaccgtaggcgcttatgacgatcgtatctggacccgcagcatcgttggctggcctggcgtgcgtcatctggatggcgaagatttctctgcggtcatcgcccaggcgcaacaaatggcgggcttcccgtacagcgaaattcctcacctgatcaccgtgggctttggtcgccagacgctgcttggtgcagccgatacgctgattgatctggttagccgtgaaaaactgcgtcatatcttcctgcttggtggctgtgacggcgcacgcggcgagcgccactacttcaccgatttcgccaccagcgtgccggatgactgcctgatcctgaccctcgcctgtggtaaatatcgctttaacaaacttgagtttggcgatatcgaaggtctgccgcgtctggtagatgcaggtcaatgtaacgatgcttactcagcgattattctggctgtcactctggcagagaaactgggctgcggtgtcaacgatctgccgctgtcgctggtgctctcctggtttgaacagaaagcgatcgtcattctgctgacgctgctttctctgggcgtgaaaaatatcgtcaccggcccgactgcacctggtttcctgacaccagacctgctggcggtgctgaacgagaaatttggcctgcgttctatcaccactgttgaagaagacatgaagcaactgttgagcgcgtaaggagtttgtcgatgacgatgccaacgaatcaatgcccgtggcggatgcaggttcatcacattacgcaagaaacgccggatgtgtggacgatttccctgatttgccacgattactacccatatcgcgccgggcaatatgcactggtcagcgtgcgaaactcagcggaaacgctgcgtgcttacaccatttcctccacgccaggcgtgagtgaatatatcaccctgaccgtgcggcggattgatgacggtgtcggctcccagtggctgacgcgcgatgtaaaacgcggtgattatctctggctttcggacgcgatgggggaatttacctgcgacgataaagcagaagataaattcctgttgctggcggcaggctgcggcgtcacgccgattatgtcgatgcgtcgctggcttgcgaagaaccgtccacaggccgatgtgcgggtgatctacaacgtgcgtacgccgcaggatgttattttcgccgatgagtggcgtaactatccggtaacgctggtggcagaaaataacgttaccgaaggctttatcgctggtcgtctcactcgcgaactgctggcaggtgtacctgacttagcttcacgtaccgtgatgacctgcggcccggctccgtatatggattgggtagagcaggaagtgaaagcgctcggcgtgacgcgtttctttaaagagaaattcttcaccccagtagcagaagcggcgaccagcggtctgaaattcaccaaactgcaaccggcacgagaattttacgccccggttggcaccacgctactggaggcgctggaaagcaataacgttccggttgtcgctgcctgccgtgcgggtgtttgcggctgctgtaagacaaaagtggtttccggtgaatatacggtgagcagtacaatgacgctgaccgacgccgaaatcgctgaaggttacgtactggcctgctcctgccatccgcagggggatttggttctcgcataatcgccttatgcccgatgatattcctttcatcgggctatttaaccgttagtgcctcctttctctcccatcccttccccctccgtcagatgaactaaacttgttaccgttatcacattcaggagatggagaaccatgaaacaaacggttgcagcttatatcgccaaaacactcgaatcggcaggggtgaaacgcatctggggagtcacaggcgactctctgaacggtcttagtgacagtcttaatcgcatgggcaccatcgagtggatgtccacccgccacgaagaagtggcggcctttgccgctggcgctgaagcacaacttagcggagaactggcggtctgtgccggatcgtgcggccccggcaacctgcacttaatcaacggcctgttcgattgccaccgcaatcacgttccggtactggcgattgccgctcatattccctccagcgaaattggcagcggctatttccaggaaacccacccacaagagctattccgcgaatgtagtcactattgcgagctggtttccagcccggagcagattccacaagtactggcgattgccatgcgcaaagcggtgcttaaccgtggcgtttcggttgtcgtgttaccaggcgacgtggcgttaaaacctgcgccagaaggggcaaccacgcactggtatcatgcgccacaaccaatcgtgacgccggaagaagaagagttacgcaaactggcgcaactgctgcgttattccagcaatatcgccctgatgtgtggcagcggctgcgcgggggcgcataaagagttagttgagtttgccgggaaaattaaagcgcctattgttcatgccctgcgcggtaaagaacatgtcgaatacgataatccgtatgatgttggaatgaccgggttaatcggcttctcgtcaggtttccataccatgatgaacgccgacacgttagtgctactcggtactcagttcccctaccgtgcgttctacccgaccgatgccaaaattattcagattgatatcaatccagccagcatcggcgcgcatagcaaggtagatatggcgctggtcggcgatatcaaatcaaccctgcgcgcattgctgccactggtggaagaaaaaaccgatcgcaagtttctggatacagcgctggaagattaccgcgatgcccgcaaagggctggacgatttagctaaaccgagcgagaaagccattcacccgcaatatctggcgcagcaaattagtcattttgccgccgatgacgccatctttacctgtgacgtcggcacgccaacggtatgggcggcacgttatctgaaaatgaacggcaagcgtcgcctgttaggttcgtttaaccacggttcgatggctaacgccatgccgcaggcgctgggtgcgcaggcgacagagccagaacgtcaggtggtcgccatgtgcggcgatggcggttttagcatgttgatgggcgatttcctctcagtagtgcagatgaaactgccagtgaaaattgtcgtctttaacaacagcgtgctgggctttgtggcgatggagatgaaagctggtggctatttgactgacggcaccgaactacacgacacaaactttgcccgcattgccgaagcgtgcggcattacgggtatccgtgtagaaaaagcgtctgaagttgatgaagccctgcaacgcgccttctctatcgacggtccggtgttggtggatgtggtggtcgccaaagaagagttagccattccaccgcagatcaaactcgaacaggccaaaggttttagcctgtatatgttgcgcgcaattatcagcggacgcggcgatgaagtgatcgaactggcgaaaacgaactggctaaggtaaaaagggtggcatttcccgtcataataaggacatgccatgattgatttacgcagtgataccgttacccgaccgagccgcgccatgctcgaagcgatgatggccgccccggttggggacgacgtttacggagacgaccctaccgttaatgctctgcaggactatgcagcagagctttccggtaaagaagccgccatttttctgcctaccggcactcaggccaacctggtcgctctgctcagtcactgcgaacgtggcgaagagtatattgtcggtcaggccgcgcataactatctgtttgaagccggtggcgcagcggtgctgggcagtattcagccgcaacccatcgacgcggctgccgacggcacgctaccgctggataaagtggcgatgaaaatcaaacccgacgatatccatttcgcccgcaccaaattactcagtctggaaaacacccacaacggcaaagtgctgccgcgtgaatacctgaaagaagcatgggaatttacccgcgagcgcaatctggcgctgcatgttgacggtgcgcgcatctttaatgccgtggtggcttacggctgcgaactgaaagagatcacgcaatattgtgattcgttcaccatttgcctgtcgaaaggtcttgggacgccagtcggttcattactcgtcggtaatcgtgattacattaaacgtgccatccgctggcggaaaatggccggtggcgggatgcgtcagtccgggattctggctgccgccgggatgtatgccctgaaaaataacgtcgcacggttgcaggaagatcacgacaacgccgcctggatggcggagcaactgcgtgaagcaggcgcggatgtgatgcgtcaggacactaatatgctgtttgttcgcgtcggggaagaaaatgctgccgcgttaggcgaatacatgaaagcgagaaacgtgctgattaacgcctcgccgattgtccgcctggtgacgcatcttgacgtctcgcgcgaacaactggcggaagtcgccgcccactggcgcgcattcctggcgcgttaaggagagagacgtgccgcaacgcattttagttctcggtgccagtggctacattggtcagcatctggtgcgcacactcagccagcaagggcatcagatcctggcggcggcacgtcatgtcgacaggcttgcaaagctgcaactggcaaacgtcagttgccataaagtcgatctcagctggccggataaccttccggccctgttgcaggatatcgataccgtctattttctggtgcacagcatgggcgaaggcggcgattttatcgctcaggagcgccaggtggctctcaacgtccgcgatgcgctacgtgaagtaccagttaagcaattaatctttctcagttcgttgcaggccccgccacatgagcagtcggatcatctgcgtgctcgtcaggctacggcggacattcttcgtgaagcgaatgtacctgtgaccgaacttcgggccggaattatcgttggcgcaggttcagcggcgttcgaagtcatgcgcgatatggtctacaacctgccagtgttaacgccgccacgctgggtacgttcacgcaccacgcccatcgcgctggaaaacttgctgcactatctggtggcgttgttagatcatccggccagcgaacaccgcatcttcgaagccgccggaccagaggtgctcagttatcagcaacagtttgaacattttatggcggtgagcggtaagcgccgctggttgatccccatccccctccccacccgctggatttcggtgtggtttctcaatgtgattacttccgtaccgcccaccaccgccagggcgttgattcaggggctgaaacacgatctgctggcggatgataccgcgctacgtgcactcatcccacaacggctgatcgctttcgatgacgcggtacgtagcacgttgaaagaggaggaaaaactggtcaactccagcgactggggctacgacgctcaggcctttgcccgctggcgaccggagtacggttattttgccaaacaggcggggtttaccgttaaaacgtccgccagccttgctgctttatggcaggtagtgaaccaaatcggcggtaaagagcgttatttctttggcaatattttgtggcagacacgggcgttgatggaccgcgcgatcggtcataagctggcgaaaggccgcccggagcgcgaatatttacagactggcgatgcggtagatagctggaaagtgattgtcgttgaaccggaaaaacaacttacgttgttatttggcatgaaagcgccggggctgggacgactgtgttttagcctggaagataaaggcgactatcgtactatcgatgtccgcgctttctggcatccgcacggtatgccggggctgttttactggttattgatgatccccgcgcatctgtttatttttcgcggaatggcaaaacaaatcgccagactggcagaacaaagcacagattaatcgacaaaacctgcgttattctttcatgtttcccattgcatcatgggggaaatcacggaagaatgcgcacgttattttctcaacaacagtggattgatatgaaggtactggttaccggcgccaccagcggcttaggtcgaaacgcggtagagtttttatgccagaaaggcatcagcgtgcgagcgaccggtcgcaacgaggcaatgggcaaattgctggaaaaaatgggcgcagagtttgttccggcggatctgaccgagctggtttcatcacaagctaaagtgatgctcgcgggcattgatacgctgtggcactgctccagctttacctcaccctgggggacacaacaggctttcgatctggctaacgttcgcgccactcgccgcctgggtgaatgggctgtcgcctggggtgtgcgtaactttattcatatctcttccccctccctgtacttcgattatcaccaccatcgcgatattaaagaagattttcgccctcaccgcttcgccaacgagtttgcccgcagcaaagcagccagcgaagaagtgatcaatatgctttcgcaggcgaatccacaaacgcgctttactattctgcgcccacaaagtctgttcggaccgcacgataaagtctttattccccgtctggcgcatatgatgcaccactacggcagtattctgttaccgcatggcggcagtgcgctggtcgatatgacctactatgaaaatgccgtgcacgcaatgtggctggcaagccaggaagcctgcgataagctaccttccgggcgtgtgtacaacatcaccaacggcgagcatcgcacactgcgcagcatcgtgcagaagctgatcgacgagttgaatattgactgtcgtattcgttccgtcccctacccgatgctggatatgatcgcccgcagcatggagcgtttaggccgcaagtcagcaaaagagccgccgctgacccactacggcgtctccaagttgaattttgactttacgctggatattacgcgtgcgcaggaagagttaggttatcagccggtcatcaccctggatgaaggtatcgagaaaactgccgcctggctacgcgaccacggaaaactgccgcgctaatcctgcccgtatttctccagcaatgcttcggcaatcgcctgagtttctgcatccgcttcgccgttatataacgtcgggcggaaatgcatctggaatgccataatcacgcgccgctgctcgcgcggtgtcatatcaggtttaacgtcataaccgtagcgcgccaaaagctccagcaatgacgcggtatctaccggtgtgtgcggcgcgcgcccggcaaggtaaaagttaacccgctgcgcatccggccaggcaccaatcccctgctgcgccagttgctgccagggaaataatggccccggatcgtctttgcgctgcggtgcgatatccgcatgtgccactacgttttccggcttgatgtgataacgggcaataatatctttcgccagtggaataagcgcctgaatctgtgccggttcaaacggggcaaaatatttcactccggccgatttttgccagccacggttttccagctcaatgccaatagaggtgtcgttaaggcgcgttgccccgcgccaggcgctaatccccgcatgccaggccagttcttgttccggcaccagttgccagatgcgcggtttaccgttgtatcgcggtggtaccgcagggaccagataatgcgagctgacctgcttatcggtcagtgtcgccagcgagctatcaaaatcatctgcggtgtagtggatcaccagcactttaatgcgcggatacgccgcctgcgcctggcgtcgggtatcaagctgatatccctctttctcgacaatgcctttttcgcctgcacaccctgccagtaacagagcggcagcgatcagccagaagactcttctcatcgacgcgttttcaccgccgtaccgctgacgctaaccatcagcatactgccgttttgcccgaccgtttcgtagtcgatatcaataccgacgacggcatcggcccccagcgcccgcgcctgggagcctaattcctcaaaggcgatctcccgtgctttacgcagttctttttcatacgcaccggaacgtccgccaacgatatcgcggataccggcaaagaaatcacggaaaatattggcacctaaaatcgcttcgccggtcaccacaccgcaatattcaacgatggtctggccttccagagttggggttgtagaaaattgcatgatcgatctccttgtttgttaagccttcgatctctaaagcattatcagactgatacgctattattgaaaggatatcattattatcgtagaacgctttcagagcgatcgcttataaggaaatcattatgcgctacagcaaattgacaatgcttatcccctgcgcactgctcctcagtgcctgcaccacagtcactccagcttataaagataacggcacacgcagtggtccttgcgttgaaggaggcccggataacgtggcccagcaattttatgactaccgcattttgcaccgcagcaacgacatcaccgccttgcgcccttatctgagcgacaaactggcgacactgcttagcgatgcctcccgggataataaccatcgggaactactgaccaacgatccattctccagtcgcacaaccttgccagagagcgcccgtgttgccagtgcctcaacaatcccgaatcgtgatgcgcgaaatattcctctgcgtgtggatctaaaacagggtgatcagagctggcaggatgaagtgttaatgattcaggaaggccagtgttgggtgatcgacgatgtacgctatttaggcggcagcgttcatgccacggcgggtacgctccgtcagtccatcgagaatcgctaacgccttgatcaaccaataaaccccgtaaattgtccggcatttcgtgaggaatgccgacatttatgctcaccgaccaccgcccccgttattttgtgctatgtttattgaataatgcgctttgcttttaacttttaaagcataaatattgcataattattctgtcaaaggtactatcttcgacctcaatagctatcagactgccagtatacgagtgtcaatgagtattcaattaaacggcattaattgcttctacggcgcgcatcaggcgctgttcgatatcacgctggattgcccacagggcgaaacgctggtgttacttggccccagcggcgcgggtaaaagctcgctgctgcgtgtactcaatctgcttgagatgccgcgctccggtacgctcaacattgcaggcaaccatttcgatttcaccaaaacaccctctgacaaagcgattcgcgatttgcgtcgtaacgttggcatggtgtttcagcaatacaacctgtggccgcatctgaccgtgcagcaaaacctgattgaagcgccctgccgtgtactggggttgagtaaagatcaggcgctggcccgtgcagaaaaactgctggaacgtctgcgtctcaaaccttatagcgatcgttacccgctgcatctttctggtggtcagcagcagcgtgttgctattgcccgtgcgttgatgatggaaccgcaggtactgctgttcgatgaaccgaccgccgcactggacccggaaattacggcacaaatcgtcagcatcattcgtgagctggcagaaacgaatattacccaggtgatcgtcacccacgaagttgaagtggcgcgtaaaaccgccagccgagtggtgtatatggaaaatggtcatatcgtagaacaaggcgacgcgagctgctttaccgagccgcaaaccgaagcatttaaaaactatctctctcactaagattcgggataacaacaatgaaaaaagttctgattgccgcgttaattgcaggttttagtctttccgccacagctgccgaaaccattcgttttgctaccgaagcctcctatcctccgtttgaatcgattgatgcaaacaaccagatcgttggttttgacgtcgacctggcacaggcactgtgtaaagagattgatgcaacctgtactttctctaaccaggcgtttgacagcctgatcccaagcctgaaattccgtcgcgtagaagcagtgatggcgggcatggatatcactccggagcgtgaaaagcaggtactgtttaccaccccgtactatgacaactctgccctgtttgtgggtcagcaaggcaaatacaccagtgttgatcagctgaaaggcaaaaaagtcggcgttcagaacgggacgacacaccagaaattcattatggataagcacccggaaatcactaccgttccgtatgacagctaccagaacgcaaaactggatctgcaaaacgggcgtatcgacggcgtcttcggtgacaccgcagtggtcactgagtggctgaaagataacccgaaactggcggcggtgggcgacaaagtgaccgataaagattacttcggcactggcctcggcatcgcggtacgtcagggcaacactgagctgcagcagaaactcaacactgcgctggaaaaagtgaagaaagatggcacttacgaaaccatctacaacaaatggttccagaagtaattcctgatgaatgaattttttcctttagcaagcgccgccgggatgaccgtcggccttgccgtttgtgcattgattgtcgggctggcgctggcgatgttctttgcggtatgggagtcggcaaaatggcgtcctgtcgcgtgggcaggttcagcgctggtaaccattctgcgtggcctgccagaaattctggtggtgctgtttatctattttggctcctcgcagctgctgctgacgctttcggatggcttcactatcaatcttgggttcgtgcagatcccagtgcagatggacattgagaacttcgacgttagcccgttcctttgtggtgtcatcgctctgtcactgctgtatgccgcctatgcctcgcaaacgcttcggggcgcgttgaaagcggtgccggtgggtcagtgggagtctggtcaggcgctggggctgtcgaaatcggctatctttttccgtctggtgatgccgcagatgtggcgtcatgcgctgcctggcctcggtaaccagtggctggtgctgctgaaagataccgcgctggtcagtttgattagtgtgaatgatttaatgctgcaaacaaaaagcatcgctactcgtacccaggaaccatttacctggtacattgtggcggcggcgatttacctggtgatcaccctgctcagtcagtacattctcaaacgcattgacctgcgcgcgacacgttttgagcggaggcccagctaatgtttgagtatttacccgaactgatgaaagggctacacaccagcctgacgctaaccgttgcctcgctgattgtggcactgattctggcattgatttttaccatcatcctgacgctgaaaacgccggtgctggtgtggctggtgcggggttatatcacgctgtttaccggtacgccgctgctggtgcagatcttcctgatttattacgggccgggccagtttccgactttgcaggagtatccggcactgtggcatttgttgtcagaaccgtggttatgtgcgctgattgcgttatcgctgaacagtgcggcgtataccacgcagctgttttacggtgcaattcgtgcgatcccagaaggtcagtggcagtcctgtagcgccctgggaatgagcaaaaaagatacgctggcgatcctgctgccgtatgcctttaaacgctcgctctcttcttattccaacgaagtggtgctggtgttcaaaagtacctctctggcttacaccattacgctgatggaagtgatgggatacagccagttgttgtacggacgcacctacgatgtaatggtgttcggtgcggcagggattatttacctggtcgtcaacggcctgctgacgctgatgatgcgtctgatcgagcgcaaagcactggcattcgaacggcgaaattaatgtagctgcgtacattcgccgggggggtttgtaggtctgataagacgcgccagcgtcgcatcagacatcagcacggtgcctgtgccggatgcggcgtggacgccttatccggcctacatagtgcataaattcttataatgaagacggacaactcactaaggtatccgtctttttttatttcatttaaattatttaatcatatttattgcatataaattcacttgatggcattgttatcccatgccgcagacacggccaaaaatcataagattgacagacgggagttccatcatgaaaaagttagttcttgccgctttacttgcttcctttactttcggtgcttctgccgcagagaaaatcaattttggcgtttcagccacctatccaccctttgaatctataggtgctaataatgagattgtcggctttgatatcgatctggcaaaagccttgtgcaaacaaatgcaggcagaatgtacttttactaatcacgcgttcgacagcctgatcccgtcactgaaattcagaaaatatgacgccgtaatctccggtatggatatcacgcccgagcgtagcaagcaggtatcgtttaccacgccctactatgaaaactcagccgtcgtgattgccaaaaaagatacctacaaaacgtttgccgatctgaaaggcaaacgtattgggatggaaaacggcaccacgcaccagaaatatattcaggatcagcaccccgaagtgaaaactgtctcctatgacagttatcagaatgcctttatcgatctgaaaaatggtcgtattgatggggtatttggtgacacagcggtggtaaacgaatggctgaaaaccaatccgcaactgggcgttgctactgaaaaagtgaccgatccgcaatacttcggcaccggtctgggcatcgctgtacgtccggataacaaagctctgctggaaaaactgaataacgcgctggcagcaattaaagctgacggtacatatcagaaaatcaatgaccagtggtttccgcagtaattgagactgatgacaaaagtaagattgcctgatgcgctgcgcttatccggcccacatcaactctgcaatgtattgatttagcatgattttgtaggccggataaggcgtacacgccgcatccggcatgaacaaagcgcacctgatcagcaatctgaagccgcacctgcggcttttttattgcttcaccagcagcgtcagcacttcatagtgcgcggtgtgcgggaacatatcaaaaagctgtacccgttcgatgcggtaacctggcagttcgcggatatctttcgccatggtttgggcgttacagctggagtagataataaaacgcggtgccattgttgagagataatcacatagcggtttaccaatgccgcggcgcggcggattaaccagcaccagctccggcacctccccctgagcggtggcaaactgagtggagtccagcgcctgaaattgcaaacgcgttaagcccagttcagcggctgactgctttgcacaggcaatggcctctgatgcaatttcgatcccggttaactgcatgtcaggcgtcgcgcagtgtaaaccaaagccacccacaccgcagaacagatcccacatatgtttaactggcagctgccgtacccagtcgcgcgcggtagcgtacagctggctggcgaccgccggattagtctggaagaaactttgcggacggatccacagcggtacgtcattaaaacgctctgccagcgcctgttgttcagtaaggtagatctccgtctccccttccataatcgccatatgtaccggctgaatattgacggtaataactttcagttgcggtagttgttcctgtaaccacggcagcgccttacgcagttgtgccagtttggtttcagaacgcagtacaaagcgcagcatcatgccgccatcgctctggctttcagtcagcagaatgtatttcagttcgccacgcttacgcgccacgttgtagggtgtcagccccgcacgggcgataaacggttttagcgccgcaaaaacgggcgcaaatgaggcaggataaagcgggcagtcacaaaggtcttctggtgtgccgtcgcgatgcagcataccgagcagtggtttttcaacgctaccactcaccaccattttggctttattacgaaacccttgttccgggcctgacaccggcgcgcaccattcctcaaccggaaaatcggcgagcagatttttaagatcggcggttttagcggagagttgctctggaatcggctgcgttatccactgacaggaacgacagcgacccgcgtcgtaaagtgcgcactgcatacattgaccttcacatcatcaggggcgacgattatacacattattgcaactggaagaaccgccgactggtcgagggaacgaacagcagcatcaggatgagcatatccggcagcttctgcagcatcaggctatggaagatttcacgttttgattcaccgggaatgctgaacagctccggataaccgtaccccagcgaagccgcccacaagtaacttgcggcggtgatttgtgtcagcagatatagccagcgcgcccagcgacgccctttcaccagtgaaaacgcacaccagatctcaatgaaaaccagcaccagactgcttaaaaagaccagcgttaaactccaggtttgtacgctgcgatgaatgaactcgccaataccgcgcacgcccagcgtattgaaaatcatcagcacgtcgaggccacggatcataataatggcgagcgccgccacctgcaccagcgcaggcacattcaggcgagcatgagatgaagatgttttcttaaaaaatcccaacgtttcgtcttccatgaaaacaatgccgcggcatgcgcggcattatgtagccaggttggcaaattttagtgtcttcagccatgtcttgcacgctggatatcgcgtatccgctgtttttctgcgcgagccatcagataccaggcgataaatccgacaattccgaccgcaccgagaattaacgttgcaagggcgttgatttccggattcacccccatccgcacgctggaaaagaccagcatcggtaacgtggtggctcccggcccggaaacaaagctggcgatcaccagatcatcaagcgacaaagtaaaagccagtaaccagccagaaatgatcgcgggcatgatcatcggtagcgtaatgacgaaaaacactttcagcggcgtcgcaccgagatccatcgctgcttcttctatcgagcgatccagttcccgcaatcttgaagaaataacgaccgccacataagccgtacaaaaagtgacatgcgccagccagatggtgagcataccgcggtccgcaggccagccaatggcatgagcaagcgcgacgaataataacaacagcgacaagcccgtgatgacatctggcatcaccagcggcgcggtgatcataaaggcaaagccatttgatccgcgaaacctgccaaagcgcaccagcaccaccgccgcaatagtcccgaggatcgccgccgccgttgccgcacaggcagcaattgtcaggcttaaaccaaccgcactcatcatcgcgtcatcgcgcaataactcaccataccagcgcgttgaccagccggcccacaccgtcaccagcttcgagctgttaaacgaatagataaccagcatcagcattggcgcgtagagaaaggtaaagcccagcagcaaaatcacaatccgccagggcgaacgaactaccggtaaattattcatccgtgttctcccacgcttttttgctggtgtttgtggaaccacattatcggcacaattagcagcagcaacatgatgatcgctaccgccgaggccaccggccagtcgcggttattgaaaaactcttgccatagcacgcgcccgatcatgatgctgtccgggccaccgagcagttccgggatcacaaactcgcccacagccgggataaacaccagcatcgatccggcaataatcccacctttagtcagcggcacgatcacagtaaagaacgttttcagaggtcgtgcaccgagatccagcgctgcttccaccagcgaataatcaatacgaatcaacgcggtataaatcggcagtaccataaacggcacgtaagcgtaaacaatgccgatataaacggccagattggtatgcagaatggtcagcggttgatcgataacccccagccacagcagaaaattattcagcacaccgttgttttttaatattcccatccaggcataaacgcggatcagaaacgaggtccacgacggcaggatcaccagtagtaataagatattacgggtcgaaggcttactgtgcgccaccgcccacgccagcggatagccgatcagtaaacagcaaaatgtcgaaatcgcagccacctgtagcgactggagataagcatcgaaatagagcggatcgtcggtcagttgcagaaaattaccgagattaagagtgatggacagttgcccgtcagcccactccatcagttcggtataaggtggaatagcgcgcgccatctccgccaggcttattttaaagacaatcagaaatggcagcagaaacagcaagatcaaccagatatatggcaacgcaatgaccagtttgcgcccatgcttcatttgcagctgcgacaaccacagcttaaatccgcccggcggtttcgactgggcagcaggttcaagtgtattcatctttgctccttaaaccgtcagcaccacacagctgtccacttcccagcacaaacgcacttcgtcgccccaggtcggtaaccctttacgatgacgatgggcgttttgtagctgggcgctaatcatctgcccacttttcagacgaacgtgatacaccgaaagatcgccgagataggcaatgtgtatcacctcccccaccgcgaagttacaaccattggcgggcggctcttcgcaaagcatgattttttccgggcgcagcgctacgtgtaccggcacgttatcgaccactgaagcatccgcatcgactttcagtggatgcaccagccccggcgaatcaagcaccaggccatcttcctgacgctctttgagtacaccttcaaagacattaaccgaaccgataaattcagcgctgtagcgggtagttggatgctcgtagatctcttccggctcgccaatctggacaaatttcccgcgattcataatggcgatacgccccgccatggtcatcgcctcttcctgatcgtgggtgaccatcacacaagtcacaccgacgcgctccagaatatccaccacttcaagctgcatccggtcacgcagctttttatccagcgcgcccatcggctcatcgagcagtaatagtttcgggcgtttggcaaggcttcgggccagggccacacgctgtcgctgaccaccggaaagctgatgcggtttgcgtttggcgaactcctgcatgtgcaccagcccaagcatctcgttgacccgggtggcaatttccgctttcggtagtttgtcctgtttcaggccaaaggcgatgttctgctccagagtcatatggggaaacaatgcgtaagactgaaacatcatattgatggggcgtagataaggtggcacctgtgacaaatcgacgccatcaagcataatctgtccggcagagggttgttcaaaacctgctagcatacgcagcagcgtggatttaccacagccggaagcgcccagcagcgcgaagatttcacctttgtagatagtcaggctgacatcatccaccgcatgttgaccatcgtaggatttggtgaggttgcggatttctaatagcggcgtcagcgccttacgggttttcgcctgcgggcgagggatagcgtcattcacggctgctctccggcattgaatgtgtgcaagcgcaccatgatggtgcgaattgccggcgggtgtggtgcgcccgcccggcatctaaggctgcggattattttccgctcttcactttggtccacgcgcgggtgcgcacacggtcgattttcggatcctgcactttcagagtgaacagcttcgcacggacatccgcaggcggataaatacccgggttatcacggacttccgcactcaccagcggcgtggctgctttattggcgttggcatagaacacatggtcggaaatatgcgctactacatccgggcgcagcaggtaattcaggaactgataggcttcgtctttgtttttggcatccgcaggcatggcgaagacatcaaagaacgccatcgccccttcttttggaatcgagaacgagacattaacgccattcttcgcttccttcgcgcggtttgacgcctgccagacatcgcccgcccagccaatagcgacgcagatatcgccgtttgccaggtcgttaatgtattgagatgaatggaaataacgaatgttcgggcgcagctttaacagcagatcggtagccggtccggtgtaatcatccgctttagtgctgttgggatctttgccgagataattcagcacggtagcaaaaacttcttctggcgcatccaggaaagagacaccgcagcttttcagtttttccagattttcaggcttgaggatcaagttccagctatcgacgggcgcgttttcgcccagcaccgctttaactttatcaacgttatagccaatcccggtcgtcgcccacatatagggcatagcaaatttattgtcgggatcgtgtttggcgaccaacttcagcagttccgggtcgagattcttccactccggcaatttgcttttatccagcggctggaaaactcccgctgtcagctggcgttcaagaaagcttgctgacggcaccaccaggtcaaagccggtgctcccggccattaatttgccttccagtacttcgttagagtcgaaaacatcgtagacgactttaataccggtttctttttcaaaattggccaccgtgtccggggcgatataatcagaccagttataaatgtggagtgttttttgttcagccgcgagcgtgccgacagagacggccatcagagcacccgcaaccagacccgatagccattttttatttaaggcggtcatatctctttccttctgaaagttcgttaacaaacgaacaaaagttgtcacactgaaagatatgcaataaacgtgcatattttttatcggcgcggtgtaagaaaagagaactctctcccggccagcactgctcgctatataaaagcatcgcaagaataactttagccagggtttgagactatagctcggattaaaaaacggtatttaacaaatttttatgcgtatttgctctatgtgataaagccaaatcgacacaagagaagtgaaataatctttaagaaaaggttaaaaacagcagataattttgcagcgcgcagccactgcaccagcgactgcgtgctcgaaaggagttatcagtggaggaaatagttttcggtaacgttgttttgcccttcatcatcagtcggtaacagcagttgatgggcattagcttcaagaatgaccatcgaaatctgctcttcgctctgacgcacgaaccatgcaaactgctcataggttacgccctgcataacggataaagactggcaaaccaccagctttggcagattatcatcctgcatatcaagaaatgctttcacggtcagcgaactggcattgatggcagataaatccgccgccagcggcaatacggctgaaggtcggacttccgccatggcagaaaacaggatcgtgttatcgatcagatcgattttggcatcaaagacaccgtcgaaattctgcatatggggcagatgcagagcctgacagttatcacattcaaaaaaactcatccccaggtcatcgagccattgacgcagcgtatccagaccaggaacgaccagcgatgtcataattttgtacaacctctttcgataaaaagaccggcacagcttacgcaaaaagcgcaggcaaaaccatgatcagtaatgtgattgcgactaaccacccgttttcaggcaatattctgtcgtagcgtggcgttcgatccagcggatcattttacccgcgatgtcgataccggtggttttttctattccttccagccccggcgacgcattcacctccatcaccaacggcccgcgattagcacgcagaatatccacaccagcaacgtccagcgccatcgttcgcgcggcttttatcgcgatttcacgctcctgtggtgtgatactggcgacgcttgccgcgccgccacgatgcaaattggaacgaaaatcgccctctttcgcccgccgttcaatcgcagcgaccacttcatcgccaacaaccagacagcggatatcgcacccttgcgcctctttgatatattcctgcaccagaatatgcgcgttcagaccgcggaaagcgtcaatcacgctttccgccgcctgacgcgtctccgccagcacgacgccaattccctgcgtgccttcaaccagcttgaccaccagcggcgcaccaccgaccatgtcgattaaatcgctggtatcatccggcgaatgcgcaatgcccgtgacaggcaggtcgatgccctgacgcgccagcagttgcatggaacgcaatttgtcacgcgcccgggcaatggcgaccgactcattgagcggatagctccccagcatctcgaactggcgcagtgccgccgtcccataaaaggtaatggcggtgccaatacgcgggatcactgcgtcaaaatggggtaacttgcggcctttgtagtgaatagaagacgccgcaggatttatgttcatgtagcaagaaagcggatcaagaatttcaaccaggtgaccgcgctgtatagcggcttcacgcagccgcttacacgaatagagcgttccatcccgggacaatatggcaattttcaccctgcacctctctgtcagacctggtcaaaagcccgcgtatcatacatcgacgtggcggttttagcgcgtcgcccaaccctgtttgtgcaaataatccagaataaatgggcggctttctttaatgattgttcggcggatatgatcgctccaggtatcccggcgattattgctgccacgggtgaggtaatattccgccagttgctcgtcatactgcgccagtgcgcctttatccagcggttgatagctgttttcatgcaccaaaatggaggccggtaaacgcggcttaagatccggattatccgcaggccagccaaggcacagcccaaacagcggcagaacatgctgcggtaatttaagcagtttcgtcaccgcttcaatattattgcgcaggccgccgatatataccccgcccaatcccagcgattccgctgcgattaatgcattctgcgccatcattgccgtatcaacgacaccgagcaacagttgttccgccaggccgagctgagcatccggacagatctgtaaatggcggttaaagtcggcacagaacacccagaactccgccgcttgcgctacgtgtttttgcccgccggtcagcgtcaccagttcttcacgtaacgctttgtcggtaatgcgaataatgctactgcactgcaaaaaactggaactggacgtcgcacgggcgctgttaataatcgcctcacgctgcgctctgagagatcccctcataatttccccaaagcgtaaccatgtgtgaataaattttgagctagtagggttgcagccacgagtaagtcttcccttgttattgtgtagccagaatgccgcaaaacttccatgcctaagcgaactgttgagagtacgtttcgatttctgactgtgttagcctggaagtgcttgtcccaaccttgtttctgagc

SEQ ID NO: 31 - DNA, 92351 bp, Escherichia coli
  source 1..92351: mol_type = genomic DNA
gccatgatcaaactcttcaatttaaaagtttgatgctcaaagaattaaacttcgtaatgaattacgtgttcactcttgagacttggtattcatttttcgtcttgcgacgttaagaatccgtatcttcgagtgcccacacagattgtctgataaattgttaaagagcagtgccgcttcgctttttctcagcggcgcggggtgtgcataatacgctttcccgctacagagtcaagcattttttgcttttctctgttgagattctcaggagaaccccgctgacccggcaacgtgtttgccgttgttccgtgtcagtggtggcgcattatagggagttattccggcctgacaagaggaaatttaaaataattttctgaccgcgcattttttattctttgtgcttatttcagcgtcggtttgtcggttaaatgggcgatttctcgggcgaaattcgccacctgctcccaatcggtatagacaacttctttgcgcgtatccgtttcaccgcctgacatcttcataatcagcttgatcataaaacggtcgtaccagcgataacgtgggtaacgcagcgccccggcaatgaccgcgcagcgatcgggacgccattgcgagttcatcagaaacttccgcgcgtagctgttggtctgtggagtacgcttctccggtttgcgcgccaccaggtttacggaataaaaggcgctcggcatcgaattcagtcgcgtcgcatgttttttgacaaattcctggaacgcagagtggtagtgaccatagcgaatagaagcaccaatgaccacacggtcataattttcccattgtggttcttcaatgcggtgcacattggcgacatccgtctggatccccagttctttcagttccgaagccaggtaggaggcaatctcgcgcgtttgtccgtcccttgttgagaaaagaattaatgttttcacgtattactccatcattcacgccagaaagtcggggtaaagagcaccagcaatgtaaagacctcgagacgaccaaacagcatgttggcaatcaggatccatttagccaccgggttcatactggtaaagttatcagcaaccacgccaagccctggccccaggttattcaatgtcgcaacaactgaggcaaaggcagaaaagtcatccacgcccgtggcgataatcgccagcatactgacaataaacaccaatgcataggcggagaaaaatccccaaacggcttcgaggatacgttccggcagtgcgcgattccccagcttaatgctatagacggcgttcggatgcaccagtcgtttcagctcacggttcccctgcttaaacagcagcaggatgcggatcactttcaggccaccgcccgttgaccccgcacaaccgccgataaaagccgaacataaaagcagtaccggcaaaaagagcggccagcgggcaatgctgtcagtcgtaaacccggcggttgtcgccatcgacaccacctggaaaaacgcctggttaattgtcatcagcgccgaactgtagacattatgaaaccacagtacgagggtacaaataaccaccagcgtaaactgtacgccgataaacatgcgaaattccggatcgcgccaataaaccttcagactacgcccacttaacagtgaaaagtgcagaccgtagttacagccggagatcagcaggaagatagcaatgatagtgttaatagtcgggctatcgaaataaccgatactggcatcatgtgtcgagaagccgccaatagcgatagtcgcaaagctatggccgatggcatcaaaggcatccattccggcaaaccacaacgccagcgcacaggcgacggtcagcaagacataaatcaaccacagggttttcgccgtttccgcaattcgcgggcgcattttgttatctttcagcgggccgggcatttctgcgcgatagagctgcatcccacccacgccgaggataggcagtatcgcaaccgctaacacgatgatccccatcccgccaaaccattgcagcatctggcgataaaagaggatggcatgagggagcgaatccagccccaccagcgtagtggccccggtggtggtcaggccagagaaagattcaaaaaacgcatcggtaatcgtgaggttcgggctttccgagaagataaaagggagcgcaccgacgctacccagcacggtccaaaacagcaccactatcagaaacccctcacgggatttcagttcgcccttctctttgcggttcggccaccacagcatagagccaatggcgagggcgacaaaaaaggtctgggtaaaagcgcggcccgctccatcccggtagatgagtgctaccagcccagggataatcatggtccctgaaaataagatgaccagtagtccaacgattcgggtaatggcgcgaaaatgcatctctgccgcttccttagttctgcaaaacgaagtggggattattcttcaatcgctaacaattgcaatgaaccacggctaaaatccgccagctttgcggaaaattcagccactttcgccgccggaagcgccacccgcagcagaacgaatgcctgataatcactgttgataattttgccgtcacactgccccagcaacgcttcaatgccggttaactgactatattcacattgcaaagtatattcggttaatggcgtcttgcgttgggtcgttagctggcgcagcgcctgattcacgccgccgccatacgctttcactaacccaccggtgccaagcaatatgccgccgtagtagcgcactaccacagcggtaatttccccgacgccgctgcccattagctgggcgagcatcggtttacctgccgttcccgccggctccccgtcgtcagagaaacccagctgttgagaatcatccggcgcacccgccacccacgccacgcaatggtggcgggcatcggggtgttctgcccgcaccgattcaacaaacgctttcgccgcctcaacgccatcggtatgcgccaacatcgttatgaagcggctttttttgatctcttcaacgaccgtgaccggtgccgcaggaattaaccagctttccatcacgccagtttcagatcccgggtcatgttttccacgttgttttcgtggatcaccacgttgtcttcgatacgaatgccgccgaacggtttcagtgcttcaattttctgccagttgaagtgcttgctgaactgcccttcacgccacggtgccagtagcgattcaatgaagtagatacccggttcgatggttaacaccatgcccggctggagaatacgggtgcagcgcaggtacggatattttgccggtgccgcgaggtgtgtaccgctatcatcctgcataaaaccggctacgtcatgcacctgcaggcccagcggatgaccgataccgtgcggcataaacggtccggtgagatcgttttcgaccatcgcttcttcactcatatcggtgatgatttgatgtttacgcagcagtttggcgatgcgctgatggaactggatgtggtaatccacatagctaacgcctgctttcatggtggcgatcagcgccagttgttcatcatttacgtctttcaccagctgtgcgtagtcgttgtcgctttttgccgaccaggtacgagtcaggtcagccgcatagccgttatattcggccccggcatccagcaggaagctgcgcatctcttccggcgcctgatgatccagtttggtgtaatgcagcaccgcagcgtgttcgttaagcgccacaatgttgctgtaaggtacgtcggtatcacgatgaccggtcgcggtcagataggcaatgttgatatcgaactcgctcatgccagaacggaacgcttcttctgccgcacgatgaccgttgaccgccattttctgcgcttcacgcatacaggccagttcgtactcggttttgaaggagcgatagtaatgcaggtagtcgataacccctttcgggttgatgttgctggcctcaatacccagttgcagcgcacgctccggcaccggaccgatataaccgatattgccgcgcgcagcaggcagcaggctaccaatgccatcggctttcggcagcgcgatcacttccacatcttcagtccagaaggaggtcggcagcggttcgacgttgtgccagtaatcaaccggcagataaaaccacagtttcggcttgttcacgccatccaccagcaaccagcagtttggcacctgagttaccggcacccacgctttgaattgcgggttcactttaaacggatagggatgatcgtcgagaaaaacattgaacagctcgccggagtgaataagtaacgcatccagcttgaagcgcgccagcgcatcgcgagtccgttcttgtaaggtagctatatgatttttatagagcgaggccagtgattccattttttacccttctgtttttttgaccttaagtctccgcatcttagcacatcgttcatccagagcgtgatttctgccgagcgtgatcagatcggcatttctttaatcttttgtttgcatatttttaacacaaaatacacacttcgactcatctggtacgaccagatcaccttgcggattcaggagactgacatgctttacaaaggcgacaccctgtaccttgactggctggaagatggcattgccgaactggtatttgatgccccaggttcagttaataaactcgacactgcgaccgtcgccagcctcggcgaggccatcggcgtgctggaacagcaatcagatctaaaagggctgctgctgcgttcgaacaaagcagcctttatcgtcggtgctgatatcaccgaatttttgtccctgttcctcgttcctgaagaacagttaagtcagtggctgcaatttgccaatagcgtgtttaatcgcctggaagatctgccggtgccgaccattgctgccgtcaacggctatgcgctgggcggtggctgcgaatgcgtgctggcgaccgattatcgtctggcgacgccggatctgcgcatcggtctgccggaaaccaaactgggtatcatgccgggctttggcggttctgtacgtatgccacgtatgctgggcgctgacagtgcgctggaaatcattgccgccggtaaagatgtcggcgcggatcaggcgctgaaaatcggtctggtggatggcgtagtcaaagcagaaaaactggttgaaggcgcaaaggcggttttacgccaggccattaacggcgacctcgactggaaagcaaaacgtcagccgaagctggaaccactaaaactgagcaagattgaagccaccatgagcttcaccatcgctaaagggatggtcgcacaaacagcggggaaacattatccggcccccatcaccgcagtaaaaaccattgaagctgcggcccgttttggtcgtgaagaagccttaaacctggaaaacaaaagttttgtcccgctggcgcataccaacgaagcccgcgcactggtcggcattttccttaacgatcaatatgtaaaaggcaaagcgaagaaactcaccaaagacgttgaaaccccgaaacaggccgcggtgctgggtgcaggcattatgggcggcggcatcgcttaccagtctgcgtggaaaggcgtgccggttgtcatgaaagatatcaacgacaagtcgttaaccctcggcatgaccgaagccgcgaaactgctgaacaagcagcttgagcgcggcaagatcgatggtctgaaactggctggcgtgatctccacaatccacccaacgctcgactacgccgggtttgaccgcgtggatgttgtggtagaagcggttgtcgaaaacccgaaagtgaaaaaagccgtactggcagaaaccgaacaaaaagtacgcccggataccgtgctggcgtctaacacttcaaccattcctatcagcgaactggccaacgcgctggaacgcccggaaaacttctgcggaatgcacttttttaacccggtacaccggatgccgttggtagaaattattcgcggcgagaaaagctccgacgaaaccatcgcgaaagttgtcgcctgggcgagcaagatgggcaagacgccgattgtggttaacgactgccccggcttctttgttaaccgcgtgctgttcccgtatttcgccggtttcagccagctgctgcgcgacggcgcggatttccgcaagatcgacaaagtgatggaaaaacagtttggctggcctatgggtccggcatatctgctggatgtcgtgggcattgataccgcgcatcacgctcaggctgtcatggcagcaggcttcccgcagcggatgcagaaagattaccgcgatgccatcgacgcgctgtttgatgccaaccgctttggtcagaagaacggcctcggtttctggcgttataaagaagacagcaaaggtaagccgaagaaagaagaagacgccgtcgttgacgacctgctggcagaagtgagccagccgaagcgcgatttcagcgaagaagagattatcgcccgcatgatgatcccgatggtcaacgaagtggtgcgctgtctggaagaaagcattatcgccactccggcagaagcggatatggcgctgatctacggcctgggcttccctccgttccacggcggcgcgttccgctggctggacaccctcggtagcgcaaaatacctcgatatggcacagcaatatcagcacctcggcccgctgtatgaagtgccggaaggtctgcgtaataaagcgcgtcataacgaaccgtactatcctccggttgagccagcccgtccggttggcgacctgaaaacggcttaaggagtcacaatggaacaggttgtcattgtcgatgcaattcgcaccccgatgagccgttcgaagggcggtgcttttcgtaacgtgcgtgcagaagatctctccgctcatttaatgcgtagcctgctggcgcgtaacccggcgctggaagcggcggccctcgacgatatttactggggttgtgtgcagcagacgctggagcagggttttaatatcgcccgtaacgcggcgctgctggcagaagtaccacactctgtcccggcggttaccgtcaatcgcttgtgtggttcatccatgcaggcactgcatgatgcagcacgaatgatcatgagcggcgatgcgcaggcatgtctggttggcggcgtggagcatatgggccatgtgccgatgagtcacggcgtcgattttcaccccggcctgagccgcaatgtcgccaaagcggcgggcatgatgggcttaacggcagaaatgctggcgcgtatgcacggtatcagccgtgaaatgcaggatgcctttgccgcgcggtcacacgcccgcgcctgggccgccacgcagtcgggtgcatttaaaaatgaaattatcccgaccggtggtcacgatgccgacggcgtcctgaagcagtttaattacgacgaagtgattcgcccggaaaccaccgtggaagccctcgccacgctgcgtccggcgtttgatccagtaagcggtacggtaacggcgggtacatcttctgcgctttccgatggcgcagctgccatgctggtgatgagtgaaagccgcgcccatgaattaggtcttaagccgcgcgcccgtgtgcgttcgatggcggtcgttggttgtgacccagcgattatgggttacggcccggttccggcctcaaaactggcgctgaaaaaagcggggctttctgtcagtgatatcggcgtgtttgaaatgaatgaagcctttgccgcgcagatcctgccatgtattaaagatctgggactgattgagcagattgacgagaagatcaacctcaacggtggtgcgatcgcgctgggtcatccgctgggctgttccggtgcgcgtatcagcaccacgctgctgaatctgatggaacgcaaagacgttcagtttggtctggcgacgatgtgtatcggtctgggtcagggtattgcgacggtgtttgagcgggtttaaccacttgccggatgcggcgtgaacgccttatccggtctaccgatcctgcaccaatgtaggcctgataagacgcgccagcgtcgcatcaggcatcgtgcaccgattgccggatgcgacatagatctaaatgccactgaataaagttttagttgccgttcttcccgcctgtcaggggcgggtttttttatatctcagataaatgcaaacgcatcgccaaacaggcgatcttcccgcgcattacgctcactgcaaaacaggtcacgggcaattttcgccatctcaaaacgtccggcaatatagatatcatgctctgccagcgtaccatgatcctgcaataccgccgttaacacggtaccagtacgcccacgccagcctgcttccggttgttcaaccaccggcaccacttgcagaccagggtgctttaacgaaagcgcctcaagctcggagagatcataaagatgctgctcttcacgcccgccccagtaaatggtgatatcacggtttgggttacgcgccaacgctgtcagcaaaatcgagcgggcataagagaacccggtgccgcccgcaatcaaaatcatcggacgctcttcatcatcgcgcagccacgcttctccgtggggaatatcgaccacgatttgatgatctttgaggatgcggtccatgactgctttcgcgtaaaggttgatttcagaagcgccaatatgcagctcgataaaccctttttcatccggcgtcgaggccattgagaacggacgtttgtcgcgctcatccatcactaccatcaaatactgaccagcacgaaaagaaaaggccgcgtctggcacgatgcggacacgatatacggtatccgtgatagcttctaccgaggtcactttacagcttaaggttgtcatgcgctttctctgtcggatcgataaatagggcaaaacaaacgcgcatcaggcgcttttaccgttgttaaaaatagccagttcatcccagatggcgtcaatatgcgcgacaacatctggatcttttttgatgggacgtccccattcacgctgggtttcccccggccatttattcgtggcatccagccccatttttgaacccagcccggagacaggcgaggcaaaatccagataatcaataggcgtattttctaccagaacagtatcccgcgccgggtccatacgggtggtaatcgcccaaatcacatcgttccagtcgcgtgcgttgacgtcatcatcgcaaacgatcacaaatttagtgtacataaactggcgtaagaacgaccagacgcccatcatgacgcgcttcgcgtgtccggcgtactgttttttgatcgtcactaccgccagacgataagaacagccttccggcggcaggtaaaaatcgacaatttccgggaactgtttttgcagaatcggcacaaacacttcgttcagtgcgacacccagcaccgcgggttcatccggcggacgaccagtataggtggagtggtaaatcgcatcttcacgctgggtaatatgcgtcacggtaaataccgggaaactatcgacttcgttatagtaaccggtgtggtcgccatacggcccttccggcgccgtttcaccttgttcgatatacccttccagcacaatctccgcactggcgggcacttcaaggtcattggagatacacttcaccacttcggtcttggtaccgcgcagcaatccggcaaacgcatactctgaaagtgtatccggaacgggggtgactgcaccgagaatcgtggcgggatcggcacccagcgccacagaaaccgggaaacgttcgcccggatgcgccgcacaccactcctgataatccagcgcgccgccgcgatgcgacagccagcgcataatcagtttgtttttaccaatcagctgctggcgataaatgcccagattctgccgctctttatgcgggccgcgcgtcactgtcagcccccaggtaatcagcggcgcggcatcttccggccagcaggtcataatgggaatgcgattgagatcgacgtcatcgccagagacgattttttgttggcagggcgcaccacgcagccgctttgtcggcatgttcaatacttgcttaaactgcggcagtttatcaaacaggtcgcggaaaccttttggcggctccggctctttcagaaacgccaataatttaccaacttcacgtagcgccgaaacatcttcctgccccatgcccattgccacgcgctttggcgtaccgaacaggttgcacagcaccggcattgagtagcctttagggttttcgaacaacagcgcaggcccaccggcacgcaaagtgcggtcagcaatttcagtgatttccagatgcggatccaccgggagcgtgatacgttttagctcaccctgctgttcaagcagtgtcaggaagtcgcgtaaatcgttatatttcatggcgtccattgtagcctcttaatctacgcccattatacggcgttcatctttgcgatgctgtaaatttgttaaattagcgtgaactctgacggtataacgcaaaccggggaatataattaacttagcgtaaagcttttgctatccttgcgccccgattaaacggataagagtcattatgcaatcctggtatttactgtactgcaagcgcgggcaacttcaacgtgcccaggaacacctcgaaagacaggctgtgaattgcctggcaccgatgatcaccctggaaaaaatcgtgcgtggaaaacgtactgcagtcagtgagccattgtttcccaactacctgtttgtcgaatttgatccagaagtgattcataccacgactatcaacgcgacccgcggtgtcagccacttcgtgcgctttggcgcgtcgccagcgatagtcccatcggcggtgattcatcagctatcggtatataaaccgaaagacattgtcgatccggcaaccccttatccgggtgataaggtgattattaccgaaggcgcgttcgaaggctttcaggccattttcaccgaacccgatggtgaggctcgctccatgctattgcttaatcttattaataaagagattaagcacagtgtgaagaacaccgagttccgcaaactctaaaacgcaatcccaaacagtgttttgacattggcatccgtggtggcagccagccatgcggcatcttctccacgccagtgcgcaatacgttgcaaaatatggggcagatgggctggctcgttgcgccgggatgatggctttggcgtgagatcgcgcgggagcagatacggcgcatcagtttcgatcagcaatttctccgccggaatcaacggcaacaattcccgcagctccagcccgcgtcgttcatcgcaaacccaaccggtaatgccgatataaattccacgcgccacgcacgcctgcatctcttcgcgtgtgccggtaaagcaatgaagaaccgcaccaggcagtttatccagccacggctccagcaatgtcataaaccgctcgtgggcatcgcgacagtgcataaataccggcatgtttaattctgcggcaatgcgtagctgagcaacaaaagcgcgttcctgctcttccggcgtcgaaaagttgcggttaaagtcgagaccacattcaccaatcgccaccacttctggctgcgcggccagctcaataatcgcttcttcagtcgcagcttgccactggctgctgtcgtgaggatgtacgcccgccgttgaccaacaggacgaatactgacgcgccagcttttgcgcctgctggctttcacgcaggttagtgccggtgatgagtagcccattaactcccgcgtcaaaagcgcgcgctacaacatcatcacggtctttcgcaaattgcgaactggtcaaattaacgccgatatcaaacatcctgtactccatatgacaaccgccctgacgggcggttgaatttattcttcagttttttcgctttctgcttcagcgtcgttttcctcttcccgatttcgccctttaccaacgtaaaagcgtgagaagaagacaccgatttcaaacagacagtacatcgggatcgccaacagcgtttgcgagaagacatccggcggcgtcagcaacatcccgacaacgaatgcaccaaccagcacatacgggcgttttttgcgtaagtcttctggcgaggtaatccccatccagcacagcagcacaattgctaccggcacttcaaaggagacaccaaacgccataaacagcgccataacgaagcttaaatagctggcgatgtcggtggatacctgcaccccttccggcgcggtattggcaaggaagccaaatgccagcggaaagaccacaaagtaggcgaatgccatgccgatataaaacagcagagagctggaaaccagcagcggcaccaccaggcgacgttcatgcttatacagcgctggggcgataaatgcccacacctgatagagaatcaccggcgctgacagaatcagcgacaccataaaggtcagcttgatcggcgtaaagaacggcgaggccacgtcggtggcgatcatcgttgaaccttgcggcaactgcttgatcaatggcgcggataccaggtgatagatgtcattggcgaaatagaccagacacaggaatatcacgatcaccgcgataatgcagttcagcagacgcttacgcagctcaatcagatgcgtgataagcggttgagtatcttctacagacatgtttacggtttatcactcgacgaaggggaaggtgcagcggttttcggttcagcgtccgcagcaggttttaccaccggctctggcgtggtttctggcttctgttccggcgaactggcctgcgtttgtgcagcggcaggcgttacgccctcatgcgcagcttcattatctttcaccaccgggttatggatggtgtgcgcttcatcgctcgccttttcaggatcgtttgcaacgtaggaacgcttcatcgactccgcggcctggcgtagttcatccatcgacgctttcagttcgggcgtcaggttagtgaggctcgccttttcaacctttttcagactgtcctgaaactcctggagttttaactcctgggtcagttcgttctgcaccgttgtcgccagtgaacgcaacgcgcgaatccagcccgctaccgtttttaccgccacaggcagtcgttgcggccccagaacgacgaggccgatgatgaacaccaatagcagttcgctaaaaccgatatcaaacacggattacacctgctctttatcgtggcgcttcgcgtcttctgttttagcctgttcctgattcgtatccgcctgcttatcggcgatagttttcgcagtaaaatcagcatcctgactggttttatcctgctttggttcatcatcgctcattgcttttttaaagcctttgatcgacgcaccaagatcggaaccgatggagccgagctttttggtgccaaaaagcagtacaacgatgacggcaataatcaataactgccaaatactgataccacccatacatgttcctctgtggtagatgatgattaaacaaagccgcattatacgttacacggcccgccttgagcgatgaaaaaatcagcgtgttttgcgccaaccgacaaaccaggcgatcagaccacctgccattaaccagccgggcatcagcccccactcaggtcggctgaccaacaagaatgtgccacttaatactaacgtagcgccaattccgagaaaataacgcgattgtccctgacgtacatgatttgactgaagctcgcgggcaatcttatcaacactgtgctgtaaatacttgccctggcgcaaactgtcgtaaaccaattcaggcagttctggcattttttcgacccagaacggcgctttttctttaaatgctctcaccagcgcaggaataccgacctgatctttaatccacgactccaggaaaggcttcgctgttttccataaatcgagctgcggataaagctggcgtcctaccccttcgacatagagcagggttttctggagtaacaccagttgcggctgcacttccatattgaagcgacgcgccgtattaaacagatttaacagtacatgtccaaacgaaatttcggccagcggtttctcaaagataggttcacagaccgtacgaatggcaaattcgaactcttcaacgttggtatctggtggcacccagccagaatcgacgtgtagctctgccactttgcgatagtcgcgattaaagaaggcgataaagttttctgccagatagcgtttatcttctttgtttagcgagccaacaatcccgcaatcaatgccgatatatttcgggttttccgggtgttcatagcttacgaagatgttgccagggtgcatatcggcatggaaaaagctgtcgcgaaagacctgagtgaagaacacctgcacgccgcgttccgccagcaatttcatgttagtgccgtttttctccagcgccgcaacatcagacaccggaatgccgtaaatgcgctccatcaccatcatcccttcactacaatagtcagggtaaacttccgggatgtagagcatcgggctgtcttcaaaattgcgccgaagctgaatggcgttggcagattcccgcagcaaattcagttcatcaatcaaggtcttttcgtactcgcgcaccacttcggttgggcgcagacggcgaccatccggcagcaaacgcggcacccagcgagccagacggtagataagtttcagatccgctttaatgaccggcaaaatatccgggcggatgactttaatcaccacctctttaccattcgatttcaatcgcgcggtatgaacctgggcgatagaagcagaagccagcggcttgatttcaaaatcgtcaaaccacgcttctaccggcaagccgcccattgcagcttcaatctgctgcttcgccagcttgccatcaaacggagcaactttgtcctgcaataacgccagctgatcggcaatatgcggtggaaaaagatcgcggcgggttgataacatttgcccgaacttgatccaaaccggccccagttcttgcagggccagtcgtagtcgctcacctaaaagtttgtctttatgccgatttggcatccagaataatgagtatcgccatagccgtagcggcagggtgatacgcattttggggatcagttcatcaagtccgtagcttaaaaaagtgcgaatgatgaaatataggcgccgtacttcacctggcgtcatttagcctccagtttttccagccgtttggtcagggcatcaacagcacgctcgacggcagccgtctcttccgcaaaccaggccacttcaagcggaccgggtgccatacgccactcttcagtaatggcttccgccacataacgttgctggcgcttaatgccgtgatgcaggaactttgcgcctccgcgcatggctttgctgattccttcagcggcgatatcaccggtataaggggccagcagttccgcagggtcgaactctgccagatctgccagcgcaacgaagttttgcaccacctgaatatcgccctgcacttccagctcaccactgcgaatcagtgcggtaagctgctggcgatcgcgaagtttcggcaacacactggcgtaggcgataacggtgcagtcagcatcgcctgcccattcgcccagtacatcaacctggcgttcgctgaacaccagaatcaatgacgtcgaaaagccttttacctccacgcgcaatactttacccagcagacgcgagcgggctgttttcagcgcgggtgagcgatacaggaaggtgttgagcagactttcaattcctgccgtcactaaaggtttaaaaggcatttccggtctcctgtcagaacttataaccacgatgcagcgccacaacccctgccgtcagattgtagtagtcgacactttcgaatccggcatcctgcatcatggctttcagggtatcctgatcgggatgcatacggatggattctgccagataacggtagctgtcggcgtcgttcgcgaccagtgagccaatacgcggcagcacatggaaggagtatgcatcataggctttgctcagcggctcgataattggcttcgagaactcaagcaccagcaggcggccgccgggtttcagcacgcgatacattgaacgcagtgctttatctttgtcggtgacgttacgcagaccaaacgaaatggtgatgcaatcaaaggtgttatccgggaacggcagcgcctcagcgttcgcctgaacatactcaacgttgccaatcacaccgatattacgcagcttctcgcgtcccattttgagcatggattcattgatatcagcaaggaccactttgccagtttctccgaccaggcgggagaatttcgctgtcaggtcgccggtgccaccagccagatccagcacggtctgcccacggcgtacgccgctgcaatcaatcgtgaatcgcttccacaaacgatgaataccaaatgacatcaaatcattcatgacatcgtattttgatgccacggaatggaaaacgtgggcgaccatatccgctttttgttccttcgcgacggtctgaaaaccaaagtgcgtcgtttcttgtgacttatccaccatctcaatgcctgctcatcaaaaaattgttccagaagtgtaacagattgggcgtcgatgccctagatttctacccggcttaactacccctaatgggctagcgcgactgctgattatattcatcatcgcgttgataagcttcatcattcggctgctccggaaccgaccgaagtcgatactcttcatcctggctcaccgcctgttcagccaaatccggattaatctcgcgtttaatttctactcctaaaccgcgaaacgcttctgcctgcgccagcacatttccgcgacctgaagagagttttttcattgcctggcggtagttatcctgcgctttgtcgagactttgaccaatcgcggacatgtcatcgatgaacaaacgcatcttgtcgtacagcttgctggcacgatcggcgatttgctgggcgttgcggctttgatgctcataacgccacaggttggcaatagtacgcaacgccaccagcagcgtagtcgggctaaccagcatgatattgtttttcaacgcttcggtgatcagctccggctggcggtcaagcgccagtaaaaaagcgggttcaacgggaataaacatcagcacgtaatccagagttcgcagccccggcagctgttgataatctttgcgtcccagcaaacggatatggttacgcaccgacgcgatatgttcctgtagcgcgctttcgcgggtgtagtcatcttcggcgttgaaatagcgttcataggcgaccagcgtcattttggcgtcgatcaccacatcttttccctgcggcagccgcacgatgacatccggttgcatccgcgagcgggcgtcattttcgatgctgacctgggtttcatattcatacccttcacgcagaccggaagcctccagcacccgcgtcaatactacctcgccccagttgccctgggttttattgtcgcctttcagcgcgcgcgtcaggttgatcgcttcctgggccatttgcgcgttgagttgctggagattgcgaatttcgtgggtcagggtatggcgttcttgtgcttctttaccgaagctgtcctgaacctgacggcggaaaccgtccagttgttcacgtagcggcgacaacaggctgttcagactctgacggttttgctcatcaacccggcgattgctgtgctcaaaaatacggttggcgaggttttcaaactgctcactgaggcgctgctcgctgttaatcatctggcgaattttatcgtcagcatgttgctgtgcggcttccatccgcgtggttacttcacgcagatcggcctccagagaggtgttaatactttgcaggctgcgcacttcgttattgagtaactcgcactctgcacgccagtgctcgctttgggtaatttgttgttttgccgcgcttaactccgcgaccatctcttcacgttcagctaattgctcggctttttgctgcgcatgttgataactggcaaacagccagccaattgccacacccaccaacgcaataactgcgtaaaccatgattgagaaatccacaacgcctcctgacgcaacaacttacccgcacaaaatagaattgtgctgtacaaacgtccagttggaaaggcatttcctgcgaggcgctacgcaaaaatacaaaaggccgaacgcgtcggccttcagacaggagaagagaattacagcagacgacgcgccgcttccaccacgattttcaccgcttggctttcagtttgtttcatcgtctcagcattcgggatctcttgctgggtgcggttaacgataacacccgctaccataccggcacgcaggccctgacttgcacacatggtcagcagggttgcagattccatttcatagttcattacgcccatcgcctgccactcttccatagaacctttaaagtgacgaactacgcgaccagagtaagtatcgtaacgttcctggcctgggtagaaggtatcagaagaagctgtcacgccaacgtgagttgtcgcgccaatggatttcgcagcttcaaccagcgcagtcgtacattcgaaatcagcgacagccgggaattccagcggtgcgaagtgcaggctcgcgccatccagacggacagacgccgtggtaaccaggacatcacccacattaatatgcggctgaatagcgcccgttgtaccgatacgcaggaaggtgcgaatgcccagctgtgccagctcttcaacagcaatagaggtagacgggccgccgataccggtagagcagacgataacaggtttaccatccagctctgcacgccaggtagtgaattcgcggtgagatgccagcttaaccggcttatccatcagcgcggcgatcttttccacacgatccgggtcgccagggacgatggcaagcgtagccccttgtaaatcgtttttagtgaggccgagatgaaaaacatcagacttggacatatacaactcctctgtgaatcggtttagtcagaagaagcaaaaagacactttaccgaagggtttaacattttttcgtgatactcatcaccatgacgcaaatgcgttgcataaatttacccaccaaaagtgattcaaatcacataaatcactcttcattctgcaggactgcataaaagatgagccgattcaggcaatgtgatttgttgcatgctgactatagttaacattgcgcaacatttttataagggtacggagaataccatggcaacaacacaacaatctggatttgcacctgctgcatcgcctctcgcttcgaccatcgttcagaccccggacgacgcgattgtggcgggcttcacctctatcccttcacaaggggataacatgcctgcttaccatgccagaccaaagcaaagcgatggcccactgccagtggtcattgtagtgcaggaaatttttggcgtgcatgaacatatccgcgacatttgtcgccgtctggcgctggaggggtatctggctatcgcacctgaactttacttccgcgaaggcgatccgaatgattttgccgatatccccacgttgcttagcggtctggtagcaaaagtgcctgactcgcaggtgctggccgatctcgatcatgtcgccagttgggcttcccgcaacggcggcgatgttcatcgtttaatgatcaccggattctgctggggtggacgtatcacctggctgtatgccgcgcataatccacagctaaaagctgcagtggcgtggtacggcaaactgacgggcgacaagtcgctgaattcaccgaaacaacctgttgatatcgcaaccgatcttaacgcgccggttctcggcttatatggtggtcaggataacagcattccgcaggagagcgttgaaaccatgcgccaggcgctgcgggctgctaatgcgaaagcagagattatcgtctacccggatgccgggcatgcattcaacgccgattatcgcccgagctatcatgccgaatctgcgaaagatggctggcagcgtatgctggagtggtttaagcagtatggtgggaagaagtcgctgtaatgagaaaagaccgggtggtattaccacccggtttggatttacccccgacgcaaattctgcgccgcctgcaccatgttcgccagtgccgcgcgggtttctggccagccgcgcgttttcaggccacagtccgggttgacccacaggcgctctgccggaatgcgttttgccgctttcttcagcaaggcttcaatccattctacgctcggtacgtttggcgagtgaatgtcatagacgcctggaccgatttcattcggataatcaaactcttcaaacgactccagcaactccatgtcggaacgcgaggtttcgatggtgatgacgtctgcatccagtgccgcaatcgaatccatgatgtcgttgaactcgcaataacacatgtgagtgtggatttgtgtgtcatctttcgccacggcggcgttgatacggaaggcctccacgccccactggagatatgcatcccagtcgctacgacgcagcggtaaaccttcgcgcagcgccggttcatcaatctggatgatgccaattcctgcggcttccaggtccgccacttcatcacgcagcgccagcgcaatttgtttggcgatggtttcacggctgacatcttcacgcgggaacgaccagcagagaatggtcaccgggccagtcagcatccctttcaccggtttatcagtcagagattgcgcatacttcgcccactcaacggtaatcggtgccgggcggctaatatcaccaatgacaatcggtggcttcacgcagcgggaaccgtagctctgtacccaaccgttttgcgtaaagacaaatccgtcgaggtgctcgccaaagtattccaccatgtcattacgctcggcctcgccatgtaccagcacatccagtcccaaacgttcctgttcaacaatggcctgcctgatatgttccgcaatgcccgtgcggtagttattggcgtcgagattgccctttttgaaatccagacgcagggtacgaatttccgtggtttgcgggaaggaaccaatcgtggtggtcggccacgctggcagtttaaaacgcgcacgctgggcttcagcacgcacttcatagacattcgcacgctggctgtcctgggcggtgatcgccgccagacgcttttctaccgccggattatgtacacgagtagagtgacgacgcgcctgaattggggcgctccactctgccagagctgccgtgtcaccactgttcagcgcatcgcgcagcagtgccagttcatggcatttttgtagggcgaaggcaaaccagcttttcacttctgcatcaagacgcgtttccacgctcaggtcgatggggctgtgcagcaacgagcaggaagatgccacccacaaatcacgtttgccgacaatgtccttaatttgcgcatatttctcggtaagatcggcgcgccagacgttacgaccattgatcagacccgcagacagcaaccagtcagaaggcaggcgcttgtgcagttcagcaacgtcatctttaccatgtacgaggtcaacatgcagaccctgaacaggcagcgcagtaatcgtgtcgagatttggcgttacgccttcaaaataggtggtcagcagcagtttcacctgtccctggagcgcgtcgtaagcgggtttgtatgcgtccagccacgcctgtggtagttccagtaccagcgcgggttcatcaatctgtacccactcgatgccgcgtttcgccagttctgccagcacttgctgataaaccggcagaatgtcgttcagcaggctaaggcggtcaaactgttcacctttcactttccccagccacaggtaagtaaccggccccagcagcacaggcttaacgttgtggcccagcgccagcgcctcgtccacttcctccagcagctgcgtccaggtcagtttgaactgttggcctttaacgaattccggcaccatgtagtgatagttggtgttaaaccatttggtcatttccgctgccgccgcaggttcgccagtcggcgcacgtccacgaccaatacggaacagggtgtcgatatctaccgaaccgtctttgttctgatgacgtggcggaacattacccagcagcagactggtggtcagaacatgatcgtaccaggcaaaatcgcccaccggcagcaggtcgatacccgcttgcttttgttgatcccagtgacgagcacgcagttcacgccctactgtcagcagttcttcacgcgtggagttccccgcccaataactttcttgcgcttttttcagctcgcgacgcaggccaacgcgagggaaaccgagggtgtgattaagaattgtcattatatgccccttatgaatttttagtatttagccgtccagatgtttacacatccataattggcggttactgtatattcctcaagcgcaaattattcatgccgaagtgaaggactttcatgatcgaagtaaaacacctgaaaacgctacaagcgttgcggaactgcggctctctcgcagccgctgcggcgacgttgcatcagacgcaatccgccctgtctcaccagtttagcgatctggaacaacgccttggcttccggctatttgtgcgtaagagccagccgctacgctttacaccgcagggagaaatcctgttgcaactggcaaaccaggtgctgccgcaaattagccaggcactgcaagcctgcaatgaaccgcagcagacgcgtctgcgcattgccattgagtgccatagctgtattcagtggctgacgcccgcgttagaaaatttccataagaactggccgcaggtagagatggattttaaatcgggcgtgacgtttgacccgcagcccgcgttgcaacagggcgagctggatctggtgatgacctccgatatcctgccgcgcagtggcctgcattattcgccgatgttcgactatgaagtgcgtctggtgttagcacctgaccatccactggcggcgaaaacgcgaattacaccggaagatctcgccagcgagacgctgttgatttatccggtgcagcgtagtcgactggatgtctggcggcattttcttcagccggcaggcgtcagcccgtcactgaaaagcgtcgataacaccttattgttgattcagatggttgccgcgcggatgggtattgccgcgctaccgcattgggtagtagagagttttgagcgccagggtctggtggtgaccaaaaccctgggtgaaggcttgtggagccgactgtacgccgccgtgcgcgatggcgagcagcgtcagccgattacagaagcatttattcgctcagcgcgcaatcacgcctgcgatcatctgccgtttgtgaagagcgcggagcgacccacttacgatgcacccacagtgaggccaggatcaccagcgcgcctgtaataaacgttggccagtgcggctgttggtgccagatagccaggtttaccagcagccctgccggaacgtgcatattattcataatgcccagcgttccggcgtccacctgcgtcgcgccgtagttccacataaagtagccaatcccggaagccaccacgccaagaaacaccagaatgccccattgcaacgtggtttgcggcattttctgcgcatttcccagcaagaaccatgcaattaccgccaccagaaacgcgccaagatagaaccacgcaaaggcgttatgctgtggcatcgggcgagtttccatcaggcgtttgtaacccaccatgccgatggcaaaagtgatattggagagttgcaccagcaacaagccagtccagaaatggtcggtgacctgatcatagcgaataatcccggcaccaatcaccgccagcaaggcgctaaaagcatagccccagcgcagacggcgcttactcatgatgtcataaatcagcgtgatgtagagcggcgtcagtacggtgaacagcagcagttcggagaccgtcaggtagagatacgcgcggaaactcagcatatacatcacgccgagctgcatcgcgcccaccagcatatacaggccgaccgttttcaggctattcccacgggtacgcagaaacggcagaaaaacgagtgccgccaggccaacgcgcaccagcaccgcaaaatagctatcgacgtgccccgcaaggtactcgccataaaagctaaaggagaaggcccacagaatcgtggtgatgataagtagcgccacaatggaaaactctttgattaacgagtatccattgtagcgaagtatcaggttgacaactgaccaaataaagaacgattacgataaatagagtttacgcagataatgcggcaccgcgtcgtcggcattagtaccaatcacttccagctcgggatgaaggtctttcagacgctggtgcgcactgcccataatgcagcctttccccgccatcgacagcatttcggcgtcgttcatcccgtcaccaaacgcaatacaatccttcaggctgtagcccagtttcttcgccactgcttccagcgcatggcctttcgacacgccgcccgccatcacttccagacaggttaaggtagagaaactgacgttgacgcgatcgccccagcgagcgttaatcgcctgctccagcggcagcagttgttcatgggaatcgcaggtgaaaaacactttgctgacgccttccggctccagtaatccaggctcatacagcgcatatttgaacaccgcttctttaaaaaagcgcatctcttccgggcgatggcgattcataaaccattcgtcgtcgcgataaacgttagtaatgatgtccggattgtcgttgactacgccaaacagatcgctggcaatgtcgcgatccaggttatgagcaaaaatcagattaccatccagatcgtgaacgcgcgcaccattggaggtaatcatgtaagacttaatctccagattatcgcgaatttgccccacatcaacgtggtgacgaccggtcgcaaacacaaagttgatgccgcgcgcggtgagcagcttcagagtttctttggcgtaaggggataacgtatggtcgggagaaagtaacgtgccatctaaatcagacgcaacaacctggtacataagaaatttaaacctctgtagagcggtttccgctgggtgagttatgcctgttgaaaaaatcaacgatggcgtggagcgcgactgagcgcattgcgtccttttcaaaaaggatctcatggtaagcacctttaattaccaacggtcgtcctccttcgacaggatggcccgcggcggtgcggagttcacaaaaacggtcatgcatgcggttatccaccacgcgttcctcttcagcctgcaagagaagcgttggcgtggcgtcatcacccgcaccggctaacacctgttcgccagccagaatactttcgcgtacccaatggtaggtcggcccaccgacgcgaatcgttgggtcatcagcatagaagcgtaagttacgtcgatatcgctgtctgctgtgggtcagtacgttgatagcaaacggcaacgcgcgccagcgcccggtgcctattgcatagccatcacggaaacgtggatgcgcttcggcccagttgaggatctgccgtgccataaatgacggcatacgaatcacgatcccaaacattggcgcagttagcgcaatggcgtcacatacacctggatggcgttgcagaaataatgtggagatcgcaccgcccatcgaatgtgccagtatatagcgtttacgccacggaccgggctggacctcctgttgccagaatgccgccagatcatcaacataatcattaaagcgattaacatgcccgagatgcggatcggctaacaggcgaccggaacgtccctgcccgcgatggtcgatgattaagacatcaaaccccaaatggaacaggtcataggccagttccgcatattttacgtagctctcaatacgccccgggcagatgactaccacccggtcatggtgctgtgcgcgaaaacggacaaagcgcaccggaatgtcatccacaccagtaaactctgcttcatcacgctgacgccagaaatcagtcagcggtcccatggtaaaagcagcaaacgcgttttctcttgtttcccagtctttttgctgctgaaacatcgggtaatctgcctcttaaaccacgtaaaatcgttttttttagcgtgcctgacacaacgctgcgacagtagcgtattgtggcacaaaaatagacacaccgggagttcatcatgaccttagaatggtggtttgcctacctgctgacatcgatcattttaagcctgtcgccaggctctggtgcaatcaacactatgaccacctcgctcaaccacggttatcgcggcgcggtggcgtctattgctgggcttcagaccggactggcgattcatattgtgctggttggcgtggggttggggacgctattttcccgctcagtgattgcgtttgaagtgttgaagtgggcaggcgcggcttacttgatttggctgggaatccagcagtggcgcgccgctggcgcaattgatcttaaatcgctggcctctacccaatcgcgccgacatttgttccagcgcgcagtttttgtgaatctcaccaatcccaaaagtattgtgtttctggcggcactttttccacaattcatcatgccgcaacagccgcaagttatgcagtatgtagtgctcggcgtcaccactattgtggtcgatattattgtgatgatcggttacgccacccttgctcaacggattgctctatggattaaaggaccaaagcagatgaaggcgctgaataagattttcggctcgttgtttatgctggtgggagcgctgttagcatcggcgaggcatgcgtgaaaaataatgtcggatgcggcgtaaacgccttatccgacttactctgaagacgcgtctggcatcaccgcgaaataatcaaatgaatgccaaatccggcaaataacgccccggcaaaaccatcaatccacttcgccagacgttgataaccacggcgcatttgcggcagggcaaacaggctggcaacgacggtaaaccacgccagtgtttcgataataatcaacgcgaaaatgccccagcgctcagtggtgccgacgttatcgccgacaaacagcgagaataccgaaccaaagtagataatcgctttcggattggcgagattggtcagtaagcctttcaggaaactgcgcccgcttttcgccagctcaacctgtggtgtaggcgcagatacagcctcttttttcagtgcaccgcgtagcatctggtaacccatccagcagagatacaggccaccgcccaccataatcagcgtatgcagccaggccattttttcgataatcaaatgcaggccaagcaacgcaatcccagcccaaaccattacgccgcaggtaatgcccagcacgcccatcatcgcttctttacgggaacgactgacagcggtctgagagacaaaaaagaaatcgggaccggggctcataagcgccacaatgtgcaccatggcgacggtgagaaataacatcaacatacatttgactcgcgggggaaacgtttacggagtcttcatcctggcacttttttatgccgctgactactcttcgtcgtcgccgtcaacatgcgcacgaatcagcgccataaacggtttaccaaagcgttccagcttgcgcatcccaacgccgttaacgctgagcatttcgctggcggtgatcggcatctgttcagccatctcaatcaaggttgcgtcgttaaacaccacgtacggcgggacattgctttcatcggcaatcgatttacgcagtttgcgtaatttggcgaacagtttgcgatcatagttgccgccgaacgatttctgcatcgctttcggtttgagcgccacgatacgcggcacggcaagttgcaaagaggattcgccgcgcagcaccggacgcgcagcctctgtcagttgtagggcagaatgctgggcaatattttgcgtcaccaggccgaggtgaatcagctggcggatcacgctcacccaatgttcatgacttttatcacggcccataccgtagacttttagtttgtcatgaccatagtcgcggatacgctggttattagcgccgcgaatcacttccaccacatagcccataccaaaacgctgattcacacgaccaatggtggaaagggcaatctgagcatcggttgaaccgtcgtactgtttcggcggatcgaggcagatatcgcagttcccgcacggctcctgacgcccttcgccaaaatagttcagcagtaccagacgacggcaagtttgcgcttcggcaaaagcgcccatcgcattgagtttatgacgttcgatatcctgcaactgcccctgcggcttctcttccagacaacggcgcagccacgccatatcggccggatcgtaaaacagcatcgcttccgcgggcaggccatcacgcccggcgcgaccggtttcctgataataggattcgatattgcgcggaatatcaaagtggaccacgaagcgaacgtttggtttattgatgcccatgccgaacgccaccgtcgccaccacaatttgcaggtcatcgcgctggaatttctcctgcacgtcggcgcggacattattttccagcccggcatgataggccgccgcgctaatacccttgctttgcaggcgcgcagcggtgtcttctactttcgcccggctgttgcagtagataatgccggacttaccgcgctgttcctgcacgtagcgcatcaactgatcgagcggtttgaacttctccatcagcatgtagcgaatattcggacggtcaaaactgctgatttgaatcagcggatcgttcagccccagcaggcgcacgatatcctggcgcgtggtgtcgtcggctgtggcggtcagcgccataaacggcagcgtcgggaaccgctggcgcaactgaccgagcgcggcatattccgggcggaaatcgtggccccattgggagatacagtgcgcttcatcaacggctaataacaccggattccagtgcgccagatgctcaagaaagttatccagcatcaggcgttccggggcgatataaagcagacgaatttgcccggtgcggctgcctgtcatcacttcaagttgctgttcgcgggtttgcgtcgagttaaggcacgccgccgccacgccgttggcttgcagttgatccacctgatctttcatcaacgaaatcagcggtgaaacaaccacggtaaggccgtttagcaataaggcaggaatttgatagcaaagggattttccgccaccggtgggcatgacgaccaggcaatcgcgaccggaaagcacagtgtcgataatttcttcctggccggggcgaaactgttggtagccaaaggtttcttgtaaaacctgtttagctccggactccagattcaacacttccgcctgcgccacattcaccccgattgcctgaaataaaaacaggcgctattttcagcgcctgcgcgagaaactgcaatgcttttagtctctgagagggtaatcctggatgctggattccagatttgccaaccactcaaccgttcatcaaaacaaatcgtttagcataacccccacaccgacacgggtctggttgaagttatagtcgatgagcgattcgccatagccgctgtaaacctgagtataaaggcgcacatgtttggtgatcgggtaacttaagcctaactccgcgccgccgtagccggtgttccagttgtactgtcctttcgcactgagcaccgcatcaccgaggtgatagccgattttaagctggtagtaacccatatatttggtgatatccgggttatcgtcagtattacccaccacataccacggcttcacttctaccagccagttaccgttttctgccatcaggcgagtataaaggcggttccagctgcgggaggtcgggtctgaacgcccgttagagtcgtggttataccccatctccacatcgcgcagcgtccaacctgcaaaacggtaatcggtggcaaaaccgaggaacaattgcggttcgtagttggtttcacgaaacggtgaagactcttcgctattggacagttgccaccaggatttttgcgtataagacgcacccaacaccgagttcgggcctaaaatcccacgccacagtggaaatgccaggctcaactgaaactttacttcatccttacgcgcattttccgcccagtcgtaactggcaatcgcttctttgttcagatcgctggtttgggtgtagatgaggtagttggtgtcataaggatagagcgtgaacggattgtcatgctcctgcagcatattggcgataatactgccacgcaccgctggcgcgtcatgcacctctttcaccgttgcctcttgtgcatatactgccataggcaacataaacaccggcaacaaccagccctgcagagtccgcatcggtcgtgttctccgtaacgaattattgataaggtgaatgtttttctgcgggctattttacatacttaactccattgccgttagttatcccttcctaaagtagaaaccaacaacaaagaagcataaaatcaacatttcattaaccaatgaagtgtaaggatgatatgtctgccgtactgaccgctgaacaagccctgaaattagtgggtgagatgtttgtttatcacatgccatttaaccgcgcattggggatggaactggagcgttacgaaaaagagttcgcacagctggcctttaaaaatcagccaatgatggtgggcaactgggcgcaaagcattttgcacggcggggtcattgcgtcggcgctggatgtcgccgccggtctggtgtgcgtaggaagtaccttaacccgccacgaaaccatcagtgaagatgaactacgccagcggctatcgcggatggggaccattgatcttcgcgttgattatctgcgcccaggcaggggcgagcgttttactgctaccagtagcctgttgcgtgcaggcaataaagtcgccgtcgcccgcgttgaattacacaatgaagaacagctttatattgccagtgccaccgccacctatatggtaggttgaagacataaaagcaggtaaactgctgttaccaattaaaaatgagtattcccgatggatgcaaaacaaacgcggcagggcgtattactcgctcttgccgcttattttatttggggtattgcgccagcgtacttcaagttgatttactacgtgcccgccgatgaaatcctgacgcatcgcgtgatctggtcgtttttctttatggtggtgctgatgagcatttgccgccagtggtcctatttaaaaacgctgattcagacgccacagaaaatttttatgctggcagtctctgccgtgctgattggtggcaactggctactgtttatctgggcggtgaacaatcaccatatgctggaagcgagccttggttactttattaacccgctggtgaacattgtgctggggatgattttcctcggcgagcgattccgccggatgcaatggctggcggtgattctggcgatatgtggcgtgttggtccagctgtggacttttggttcgctacctattatcgcgctggggctggcatttagttttgccttctacggcctggtgcgcaagaagattgcggtagaagcacaaaccggcatgttaattgaaaccatgtggctgctgcccgtggcggcgatttacctgtttgctattgccgacagctcaaccagccatatggggcaaaacccgatgtcgctgaatttactgctgatcgccgccggtattgtcactaccgtaccgctgttgtgttttactgccgctgccacgcgcctgcgtctctcaacgttaggctttttccagtacattggcccgacgctgatgttcctgctggctgtgacgttttatggtgaaaaaccgggtgccgataagatggtgactttcgcctttatttgggtggcgctggcaatttttgtgatggatgcgatttatacgcagcgtagaaaaagttaagaattaacatgggtaggccgtttaatgagcctacccactgacttatttatctttttttgaaaaaaattaagataagaaaaagaacaatatttgttacaggaagtacccccaaaactccccagtacttactccatcctagagacatcgtatatctaccaaggatttgacaaaacccaaaacttaaccctatacctatacttcttaaatttaatgtcgtagtcaggcttaaaataaatagaacaaggatggtaatagtccaccacaataaccatgccttaacaaaatcagattttttgctgtaaggttctttacccaagaacaactgccaaaagttaccattccccatatagaatccattccccaagatattgtttatagaataaaaatacattccaattatatttaattaaaatataccccatcaataaaaacttacacactctaaattactactgtatagttatcaatgcaaagactgctatattgcatatatatatgcaaacctcataattcaggtaatatatatattcaaaacaattatatataaaaaacaatgtaaaaaatattcaaatcatccatcagaaatatattctacccatccaggcttgagcatttatcacgctttcagttcataatctatacattaacatcatggtcaatattaataactttgaatgatatcaacctggctttgagttttattctggttattaataatacctatgtaaatatcaatattggagcaaaaagaataagagatactggatgtaaggcaatctactttgtattgatttcattgggtttgacacttttttctattatctctgcagcaattgaaggggtgagatgtgagtcattaagcgtccaactcaacgtggcatggatattattcacaacaattatgttatctgcgattccctcggctaaaatgtcgctgtcagcacactaacttactcacagcgacatcgtatagttacagccagttcttacgcttaaagtacagatacggtgtcaggcccgcgaggatcataaagataatcgcgccagggtagccgaagccccacttcagttctggcataaactcaaagttcatgccatagctggaggcaatccgcgtaggaaaaagtttcctaatcggtaaattcaacattttgttattaacaatgagcaagaccaatcattaacgaggttctcttcagagatgtaatgaaaaaatgtgaagtttacttcttttttaaatatttttttaccctagcatttgttctcgaattgatattgagcttaaatataaccaaggcaaatgcaaatgaataacatattacttccgccaattaatattccctgtacacttttcgaaactattagtttattcgatgatttttctgctgatgatatgcaatatggtgatatggtagaacaagactttctctcactcggcctaagcgatatctcagcaaaagttgatccttacagacttattaaataccatttccctggcccaggttctattaatgttgcttttagtgcctcaagttccggaacaaaaatatcacaacgtgaatgcactgatattttatttgcagaaatgaaagaactagcaaaaatgctttccttttttggacaatataaaacacttatcgaagatctgattgaacattttagatatggaaatggcagcaattttcatagccaacaattaaatttatcttttcatgaaaaaataaataaatatggttataatagtccaatacgaataatcaaagaatgtatcgaaaatggcattaattcaactccctcgacaggataccaacctcttatcctgcaaagcattaaaaccaaattactttcatcaagactaaataaatttaatgacttcgaggacagttttaatggcttaggaatcagtgttcatgatatttcagctcaaaaaatatctcttttaagttttcaaaaatacgctataggatggagtgcaacaattcattttgtagcacaggaccacttcggtcttgatgtaactgatatcaaaaacaagacttacagcaaatatagattttttcgcatatggttctttttacaacggcataaagactttgctttcaaaccttttttcaccaattttaacactatcgaaagaatcgaaaattatctatgaaaagcaaactccagaaaattatattatgtttatttcttctatgctgcatctataatttatggacattgcgtcctgtacagattttgtatacatactctgatgctggcaattcagtctttctggtcgttgatcatctgccatggactgacagcgataaaataaattggtatctgaagcatcagaatgaaattaaaaatcaacatcccctaccagaaggtagttggcatacctggtatgtcattgatatcggtaatggcttcactgactataaaaaatatatcgaagggccgtatgaagatctctactgtttcccgacaattaagagcaatgataattgcatcgtgaaaaattacttaatggttattaatgaatacccttatcgtaacactcatattggtattaacgattttactgagtatcaattaacacaagaaaataaaatagagcgagttttcaatccgcatgactttaaataagacaatttttagaaataagccggataaaaaaatagctttatccggcactcatattacagccagttcttgcgcttaaagtacagatacggtgccaggcccgcgaggatcataaagataatcgcgcctgggtagccgaagctccacttcagttctggcataaactcaaagttcatcccatagctggaagcaacgagcgtcggcggcaggaataccacggataccaccgagaagattttgatgatgcggttctgctcgatgttgataaagcccatcgccgcctgcatcaggaagttcaccttctggaacagggattcgttatgcggcagcagggattcgatatctcgcaggatttcacgcgcctgctccagttgcccacccggtaaacgcgccttgcgtaccaggaagttgagcgcacgctgggtatccatcagacacaggcgaactttccagccgatatcttccagttccgccagcgtggagagcgcctcatcgtactcatcgccctgatgcccttccataattacccggctcaactgctccagatcgctgtagatattttcaatttcatctgccagctgttcgattttggtttcgaacagatccaacagcagctcgtaggcgttaccgtccaccattgactggctacgggcgcgcatacgatacagacggaatgcaggcagttcacgctcacgcagagtaaacagacgaccatcacggatggtaaatgccacagtggagttaccggcgtgatcttccgcatcttcaaagaagaagaaggagtgaatatgcaggccgtcatcgtcttcaaagaaacgtgccgatgcttcgatgtcttccagttccgggcgggttgccaggctctggccaagttcagattgtacgcgcagtcgctcgtcgtcgtccggttcgacaagatcaatccatactgcatttacaaggggttgtgactcttcgacttccagccgggtcagtcggttattttccagttgaaatgcgctcagcatgaccgggactcccaatgcttaaaatatcggacagttcggtgggcacacagaaacaaattgggtttcagaccattaaacagactgactcagcgcgacgggaaaaattgaggtcgctgacaaccgctaaggctatcagcaaaaagggatagccttaggagttgatcctggatgacaggatagtgagccagtatctactgggtgtgtccaaggcgaatgtcctcttagagtgatcgtgcgcgcatgttacgccagcaaaattttgccgtcaacacgcaacagaacaccacagaacaatagttgaacttcgcgctttttggtactcgtcaaggtcgctaacaggataaaaaaatccaacatccaggacctataatggcgcatcggctactcattggtaaaggaatgatcaccttgaatctcaaacggatttttctcgccctcaccttacttcccttgtttgctgttgccgctgatgattgcgcactctcagatccgacgctgaccgtacaggcgtataccgttaatcctcaaacagagcgggtgaaaatgtactggcaaaaagctaatggcgaagcgtggggaacgttacatgctctgctggcggatatgaatagtcagggtcaggtgcagatggcgatgaacggcggcatctatgatgaaagctatgcgccgctcggtttgtacatcgaaaacggtcagcagaaggtggcgttaaatctcgcttcaggtgaagggaatttctttatccgtcctggcggcgtgttttatgtcgcgggagataaagtcggcatcgttcgtctggatgccttcaaaaccagtaaagagattcagtttgcggtgcagtcagggccaatgttgatggaaaacggtgtaattaatccgcgtattcatcccaacgtcgcctcacgtaaaattcgtaacggtgttgggattaataaacatgggaatgccgtgtttttgttgagccagcaggcgacaaatttttatgattttgcctgttatgccaaagcgaaactgaacgttgagcagctgctttatcttgatggcacgatttcacatatgtatatgaaaggcggggcaatcccgtggcaacgctatccttttgtcaccatgatttccgtagagcggaaaggttaaaacgatagttttgtgtcagatactgaagatggcgcagatgccggatgcggcgtaaacgccctatccggcctacatgacgttgcaatttattgaatctgaatgattttttaggccaaataaggtgcgcagcaccgcatccggcaacgttacaccgactccagccgggcataagccgccaccagccatttaataccctggccctgaaatgccacctgcaaacggctatgctcaccgctgccttccatattgacaatggtgccttcaccaaacttagcgtggcgtacgcgctggccgagcttgtagccgctgtcgttctcgaccatcggcgtacccatccgctgatggctgaccgggcggcttaccgtggcgcgcaggcgcacctcttccacacactcttccggcagctcgccaataaagcgcgacgggcgatggtaaacctctttgccatacagacggcgagtttccgcgtaggtcagcgtcagtttctgcatcgcgcgggttacgccaacgtaggccagacggcgttcttcttccagacgcccgccttcatccagcgacatctggcttgggaacataccctcttccataccgacaataaacacctgcgggaactccaggcctttcgccgagtgcagcgtcatcaactgcactgcatcctgccaggtatccgcctgcccctcgcccgcttccagcgccgcatgggagaggaatgcctgcagcggcattaaatcttcatcttcttcgttgtagctgaactggcgcgttgccgtcaccagttcctctaagttttcgatacgcgtctggcctttttcgcccttctcctgctcgtacatggtgcgcaggccggagtctttaattacccggtcagtctgtacatgcagcggcatatcggcagtttcttgcgctaaggcatcgattaattccataaatcgctgcaaggcgctggcagctcgcccggcgagggctttttcctgcaacagttcacgacatgcctgccagagtgttaactggcgatcgcgcgatgtctgacgtaccacgtccagcgtccggtcaccaataccccgcgttggcgtattcaccacgcgctcaaacgccgcgtcgtcgttacggttggcaatcagacgcagatacgagagcgcgtctttgatttcctggcgttcgaagaagcgcatcccgccgtaaatacggtacggcatactggcctgcaacagtgcttcttccagtacacgcgactgggcgttactgcggtagagaatggcgcactcggcaagcgccccgccgttgtcctgccaggttttgatgcggttaaccacaaaacgcgcttcatcgagttcgttaaaagcgcaatagagggaaataggctcaccgtccgcgccatcggtccacagttttttacccaaacgcccgttgttgttttcaatcagggcgttcgcggcgctcagaatattgctggtagagcggtagttctgctccagacggatagtttcagcaccggggaaatcattgaggaaacgctgaatattctccacctgcgctccacgccagccgtagattgactgatcgtcatcgccaacgatcatcactttgccggtatcgcccgccagcaggcggatccacgcatactgaatgttgttggtatcctggaattcgtccaccaggatattggtaaaccgttcgcgatagtgctgaaggatatgcggcttgttaagccacaactcgtgagcacgtagcagcagctcggcgaagtccaccaggcccgcgcggtcacacgcttcctgatacgcctgatacaccttctgccaggtctgctccaccggattaccgtagctttgaatatgatgtggacgcaggccttcatctttctggctgttgatgtaccacattgcctggcgcggcggccactgcttctcgtcgaggttcatcgccttgattaggcgtttgagcaggcgtagctggtcctcgctgtcgaggatctgaaaatccggcggcagattggcgtccatatggtgcgcacgcagcagacggtgcgccagcccgtggaaggtgccgacccacatgccgccctggctggtgcccatcagctgcccgatacgatgacgcatctccgccgccgctttgttggtaaacgtcaccgccataatcgagtatggcgagcagttttccacgctcatcagccaggcgatacgatgcaccagtacgcgcgtcttaccactgcccgcgcccgccagcaccagaaggttgctgcgtggcgcggccaccgcttcgcgctgtttgtcattaaggctgtcgagcaggtaagaaacgtccattggcaccgccgcgtaaaaataggttgggcggagaagcgcaacgccctccgccaaaaagctgggtatatatacagatttgctgattatatcagcgaggtcagagatgccaaccgggaaatttccagatgcggcagtaaacggctgtcccaggtttgcatcagatcgccattttccggtctgatccaacaggcctgcattccgctgcgaattgccccacccacgtcagtggtgagatcgtccccaacatgtaagatctcgccgatcggcacgttgagtttttccgcagccagaaagtacatatcgctgaacggttttgagcgcccgtgcgggccagcgcgcagcacaaactcaaaataatcccccaaaccaaacagttccggctgggcgttaccgttggtgatcgccaccagcggccatttcttcgccagctgttttaaggtgtcgtgagtttgctgcgggacgtcgattcggctgcgccatttggcaaagttgatcattgctgcgtgtgcgcctgcactggcttcttcggcactcagcccggcgtcgagcatcgcttgttcaatcgaacgaaaacgccaacgcgtcacgtcgtgataaatctcgggttccgcttcccgtaccgcctggcgcaggcgttgcagatcttcattctggaagctgcgcagcgccggatgataattttgcacaaaggtaagcgcctctcgctcggtgcgcaaaatcaccggacggttatcgtaaagggtatcatccaggtcaaaggtgagcgccgagatgcgccccaaaggccggtaaaaacgcattatttcccccgtttggcgcgtggatgcgccgcatcgtacaccgaggcaaggtgttgaaaatcaagatgagtatagatttgcgtggtggagaggttggcatgacccagtagctcctgcacaccacgaagatcaccgctcgactccagcatatgcgtagcgaacgagtgacgtaatttatgtgggtgaacgtgattattcagcccttgttttatgccccattcggcaaagcgtttctgcacattacgcgcggagatacgcttgcccagtttcgacagaaaaagcgcgtcgtcttcgctaccaaacaggtcgcgcaaatcaagccagtgctcaatccacgccacagcgttgcgaccaatcggcaggcggcgctctttgctgcctttccccataacccacacttcaccagactccaggtcgaggtgtttaatatccagccccaccagctcagaaagacgcagacccgcgccgtacatcacttccagcattgcacggtcgcgtacagcgaggggatcattgatatcaatatccagcagccgattcatatcgtcgacgtcgatgtttttcggcagatgacgcggcgctttcggtgccgaaacacctttcgccgggttagctttgagttcgttctggctgaccagccagtcaaaaaagctacgtagcgcagaaagccgtaacgccagacttgctgctcccagccctttacggcgactgcgtacagcaaaattgcgcaccaccgtcacatcacattgctgccagctttgcaggccgttttcgctggcaaaattgatgatcgcctcaagctgacgctggtagttaagcagggttatcgggctaagctggcgctccacgctcagataacgtaggtagcgttctacatcggtgtgtaaatcggtcatacgcgttcaatccaacgctccagaagctccggcaacatcagcgcaatttcatgaagtaactgcgttccttgcccttgttgatagtgactggcatcgcgactggtaaacagcacaacacccaaatcagcatcgcttcccagcatcgacatcgccaccgatcccactgctttcgcttcaggtagcaccaccagcagctcaggtccgttaagcggtccaagatagtgctgttcctgccccaaacgctgaatacgcagcggttcgaaagactgacggcttaatgccagatgagtgtggttcgacggcgcacctaagcgccagcgatccggaaacaggcgcagactcgcaccagccaggccgagatcgcgcgcccagcggtgaaagcgcatcagcatatcgtcgagactgctggcggcggtgagactgcgctgcaggtagagtaagcgataaaacaggccttcgttggcgatagcctgttccatcaacaacgccatgttctcttccagaacatgaatatgattacgtgcgcgggccatgtgccattcgaccaacgaaacggtgccgcgtaccggatgcggcacacgtatcgcttctactgcgcgcgcattacggataaaaaactcaggatttttaatcagataatcgacaaccgcccggtcatcaagctccgtgagtgtttcctgcagttcttcccctggttgcttcatagatgaataaatccgtcgtagacatgtaccgccgggccagtcatatataacgggtgacccggacctttccaggcgatatcaagacgaccgccggggagctccacgcgtacttcttcggccagcaaaccttgctgaatccctaccgccaccgccgcacacgcgccgctgccgcaggcctgggtttctcctgccccacgctcataaacgcgtaaacgaatatgctcgcgcttaaccacttgcataaaaccgatattggcgcgctccggaaaacgctcgtggctttccagaacaggaccaagcgtttctaccgccgcggtatcgacatcatcgacctgaatcacgcaatgcggatttcccatcgacaccacgccgcataagattgtctgctcggcggcgcgcataatataggtcttttccgctttgttagcgcgaaacggcacggcggaaggttcgaagttgggttcgcccatatttacgcggaccagatcatcatcggtgacggtcagaaccatccgcccgttggcggtgctgacgcggatatcacgcttattggtcagtcctttcagacgcacaaaacgggcaaagcagcgcgcaccgttgccgcactgcgccacttcactgccatcagcattgaaaatgcgatagtgaaaatccagttcaggatcatacggcggctcaaccaccagcagttggtcaaaccctacccccaggtgccgatcagccaggcgacgaatcagctccggtgaaaaaaagacattctgcgttaccgcgtcgacgaccataaaatcgttgccaaggccatgcattttcgagaactgcatcatttactccaatcacgcgggtacagaaactgacttttagtaattcacctgggatggaccatcgccagtggtgcgatcgtttttatccggcaccgtggattgcgtttgcgtctctaccggtttggtcggcggcggtgcgtttttatctgcaggcgggaaatagagcggacctttcagaccgcagcccgtcaggctgaagagagtaattaatacagtgagtgccttaaacacgtttttcattatggattgcctgtaaagttcatcgctttctgctttctatcatcgcaggagaagacgtaaaagcaagcgtttagcgactctttatgaagtctgaaaagtgaggaaatgctgcgagtataacgcttactcgtggggatttatgttttgctggtagtttcgtgatcggcacctcgcgccaggatggctctatgcactatcgcaatgtagtttgtttgttggcttgttcgttgttcttatcgtcggcatggagcttttaaaagagtggcgcaccatgcaattttgttgtctgaccttagtcgccagtgacatacaactttgccaacctggtgataagagggaataaaatctgatggggctatttacccaactggaaaaatttgaccaaaagcttacgcgcggttatgcccggtgggggcgctgggtatggcggacgttaattgtcgttccggtactggtcgtgttgtggaatataggacaggcagtatggggaggaccaagaggtggagtgattctggaaatccacagtgaaattgaccgcccgatactgggattcagtgttaacggcgtggcgggcgcgaatgcttttgcaaatggtggcggttcaacaacctgttgtggtgatgttagtggggatacggcagaggttatctggacattaagtactactcgtacacagtataatgctggaatgcgtctggagaaacggaatatgacgttacctctccccaaaagagaatggggagaagattttctgcatgtgcattttatgcctggcgataaagtgctgctggggtggagtaaagattctttttctccgtatgaagatcttcacaacggggggtacaagacccgcgttcggcaggatgtgaaagataaactttatggtacagggaaaatgaattgatagatttctataaaaatcacgttcggcagaaagcgtaataatgtggggaatgttagataccggtggtgggacctaagtacaacacgcgaaagacaataaagtaggtaacggtgggcagagtcgcatgttgacacccttcccggcgtcaatccggcacattttaacgtgatcagtcacaccatggcgcagtagctcgtatttatatcgtgaatgaaaacctcaagtttaccccagcaactatcagaaaatagcgatggcctttatagattctgaaaagtgacgatttgccgcaaaagttacgcttacgtgcgaggaattatgttctgctggtagtttcgtgatcggcacctcgcgccaggatggctttatgcactatcgcaatgtggtttgtttgttgtcttgttcattgtttttatcgtcggcatggggatgtcggcttgatccgcctgaacataatatttaccagaaacagggaaaaggcgtggtatacctgcgcccttataaagaaacaaatctttctcttcctgacgtgaattacaaaagtttgcgccgtttacccaatttattaatagacccgacaacactagacaaatgggataaagtacctcctctgactgatctgacaaccgactacctctatgaaggcgcacaggcctggtatcctcattactcctggcatagcgatggtcgctatatcctctacgcgggtgaagttgtgcaaaacccgccagacaaacctcccgtcgatgtcgcctcgttcaaggcgtggggtgattttgccgcagataaacacagtctctatttcgaaggcaagcgcacagataacaatggcgggggaaatcgcttagatatcaaaacactgcatcaggtggaattccggcctccctgggatcctgacttactggggctgatattacgtgacgctaatttcttgtatatcaatgggcatcgcctcgcagatcccgatagtttccgtgtgctggcacaaaagtcatgggatcagcgaggaaagttttctaccgcgtttaatccctgtgtggctatgccatttggcccctgggataccctggctcgtacacggaccaaaatcctgatcaacggcgaacagcttgatgccgacccggacaccttttccgtcgtgcgctggatgcccggctcactcttgacctggcgtgataaaaacgggctacagcgtaaagtcctcgacaaggaaaatctggcgtgggatgaagatttaacaaagcactgtctggatttttctctgctggaaaagaaagtgttctggcgtaaaggacctgcttgtaaacaggaagaattacccggactcgatccggagcagtttcaacccatcagtgatgctgtcgcccagtatcaggactcgctttataccatcatcgaaacagagtctggtgaccgcaagctggaaatcgtgaaacttgatgatcccaatcttattatcaacaaacgtttcaacgccgggaaacgccacggctatttacttacgcgtgccgaagggtggccataccattccggtttacatgtgtttgaatctgacggaccgctgatcttactggataaccgttctccggatgaacgcgaagcccatcttaatgaccatccctttttgcgcagatggtatgcccgcgataaccgctacatttacagctttgatggcgcgcagctctggcgataccgcaccgctgatccgaaacaagttcgcttaatctggaaggaacaacattcgggatatggctatggcgtaaattacaaaacgggatatctggacggaaaaattactgatgacggcgaatttattcctgccccgcgcaatgaggcgacaaaatgaagggtcaaataatcacagttgcactcatcctgttgggacacacatttctgacgcctgctgtacaggccatagggttcgactattacaatgatcacggtgttatgtcttacggtaaaggttattggggggataagaaaatcattgcccagtttccggagatgagcagggccgatttgcgccttgtgaaaaatatctctgggaaaacgggttatataccttccgatgaaataagcataaaaaatgaggaataccactgggtgacagacggccgcgttattctctggcgtggcaaaatcgttagcaatccaccgggaacccccactgtcgatattgccagctttcaggctatgggccgcttcgcggtcgataaatatagcctctattttgacggacagcgcaccgaaagtaatagcggcgcgtcacgtgttgatctggcgacactaaaagctatcgaaggtaactctaccacgctggtggatagtaaaaatctctatttgtccggtcgacgtcaggggagcagcagtaatgttactgtattagaaaaaagatggtggggtattaatccacgtcttatgagtgtaaacagaaatttgtattccaatgatctgcttatccgcagtgggcagaatatttatttaaatggcgttcaccttacggcgaatgcagactcatttgagataattcgctggatacctcattcactgctggtttttcgcgacaataagggtatgcatcgttatccctttggtcaattatcaggcaaagcgatacccgtagatgatgacgtctcttttgaagtaggggaaagtcgcgttcgctggcgtaaacagctcacgtccgaccgtcagtggagcaagtggatagacctaccaggtattgaacctgaacaatttcatctgattactggcaatattgcgcaatataaagatcggctgtatgtaacaaaattatcgatatttggtgaagaccagcttgagataatcccgctggatacgccagacctggtcattgatcgctcatttaatggcggcaaacaacatgcttactttatccgccaattacggtcaaagagcttgcaaattattccagttaacggtccgctaactaaaaacgatcgcttcgcttatgacgatcgcaatgtttatacatggaccgatacagaggtaaggattacgccctccccctgcccggcgaaaactcgtgtcagagaggagaacgtacgtgaagttcaaaacagagacatcattattccggtgacggatgaatcatgccggaacgcagcagcagaggtgcaaactttgaagccctgaccccatgccgctatactgccgccatcacttaaaaacaggatacaacaatgaacgacagtgaatttcatcgcctggctgatcaactgtggctgaccattgaagagcgtctggacgactgggatggcgacagcgatatcgactgcgaaatcaacggcggcgtgctgaccattacctttgaaaacggcagcaaaatcattatcaaccgccaggaaccgctgcaccaggtgtggctggcaaccaaacagggcggctaccattttgacctaaaaggcgatgaatggatttgcgatcgcagcggcgaaaccttctgggatttgctggaacaggcggcgacacagcaagcgggtgaaacagtcagtttccgctaagattgcatgccggataagcctcgctttccggcacgttcatcacgaaaaatattgctgtaatagcggcgtatcgtgatcctgattggcaggcggcatgttaccgatagattttgtgcggaacggaatcacctgttcacgaccatcaaccttcacaatctgatagaactgcggcaggttgaagttgatgaagcttgagccgtaggtgaagcggtcgtgcgatgacgagtagaagcgactgacgtcacgcaccagttcctctttgctgccttcgcagtggtgatacacctcaacccggttgctttcgtcgagaatgtagatattaaagccattctcgtcttgcgtttcttcgaagaagaactggatgatcccttcactagcaaagccgtccaccaccgccggtaatttgacgtgattggtttcaacctgcactgacaagccgtgcagtttgttatgcgaaatagcgccataaaactcgatggcgttttccagtttttgtaccgatacattcaggcgttcgaagaacaacccccaggtttgaccagaaacgcgcagcgccttgaaacgcccggtttcctggcgggtgctggaaaggcgcagttcaatacactcagaaaccagttgctgcacgcgagtacggattaacccgcgcagatgctggctataacagaagacttccacgctatctggcggtgcggcgtcctgatgcattttgccgagaatagttttcagggcttcgatcatcgattgctcgccgttgaagtgcagcgtacgcacttcgttccacgagttgcggtacagcaggtcaacgctacctaccaggcaattttgattctcgccaaagctgaagacatccagcttacggaaatcaaaatgcaccacctgattgcggaacgccgctgtcgggtcatattccaggttaacgataatcgccagatggcggatctcacacgggctgtagagcgccttcggtgtcggtgcaggtaagcgcagcgggaaatggtgcgacacgtcggcgaccatctcctgcaacttaggcaaatcgacaatgccgttacctttaatatacaaacgggtgcgcgaggtcagcaggccgttaaaccatgcccacgccaccagtttgttcaggtaacggttatattccagcggctgatggctgatgatcgactcaatatttggcgcgcggttatacagataccaacctgaacggttagcacggcccggcggcacataaataaaggtcagattcggttccgagagatcgggtgaaatctgcgggtttaccagcgtcactttacctggtaatgcttcaaacgcggcatacagcttacgcgtcagcacgccgatatcctgcggactggcggagacgctaaggttattgcgacgcgcaaagcggatcagattacggtagctctgcatcatcgcgtcgagcaactcgttgtgcgcctcacgcacctgatcaatcttccagttagcacggttatcgagcattgccagacgagcttcgtcccaaccccactcgctcactaactggctcaacactgcgcgacgccagcctacgcaggcgcgttcacggctgagcttttcgcacacttttaaatagaagcagcgacgtactaaatccagacgggtaaaatcttcaatcgccgtcaggtattcagtaacacgctccagcatcatgcagtatggatcgagaccaaacgatacaatctcgccgtcgtgcaaacgctgtttgatatctttcgccagcagacgtggggtcgggtattcccaggaataggcttccagcagcagtgttttcagtaccgctttgtatggggaatcgatactcttgtagagctgccaaaggctggcaccaaagtactcttcagcagaaagcgagcttaagccaccgagatccagccattcatttggcgtcagcacgccctgcgcgtaaagcgtcatcacatagtcgtcgtaatgctcttcttcgtcgcacggcaccatattccacagaatacgcttaccggcgagacgcacggcggtacgataaaattcgtcaagcagcagtatatgctgggtggagccacaatcttcgccccccaggctgccgctttcattatgacggaagcggttttcatcaatcaggaagaagctgacttccacacccagcgaggcggcccagctttccagcagactacatttacgttgtagtaactggcgctcttcgctatcgagccaggattgatgacagacccagatatccaggtcagaggaacaactttgccctacggacgaggtgctgcccatggtgtatacaccagtaattggaagctcacctttcggtgggtcctgtactgacattccacgatacagttcaagctcgttcaggtagtggcgttgagtttcatcaggcgtgtaaaggcaaatgcctttgggaacgttaccatcaaggtaacccggcattagcggatggtgatagtgcaacaatgtcggcagtagactgtagacctgttggaatgcaggccccatagcagcaagcgcgcgatccacacgcaattgatttatggcatccagtctctgtttcagagtctcaatatagaggtacaagacgtatcgcctgatttgctacccgtcatgactgtgattccgccaacatcaacggtaacacgcggcattcgggatatttcgtatgtcaaaggtaaccgttaccacttttcgcgcctggtttttttagtttcacgacgaaaaaatggtctaaaacgtgatcaatttaacaccttgctgattgaccgtaaagaaagatgcgctacatacaagtgtagcaccgtttattctctgtaaattccttattacgacggcgtgaaacgcctgtcaggatccactgccagacctcattttacggtttgcgcaggcgtctacgtttcaccacaacactgacatcactctggcaaggatgttaggatggaccacggatgataatgacggtaacaagcatgttagacaatgttttaagaattgccacacgccaaagcccacttgcactctggcaggcacactatgtcaaagacaagttgatggcgagccatccgggcctggtggttgaactggtaccgatggtgacgcgcggcgatgtgattcttgatacgccgctggcgaaagtaggcggaaaaggcttatttgtaaaagagctggaagtcgcgctcctggagaatcgcgccgatatcgccgtacattcaatgaaagatgtgccggttgaattcccgcaaggtctggggttggtcactatttgtgagcgtgaagatcctcgcgatgcctttgtgtccaataattatgacagtctggatgcgttaccggcaggcagtatcgtcgggacgtccagtttacgtcgccagtgccaactggctgaacgccgcccggatctgattatccgctccctgcgcggcaacgtcggcactcgcctgagcaaactagataacggcgaatacgatgccatcattcttgccgtagccggactaaaacgtttaggtctggagtcccgcattcgcgccgcgttaccacccgagatttctcttccggcggtaggacaaggtgcagtcggtattgaatgccgccttgatgatacgcgcactcgcgagctgcttgccgcgctgaatcaccacgaaactgcactgcgcgttaccgcagaacgcgccatgaatacccgtctcgaaggtggatgtcaggtgccaattggtagctacgccgagcttattgatggtgaaatctggctgcgtgcgctggtcggcgcgccggacggttcgcagattattcgcggtgaacgccgcggtgcgccgcaaaatgccgaacaaatggggatttcgctggcagaagagctactgaataatggcgcgcgcgagatcctcgctgaagtctataacggagacgccccggcatgagtatcctggtcacccgcccgtctcccgctggagaagagttagtgagccgtctgcgcacactggggcaggtggcctggcattttccgctgattgagttttctccgggtcgacaattaccgcaacttgctgatcaactggcggcgctgggggagagcgatctgttgtttgccctctcgcaacacgcggttgcttttgcccaatcacagctgcatcagcaagatcgtaaatggccccgactacctgattatttcgccattggacgcaccaccgcactggcgctacataccgtaagcggacagaagattctctacccgcaggatcgggaaatcagcgaagtcttgctacaattacctgaattacaaaatattgcgggcaaacgtgcgctgatattacgtggcaatggcggtcgtgagctaattggggataccctgacagcgcgcggtgctgaggtcactttttgtgaatgttatcaacgatgcgcaatccattacgatggtgcagaagaagcgatgcgctggcaatcccgcgaggtgacgatggtcgttgttaccagcggtgaaatgttgcagcaactctggtcgctgatcccacaatggtatcgtgagcactggttactacactgtcgactattggtcgtcagtgagcgtttggcgaaactcgcccgggaactgggctggcaagacattaaggtcgccgataacgctgacaacgatgcgcttttacgggcattacaataactctcataacaggaagccataatgacggaacaagaaaaaacctccgccgtggttgaagagaccagggaggccgtggacaccacgtcacaacctgtcgcaacagaaaaaaagagtaagaacaataccgcattgattctcagcgcggtggctatcgctattgctctggcggcgggcgtcggtttgtatggctggggtaaacaacaggccgtcaatcagaccgccaccagcgatgccctggctaaccaactgacggcattgcaaaaagcccaggagagccaaaaagccgagctggaaggcattattaagcaacaagctgcacagcttaagcaggcgaatcgtcagcaagaaacgctggcaaaacagttggatgaagtccaacaaaaggtcgccaccatttccggcagcgatgctaaaacctggctgctggctcaggccgattttctggtgaaactcgccggacggaagctgtggagcgatcaggacgtcacgaccgctgcagcgttgctgaaaagtgcagatgccagcctggcggatatgaatgacccgagtctgattaccgttcgtcgggcaattaccgatgatatcgccagcctttctgcagtttcgcaggtggattatgacggcatcatccttaagcttaatcagctttcaaatcaggtagataacctgcgtctggccgataatgacagcgatggttcgccgatggattccgacggtgaagagctttccagttccatcagcgaatggcgtatcaatctgcaaaaaagctggcagaactttatggacaacttcattacgattcgccgtcgtgatgacaccgccgtaccgctgttagcgccaaatcaggatatctatctgcgcgaaaatattcgctctcgcctgctggtcgcagcacaagctgtaccgcgtcaccaggaagagacttatcgccaggcgctggagaacgtctccacctgggtacgagcttactacgatactgatgatgccaccaccaaagcgttcctcgacgaggtggaccagttaagccagcaaaatatctcgatggatcttccggaaaccctgcaaagccaggcgatgctggaaaaactgatgcagacccgcgtgcgtaacctgctggcacaaccggcagcggggacaacggaagctaaacctgcacctgcacctgcacctgcacctgcaccgcaaggtgatactccggcagccgcgccgcaaggagaataaccatgctaaaagtgttattactctttgttttgctgattgcggggatagtggttggcccgatgattgccggtcatcagggttacgtgctgatccagactgacaactacaatatcgaaaccagcgtcacgggcctggcgattattttgattctggcgatggtagtgctgtttgccattgagtggctactgcggcggatcttccgcacaggcgcacacacccgtgggtggtttgtcggacgtaagcgtcgccgtgcccgtaagcagaccgaacaggcgctgctgaaactggcggaaggcgattatcagcaagttgaaaagctgatggcgaaaaatgccgatcacgcggaacaaccggtggtgaactatctactggctgccgaagccgcgcaacaacgtggtgatgaagcacgcgccaaccaacatctggaacgcgcagcagagctggccggcaatgacaccattccggtagaaatcacccgtgtacgtctgcaactggcccgtaatgaaaaccatgctgcacgccacggcgtggataagctgctggaagttacgccacgccatccggaagtattacgtctggcggaacaggcgtatatccgcacaggtgcatggagttctctgctggatatcatcccatcaatggcgaaagcccatgttggtgatgaagaacatcgtgcaatgctggaacaacaggcatggattggcctgatggatcaggcgcgtgccgataacggtagtgaaggtttgcgtaactggtggaaaaaccaaagccggaaaacgcgtcatcaggtagcgttgcaggtggcaatggcggaacatcttattgaatgtgacgatcatgatactgcccagcaaattatcatcgatggcctgaaacgccagtacgacgatcgcctactgctgccgattcctcgactgaaaaccaacaatccggaacagctggaaaaagtgctgcgccagcagatcaaaaacgtcggcgatcgcccgctgttgtggagcacactgggccagtcactgatgaagcacggagaatggcaggaagcatcgctcgccttccgcgcggcgctgaaacaacgtccggacgcctacgattacgcatggcttgccgacgcgctggacagactgcacaagccggaagaagctgcagcgatgcgtcgcgacggtttgatgttaacgttgcagaacaacccaccacagtagttccttctcacccggaggcaagcacctccgggacctttctgatgcataaaaaaacgcctgctcttattacggaacaggcgttaaaacaggtctgtatgacaacaagtgggtgcttcactcaacgttgtgtccatggtgtctgatgaggcataagcgacatctgtcagtggacgataagcaccgtaaacggctctgcgtcattccggagtttatgaggcactaaggcgaacataagagatggaatgagcatctacccgtttattatgccacagagaatcgggaaataacatcccttaacacttgttatgagataattctgtaatcctctttgcttcctgagtaataacttcctgagtgaatatttaacctgagcttgatcctacacatacttattatgaatgataaaattcattcaattaataacacatatattaattgccgttaaaactaaaaaaagcatcaataatcaacgcgatataataaacctgccttacatatcaactgcgccagaggtaggattgaaaacgctctcctgattttccaattcattttctggataaataaataatttatttttgtcactattatttatgtaatcatcctgtcagggagagggatctcaattatcaatgcttaattacgtcatcattttgatgacatgaaaccggagcattttgcatggaattttcgttttcacccaaacttcttgttgttgctgtcgccgccgctcttcctctcatggccagcgcagcagataccccgtcaactgccaccgcacgcaaaggctttgccggatacgatcacccaaaccagtatccacagaacgctgcaatttattgaatttgcacgatcatgtaggccggataaggcgtttacgccgcatccggcaatcaaccgcaggcggccacaaaatggccgcttttttacttattcaccaccagcaaatgtgcctgcataatgtcactggccgggcgaccgtgcgccagcaaatcagccattgctttaagatatggcggtagatggcggaaataacgctgatacccggcacacaaataattcagccccggtttgccgctggcatcgagcatgaagcggtgtttcgggcagcctccccagcacgcttttaacacgttacaactgcgacactgcgccggtaattgcttaaatttatcttcaccaaacacctgctgttgcggggaatcgatcatttctgcaattgtttgctgatgcatattccccagccgatattgcggataaacatagtgatcgcaggcgtaaacgtcgccgttgtgctcaacaatcaccgagcgcccacaggttggctgatgatggcaaaccgcacccggcgcaccgacaaaattggcaaacgcccattcgatattcatcacgaaaatcttgccgacgtcgcgtttgatccagtggtcgaatatcgccaccagaaattcaccaaattcatcggggcgcaccgaccattccttcagttccccctgaatatcaccaggcgcatgtagtttcagtccatcgctggcagctgtttcatcacccaggcgctcgaccaccggaataaactggatgaattcgactcccgcatcgcacaaaaaatcataaacctgcaacggttgctgcgcgctggtgcggttgacgcagaccagcacgttatagtcgacatgatgtttttgcagcagcgtcagggcacgcatcaccagcttatgcgttggtctgccacctttggtcacgcgatattgattgtggatctcagccggaccgtccagcgataacccaacaagaaaatgattttctgccagaaatgcacaccatttatcatcgagcagcacgccgttagtctggaagctgttacttatcttcctgccagcaccgtatttcgcctgtaactttacggcacggcggtaaaactccagcccgagtaacgttggttcgccgccctgccaggtaaaagccacttcgttttgcggttcgctggcagcgatatagtgacggacatacgcttccagcgtgtcatcgtccatatgcgtgactggcttttcgcggtaaagggattgtttttcgagataaaaacagtagtcacagttcagattacaatcggaaccactcggtttcgccatcacatgaaaagcacgcgttggaacctgttgcagcatggtcactccttgcctgaagtcatccttcaatacgttaagggcgaaatcataccgtggggcaatgagttattacgggcgtttattgcgaagggagggtgacgaaatgcacagaaaacaaaaaaccccgccgaagcggggttcaaaattggtcggcgagagaggattcgaacctccgacccactggtcccaaaccagttgcgctaccaagctgcgctactcgccgaaatactgctttttgaatttttagttcaattctttaaagtcgtggtgcgaggggggggacttgaacccccacgtccgtaaggacactaacacctgaagctagcgcgtctaccaattccgccaccttcgcattgtcacaacttctaataatggggtggctaatgggattcgaacccacgacaactggaatcacaatccagggctctaccaactgagctatagccaccactacaaatcttgttacgcggtattactaccaccgcagctcaagcgccgggactaaatggcgcgcccgacaggattcgaacctgagacctctgcctccggagggcagcgctctatccagctgagctacgggcgcttagcgccgttgcgggggtggataatacggacttcccacccctctgtctagtccctttttaaataaattgcgcgtttggttacggtttgtgcgttttgctgcttattcctccagtttatgcgctttcccgtggcgattaaggccaaaaactttataaatcgccgtcaccgccagcataaagatgatgccaacaaacagcgacatacgcgtatcttcattaaagtacatgccgatcaaaacgcaaatcaggaatgccattgttacgtagttggcccacgggaacaggattgagcggaacggatggctggcaatcgccgctttatgtgcacgccgaaaacgcagctggcttatcaatatcacaaaccatggcaccatccccggaagcacgctggcactgtagacgtagacaaacacacgctgcggattgggaatgatgtagttcaggcatgagccaattagcagaatagcaatagatactgccacacccgcaacgggtacgccgtgacgggaaactttcgccatcgccgccggtaactgacggtttttcgccagtgcgtagagcatacgtccgcaactgtacatgccgctgttacagccagagagcgcagccgtcagcaccacaaagttgataatgcccgccgctgcggtaataccgattttggcaaaagtcagtacgaacgggctgccgttgctgccaatttcattccacgggaagatggtgacgataacgaaaatcgcgcctacgtagaaaatcaggatccgccacagcactttgcctacggcactgcgcagcgtcacctgcggattcttcgcttcaccggcagtaatgccaatcagctccacgccctggtaggacgccaccacaatacacagcgcggtcaggaaccctttccagccacccgcaaagaaaccgccatgctctgtgagattgctaaaaccaatcgactgcccgccattgccaaagccaaagaaaatcacgcccaggccaatgacaatcatcacgataatcgtggtgactttgatcatcgcgaaccagaactcgatttcgccgtacaaccgcaccgccgccagattcgccaacgccaccagcgccactgcgatcaatgcgggtatccactgcgccatctccgggaaccagaactggacataaacgccaatggcggtgatttctgagatccccaccgccatccacataaaccaataagaccaggcggtgagataaccaaagaacgggctcatataacgatgcgcataaacggcgaacgaaccggtaaccggttcgaggaacaacatttcgcccattgaacgcatgatgaaaaagacgaatagcccggcgatgatataggccaacaatacggatggcccggcccatttcaaggtactggcggcccccataaacaggccgacgccaatggtgccccccagggcgatgagttcgatatgtcgagcttccagcccacgctgtagctctggtttgttatctgccataaatcctcgtgttgtgtttgcatgctttccggtgttaccggttatcgttatgggtacatcgagtgttgcgaatgttttcgtaattcaggagaaatggcaaataaagcattaaaaatttgaatgctttgtgtaataaaaaagcagacaggcgacggagtgaccactccgtcgctttacaaagagaggaaaatcagaggttgccggtgtagtgccagcgtaaataacgcagcaaacgaagctgacgcttaatgcggctcggctgcgaaagcaggcggtagagccactccagtcccagcgtttgccagattttcggtgcgcgttttacgtgaccggtgaaaacatcgtaagtcccgccaacgcccatatacagcgcatctggatgcaccagacggcagtcgcgcatgaagatctcctgctttggcgatcccatcgcaacggtgacgatttgcgctccgctggcatgaatgcgttcaaacagcgcctgacgctgctcgggtttaaaataaccatcctgactgccaacgatattcacattccactggttgcgcagtttagcttcagtttgcgccagcacttcaggtttaccgcccacaagaaataccggcgtcccttctttgcctgcgcgcgccatcagctcttcccagagatcagcaccggcaacgcgggaaacctgcgcctgcgggtactttttacgtactgaacgtacaacgctgatgccatccgcatatttaaattcggcagcgttaattagctccctgacctcagcattatcttcaatggtcagcattttttcggcattaatggcaaccagcgttccctgcttaagatgcccgtcagcaaacagataatcgagggcgtgctgcatatcacgccaaccaatcaactgtaagccacgcagcgtataggtcggtgccatggtgttgttattcattgttatccttcaacctgcgtccggagcgatgattttgtacgtttatgaatgagtccggcgctttcaaaaagccagtacaacagttttgcgatcatcagacatgcgccgaagaccacgataaaaaagactacgcgtgagacaaacgaatccagcccttcacgtgccagcacgatcatattgaagatcgccccaaagcagaaactgtgcaatatcgcagccttatagcgattagtctcgcggttgcccagctcatacagccagtcgaaccatttgatgatcagtccaaccacaatcgccccgagtgggatgaacaacgcgccgcccatcaccaccagtgagcctataagcgtaggcgagatcgccagtccggagtggttattcagcacttcccaggtaaagtagttggctgagttcagcaccatactcgggcgacccggccacagccaggaagggataaagacatagaaatcgcggacaattggagccaggccctggaagtcgatgttgtcgtagttctgcaacagcaacgccagattctcccatggcgagaaggtgtcgcgagtgagatagagaaacgtatagaacgcttcatcgccgctcacattcattccatagcgttttagcgccagccagaacatgcccacaatccccagcacgcccgccgccgccagcatccacaacgaaatccagccgcgaataatgccaataaacaggaagatagcgaatgcgatgatgatattggcgcgagtgccgccgacaatcatataagtcagcaagccaaaggcgaccgtgctgacgaggaaaaacagccacgctttgctatcctggcgcagaaagtagaccaccagcatcgccgggatgaaaaagtaaaagaagcgttttaacgccacgccggagacttcactggagaagatctgactgtaggagttaagccggaacagcaaaaagccgttgtgcatgaagaagatgccgacgcttaccagcgcgatgcccatcaggatcacccacgtaagattggtctccacgcggttcatggtaaacagcggacggcgcggtacatcagcaacgcgtttgcgtaggcgggttttgtaggtgacatagtaaaccgcgtagaagcagcccgcagaaagcaacgcctgcaacaagatttctggcggcgcgacaccaacatcaaagcgaaataccagcacgctggtcagcgggaagccgaagaaaaaggtgagcaaaaacagcaatgaaaagaagacattgaagttaaagcgcacacggcgaaactcaaaccaggtcagcgtggcaataaacagcgtgcagagcagccagaccacaaacaggccactgaattgcagcagactcatgcgacctccccggcggcaatcgccaacgcccgctgccagccttgtagatagttagggctaaagaaggcaatggtgtttttatccaccgacgccaactggcgctgcgcttcaagcacaatatcctcgttgagatcgtcggtagtaaacagcaccggcaaatgctgttccgtcatatcctgccagaacggattttcccggttaagcacacaaggaatgcccgcctgaatcagtaagcacagcgtaccaatgccctgctggcgggcaaaaataaagtaaccgagatcgcactgacgaagtagcgccagataggcgtcaaattccagtttttcgctcagaacttgcagattttcttcgctgaataactccagccccgcctgacgaacttcctcaatgtacgcttcgttattaggcggatatcccatcggcaccaccacttttaccgtatcgccaaattgctgatgaacggcacgtaaggcggcgacatgctcattgctgcggtcgccggagttccccaccagaatggtcattttcccttcacgttgccgatcgttcgccatcgtattgagagaagggtccatccgcgtcgggaagtacagcagttcgccccgcacctttggatgcgttttggcaaaaaagctcaaatcaccgcgggtggcaaatacatagccgactcgcttttgcgccaggcgacgtagcgggtaaaaaagcttatatctcaagccactggaaagctcatacaggtctgccccccagatatgccagaaaaactggctgggcttaatgccaccactcagcagagccagccacagtgtgggattgaactgaccgtggaaaaaaaatcgctgctgacggttagcttttgctttcgcgatgatcgcttccgccagcgattttttcccagggaaaaattgcacagaaagcgccggacagctatcacttaagccgtcgtccttgccaacaaccataaactcgcgcgcgtgctcgctcgtcgcggccagcgcgtcattgaaaaaccgcaaaacggttcggttatggtgagggatatccgatcccagtacgtgaatcagtacagtcatgcccgcctacgccagagtaaaaacacgccacaacaaagagaaaaatagacgatataagttgccatatatgcctgcgccgcgcccagtgcaccatgcgcagggattagccagtgggcaaataccatcaataaagtgaactggctgacttccgccagaatataaaaccgcagtgacgctttggcgatcaccagataaccaaagacataagcgcccacttttaacacatcacccactaactgccaggcaaagagatcgcgcatagcggtaaatttattcgacaacagcagccagatagcaaaatcacgcagcaaccagacggtaaaactcgccgccgccactgccggtaagacgaatttcagcgatttaaccacttcccgggtgatatcgcgcttttccgttagccgcgacaacgtaggcagcaaatatacgctgaacgatgccgtaataaattgcaggtaggcatcggaaatactgctcaccccttgccagatccccacctcatcccagctatactgcgctgccagcagtttgcgcatcatgatgtaagcaacaggcaaagtcaccgacgtaatcaacgccatgagcgtaaatttgctcaactgccctgccagaccgttatcccagctgggtttcagatagcttaacgggatgacaccacgtttgatcaacatgatggcggcaggaatgaccaccagcgcgggaatcagcgccagacccagcaacgccccttcataaccgcccaaacggtaactgacgtagtacgcgagaacgccaatcaagctgccgacaatcagcgataacgcattacctgcggcatcgcgaaagcctttcatcagcgccagtaacaggttgccccaggcgatccccatttgcaccagcgccactaaacgcaccagcccctgatagtcggtattaccaaacaatccctggctgattggcgcagctgccagcacaaaaaccagcgccatcagcgtagagaagccaagtaccatcgctgatgaagtgccgaccacgcggcgcagctgttggggattatcatggtactgggcaacgtatttggttacaccgttaaagatgccagccccggcaagcacgccgagcacggtaatcaactggcggaaatttgccgccagcccaagccccgccggaccaaatgacaccgccagcaacttaccgaccagtaacccggcaccaatcttgaccagtgtactggccgccgtccacaaggacgcttttgccaacgacatatcaggaaaagtagttcaacaaagtcgcaattaccgtacgctgattgacgggcgacaggttgtagaacagcggcaggcgcagcaggcgctcgctctctttggtggtgtagcgatcttcaccgtggaactcaccaaagtgttcccccgcagggcaaccgtgcagcggaatgtaatgaaacaccgccatgatttccgcttctttcagaaagttaatcaacgcgctccggtcatcaatatcccgcagtttaatgtagaacatatgcgcgttctgcacgcagccatcgggaatcgacggcagctcgatacgcccggctttcgccagaggcgctaacgcatcgtagtagttttgccacagcgccagacgttgctggttgatacgatccgctgcttccagttgcgcccacaggtatgcagcttgcagatcggacatcaaatagctggagccaatatcgcgccaggtatatttatcgacctgaccacggaagaactggctgcggttagtgcccttttcacggatgatctcggctcgttcgattaacgctttatcgttaatcagcgtcgcgccgccttcaccgcccgccgtgtagtttttggtttcatggaagctaaagcagccaatatgaccaatggttcccagtgcacgccctttgtaagtggacatcacgccctgagcggcatcttctaccacaaacaaattatgctttttcgccaacgctataatggtgtccatttcgcaggccacacccgcgtaatggaccggcacgataacgcgcgttttgtcggtgatcgccgcttcaatcagcgtttcgtcgatgttcatggtgtccgggcgaacatccacaaaaacgatttttgcgccacgcagcacaaaggcattggcggtggagacaaaggtgtagctcggcatgatcacttcatcgccaggctggatatcgagcagcagcgccgccatctccagcgaagcggtgcaggacggcgtcagtaacactttggcgctgccaaaacgttgctccagccactgctggcagcgacgggtaaaaccgccatcgccacacagtttgccgctacccattgccgactgcatatagtcgagttcggttcccaccaccggcggtgcgttaaatggaatcatgtgatcacctgtataaccagtacgcggtgctttctacattcgcaccactttgtatgtatcgtttaagcgcggcggtgttgcccatttgggtcgccacccgcaaagttgttttaccgcgagcatacgcccagtttagcgccgtttgcatcagctcagcacctgcaccgcgtccagccagcaggccaattcgcgcatctgtcgcattgagttcccgtaaagagacatagccgcgaatatcgccggacgccgcacgtaaaatcagacattgatgatcaaaggtgccgcgcacggcattttcaatccactgtgcataaaagcgactgctggcgtcaggcgcataccacggcgcacgaaaacggctttgcgcaaatgcggcgctggctaactgacgtaatgcgggaatatcggtctcttgtgccactacagcaccgctatcactggcattgttcacgggtagcgccaaatcaacttcaccttctaccagggagaatcccagctgttgcagggcatccagttcacccgtatttgatgccgcaattttggcctgcacccgtgaccacggcgctaacacgtctggcgtcaggagcggtgcttcagacgtaatgcgcacgatggcgctgttaacaccaaagaaggcgttttcccaggttagtggctcaatactggcgcggacgggcacgaagtaactccagcagatattggccgtagccagttttcgctaatgaactggcagcacgcttcacaccctcgtcatcgagccagccgttacgccaggcgatctcttccaggcaagcaatcttaaagccctggcgtttttctactgtctgcacaaaggtactggcttcaatcaggctgtcgtgagtgccagtgtccagccaggcaaatccgcgcccgagcagttcaacggtcaggttgcccgcctcgaggtacatctggttgatggaggtaatctccagttcaccacgctccgacggcttcacctgctttgcgtactccacgactttactgtcgtagaaataaagcccggtcaccgcccagtttgacttcggctgttttggcttttcttccagcgagatagcgcggaaattgtcgtcaaactccaccacgccaaagcgttccgggtccatcacctgatagccaaataccgtcgccccttccgtgcgcgccgcaacatgacgcagcttcggactgaagccctgaccgaagaagatgttatcgcccagcaccagacaagaaggttcaccgttgaggaaggtttcaccgatgataaaggcctgcgccagaccgtccgggctgggctgttcggcgtattccagctggataccgaactcactaccatcgcccagcaggcgctggaaataacctttatcttccggcgtagtgatgatgagaatttcgcggataccggccaacatcagcaccgacagcggatagtaaatcattggcttatcgtaaatcggcaacagttgcttcgatacgccgcgcgtaatcggatgcaatcgggtgccggaaccgcccgccaggataatacctttcatgtttgcctccgctgaaaattagcctttcagacctaaacgctcgccctgatagctgccgtcctgcacctgcttccaccagctttcattagccagataccactgcaccgttttacgcattccactttcaaaggtttcctgtggcagccaaccaagttcacgggcaattttcgaagcatcaatggcataacgcagatcatgccccggacggtcagcgacaaaggtgatcaagtcacgatagtgcgccacgccgtgcggcttgttcggagccagttcttccagcagctcgcaaatggtttccacaacatcgagattcttacgctcgttgtgaccaccaatattataggtttcaccgactttcccggtggtcgccacgcaatacagcgcgcgggcgtgatcttccacatacagccagtcacggatttgctgcccgttgccatataccggcagcggtttacccgccagcgcgttgaggatcatcagcgggatcagtttttccggaaagtggtaaggaccgtagttattcgagcagttggtgatcagcgtcggcagaccgtaggtccgcagccaggcgcgcaccagatggtcgctgctggcttttgacgcggaataagggctgctcggcgcatacggcgtggtttcggtgaagaaatcatccgtcgagtgcaggtcaccatatacttcgtcggtggagatatgatgaaaacggaacgctgattttttatcttccgtcagcgtattccagtaagcccgcgccgcttcaagcaatgtataagtcccgacaatgttggtttcaataaacgctgccgggccgtcaatagaacggtcaacatggctttcggctgccagatgcatgacacagtctggctgatgctcagtgaatacgcgtgccagttctgcccgatcgcagatatcaactttctcaaaggcaaagtgctcgctttgcgcgaccggtgccagcgacatcaggtttccggcgtaggtcagcttatcgaccactaccaccgcatcgctcgtttcgttgatgatataacgcaccagcgccgagccaataaacccggcaccacctgttatcagaatttttctcatcagcgccagactcctttggcatcgacgacatactgctgatggacattgtcgccattgataactttgaactgactatgatcgaccagcatcaccagcacgtctgccgttgccagcgcctcgtcaagctgcgccagagtacaaagcccggtcagttttttcggcaactggtggatgttaggctcaacaaccagcgtttcgccgctgtgccactgggcgatcagttcagcgatttccatcgccgggctttcgcgcaggtcatcaatattcggtttaaacgccagaccaaagcaggcgattttcagttcactggcgcgtttatcggtagcagcaaggcagtcggcaaccgccgctttcacctgatcgataacccagaacggtttgtgatcgttaacttcgcgcgcggtacggataagccgcgcctgctgggggttctgtgccacgataaaccacggatcaacagcaatgcagtgaccgcccacgccagggccaggctgaagaatattaacgcgagggtgacgattcgccaggcgaatcagttcccagacgttaatcccctgatcggcacaaatcagcgacaattcattagcaaaagcgatattcacatcgcggaagctgttttcggtgagcttacacatttccgccgtccgcgagttagtgacgacacactcaccttcgaggaaaattttgtacagttcgctggcgcgggtcgaacaaaccggcgtcataccaccaatcacgcgatcgtttttaatcagctcgaccataacctggcccggtaacacgcgttccgggcagtaagcaatgttgacgtccgcctgctcgcccacctgctgtgggaaagtgagatccggacgcatctctgctaaccattctgccatcttctcggttgaccccaccggcgaggtggattcaaggatcaccagcgcgccttttttcagcactggcgcaatggagcgagcagccgattcaacgtaggtcatatctggctcatgatcgcctttaaacggcgtgggtacagcaatcagccaggcatccgcttcaactggcgtcgtgctcgctcgtaaaaaaccgccttctacggcagtttttactacgctcgccaaatcaggctcgacgatatggatttcgccacgattgatggtatcaaccgcgtgttggttgatatcgacaccaatcacctgtttttgccgtgaggcaaacgctgctgctgtaggcagcccgatgtaacccagtccgataacagaaatggtcgcaaaactcatagtgatatccgattattttttaacgcttccagaatgcgagagcatgcctgaccatcaccatacgggttatgggcgcggctcatagtttgatattcgttttcgtcttttaaaagacgcgtcacttcctcgacaattcgctgcttatccgtgcctaccagacgcaccgtacccgccgtcaccgcttccggacgctcagtggtatcgcgcatcaccagcaccggtttccccagcgaaggcgcttcttcctgaatgccgcctgagtcggtcaaaatcagccaggcgtggttcatcagccagacaaacggtaaatactcctggggatcgatcagaatgacatttttcacatgccccagaatgcgattgaccggctctctgacgttcgggttgagatgcaccggatagacaatctggatgtcctggtgcgtggtggcgatgtctgccagcgcgtggcagatttcttcaaagccacgaccgaaactttcacgcctgtgaccggtcaccagaatcatctttttatcggggtcgataaacgggtaatttgccgccagttctgaacgcagcgtgtcgctgctcatcacctgatcacgcacccataacagtgcatcaatgactgtattaccagtaatgaagattcggctatccgcaacgttttcacgcagcaagttttgccgggaagtttcggttggagagaagtgatacatcgccagatgcccggtcaatgtacggttagcctcttccggccacggcgaatagagatcgcccgtgcgtaaaccagcctcaacgtgaccaacaggaatacgctgataaaacgccgccaggctggttgccagcgtcgttgttgtgtcgccgtgaaccagcacgacgtctggtttgaactcggcaagaataggttttagcccttccagaatccgacaggttatctctgtcaggccctgtcctggctgcattatgttgagatcgtagtcaggtacaatggaaaagagtttcagcacctgatcgagcatctcccgatgctgcgcagtgacgcaaactttagcctcaaaaaaaggatcttttgccaacgcatgcaccaacggagccatcttgatggcttccgggcgcgtaccaaatacagtcagtactttcacatcgattctcttcgaataagcggcgagcgcctttgcgctcgcagcagcagtgttgctatttcgagcaacggcgggttaatgcgacaccagccccgatcagccccccgacaatgccccacataatcatcaggaaggcacgacgtgggctatcgcgttttaccggttcttccggcgtacgcaaatagcgataggtctgaaaacgcggatccagggttggaccaacattcagggtgtttaacatggcccgattctgatcatagtcgagatcaaaggccggaccgacggcctgtaaattttccagtcgagcctggagcattggacgcccaagcaggaacatttctgaatcaggtaattcctcggcaggcacatctgtcgcactgcgcgaaatattatgctgctcagcaattttcagcgcctgctcaatgctgttcatccggcggtcgtagatggctttcgccacctcttcctgacgcttcacctgagctttcatctggatggtgcgtgccgcccatgcgcctttcagctcatcattcagatggctggctgcacgctggctggcaaaagcaacatactgacgtaacaggttattagcgtcaggcgcggtttcggcaataagcttcacgctgtcattgaccgcgcgggtaaagtctccggggataaactggatgttgttaatcatttcatccagcaacgccgcatcggctttgctgttgcccaccatccgctgtttgtaatagtcggtttgcagccagaactctctgcgggtatcccacgaggccagttgcataacaaactctttataggcttcgtccatgaccgatggttgatcggcagaagccatgtttgaacggacatccaggttacgcaaaaattgctgctgcgagtaatatccccccagcatattcaccgttggacgatcggtaatcgccgtcgagctccactcctgacgagcaaaaaaagtatacgccagcgcgattaacgcaaacgccagccccatgccaataatccatagcttcccagcccacaaggtacgaaacaacccacgaatatccagttcattttcagcgtcttcggccggtttcccaggcattggttgtgtcatcacatcctcatttatttggttaaattggggctgccaccacgatttctacgcagtctgcgttttacgcgcttaataaagcgagcaactttccaggcacgcttaatgcaatatccatagaggaagaatgctagcaaaaagagcaccagcatgacccactccgggacaaaatgagaatattctgccagcacgccaatggaagcgagcagtgctgcggcaagggtaatcagcacaaacgcctgacgggaagtaaacccggcacgcatgatcaaatggtgaatatgctgacggtcaggagagaatgggctcatgcctttacgcaggcgacggtacataatcgccaccatatccattagcggaatggcgattatccacaaagcggtaaccgggctgatgggatgggttttgccctgggtcgtttcgagcaggatccagataacggtaaaaccaatcagcgtactgcccgcatcacccataaagactttgtagcggcgacccaggataccaaggttaagcatgatgtatggcaggatggcggcgatcatcgcaaagcaccagattgcgaggctggtttgcccgtcgaaccacaaaatcataccgattgctgcaaacgagacgcaggacaacccgcccagcaagccatcaatgccatcaaccatgttgaacgcattaatggccgcccagacggcaaatagcgtcaggaagtaaccaaacggtccgagcaccatctcccaggagccaaagatataacccaggctactgagataaagtttgccgaacaccatcataacaatgccaacagcggcctgtatggtggcacggatttttacgctgatatcaaaacggtcatccagcgcgccaatgaaaacaagcacaccggcacaagcgagatagagagatgcatgcggaatatagtaatcgacaattccgaacgtgaagcaaatccctgcgtaaaccgaaatccccccaacgagaggtatcaatccctggtgacgtttgcggaagtttggtttatccactaaaccgactttttttgccactttacgggcaaaaaacagaaacagtgtcgtgaataaaaaaatactgatgagatcagtactcactgtcagtaaattcacaatgcatgctctcagagaaaattattagcagaagtataaccacgaagacctttattcagaagggaaagtccgttccgaacccaccagtcctgtgcaaaaattaaccatttgatatgcaaattgcataacatgccagcaaattccaggaattttcctaacatcgccagcgcggcattaagattacagatataaaagcaaaacgccacgtaaacacgtggcgtttttggcataagacaaatttatgagcgtttcatcatttcgaagaaatcgtcattggtcttagtcatggccagtttattaatgaggaattccattgcatcgatttcgcccatcgggtgaatgattttgcgcaggatccacattttctgcagttcttcctgagtcgtgagcagctcttctttacgggtaccggaacggttgtagtcgatagccgggaagacgcgtttttcagcgatcttacgagagaggtgcagttccatgttgcctgtacctttaaactcttcgtaaataacttcgtccattttagaaccggtatcgataagcgccgtcgcgataatggtcaggctgccgccctcttccacgttacgcgccgcaccgaagaagcgtttcggacgatgaagggcattggcgtccacaccaccggtcaacactttacctgacgccggaacaacagtgttgtaagcgcgcgccagacgagtgatggagtcgagcagaatgataacgtctttcttgtgctcaaccaggcgtttcgccttctcgatcaccatttccgcaacctgaacgtggcgagatgcgggttcgtcaaaggtagaagcaacaacttcaccttttaccagacgctgcatctcggttacttcttccggacgttcgtcgatcagcagaaccatcagcacacaatccgggtggttgtaagcaatgctctgagcaatgttctgcagcagcatagttttaccggctttcggcggtgccacaatcagaccacgctgaccacgaccgataggtgatgccagatccagtacgcgagcagttaaatcttcagtagaaccgttaccacgttccatacgcagacgagagtttgcgtgcagcggggttaagttctcaaagaggattttgttgcgggcgttttcaggtttgtcgaagttaacttcgttaactttcagcagcgcaaaatagcgttcaccttctttcggcgggcgaatcttaccagagatggtatcaccagtgcggaggttgaaacggcggatttggctaggggaaacgtagatgtcatcaggaccggcgaggtaggagctgtctgcggaacggaggaaaccaaatccatcctgcaatatctccagtacgccatcaccaaagatatcttcgccactctttgcgtgctgcttcaggatggcaaaaataatgtcctgcttacgcatacgagccaggttttccagccccatattttcgccgagagtgatcagctcagaaaccggcgtattctttaattcggtaagattcatagtggtgtgagttcttaaacttggggtaaatctcgaacttaatgttgtgaatggtatggcaggatcatccatgcctgtttacggtcatcgactcatgtcttttcgctgcctggtcacaggagagtacgcagaactgaaacgacaagacggattgagtgacgagccagaaatctgttcacttcgcatttaagataaaacgggaagcgttggaaattacaagattcaaacttaataaggtatgtttaatacgaagtcaacactaagttagcatgactcacgccgggcgtccagtttttagcgacggggcacccgaacatgaaattcccttacgccaggttagcgtcgaggaactctttcaactgacctttagacagtgcacccactttggttgccgccacttcaccgtttttgaacagcagcagagtcgggataccacggatgccatatttcggcgcagtgccagggttttgatcgatgttcagttttgcaacggtcagtttgccctgatattcgtcagcgatttcatccagaatcggggcgatcattttgcacggaccgcaccactctgcccagaaatcgacgaggatcgccccgtccgctttgagtacatccgtgtcaaaactgtcgtcagtcaggtgaataattttatcgctcatatataactccacaggaataagcctggcgtgttggtttcgttgttggtgtaacattaaccaactaaaggttgactttatttcaccggatacgctttcgtaaagcaatagtaagctgatattctaccacactatgagcaaaacacatttaacagaacagaagttttccgacttcgccctgcatccgaaggttgtagaagcccttgaaaaaaaagggtttcataactgtacgcccattcaggcactggcccttccgctgacgctggcgggtcgtgacgtagccgggcaggcgcaaaccggtaccgggaaaacgatggcgtttcttacgtcaacgtttcattatcttctctctcatcctgcgattgccgatcgcaaggtgaatcaaccacgtgccttaattatggcaccgacgcgtgaacttgccgtgcagatccatgccgacgcagaaccgctggcggaagctaccggcctgaagctgggtctggcttacggtggtgatggctacgacaaacagctgaaagtgctggaaagcggcgttgacattctgattggcactacggggcgtttaattgactacgccaagcagaaccacattaacctcggtgccattcaggtggtggtactggacgaagccgatcgcatgtacgatctgggctttattaaagatatccgctggctgttccgccgtatgccgcctgcaaaccagcgcctcaacatgctgttctccgccacgctttcgtaccgggtacgtgaactggcgttcgagcagatgaacaatgccgaatatattgaagtggaaccggaacagaaaacgggccaccgtattaaagaagagcttttctacccttctaacgaagaaaaaatgcgtttgctgcaaacgctgatcgaagaagagtggccagacagagcgattattttcgccaataccaaacaccgttgtgaagagatctggggccacctggcggcagatggtcatcgtgtcggtttgttgacaggcgatgtcgcacagaaaaaacgtctgcgtattcttgatgaatttacccgtggcgatctggatattctggttgccaccgacgttgccgcgcgtggtttgcatattccggcagtgacgcacgtctttaactacgatttacccgatgactgtgaagattacgttcaccgtattggtcgtacaggtcgcgcaggcgcaagcggtcactctatcagcctggcgtgtgaagagtatgcattgaatttgcctgctattgagacctatattggtcactcaattccggtaagcaaatacaatccggacgcattgatgaccgatctgccaaaaccgctgcgcctcacgcgcccacgtacaggcaatggtccgcgtcgtactggcgctccgcgtaatcgtcgtcgttcaggttaaataaaatgtcatactcaaaatcattcaaactgtatcaagatggcaagagaatgaatcccgatgagcatactgtagtaagtgattcaggtgaaagaatgcagccaacacagagacagattgaaggatgaagagtatgggttccacctcgtcgctgtatgcagccattgatctcggttcgaatagttttcatatgctggttgtgcgcgaggtggctggaagcatccagacgctgacgcgaataaaacgcaaagtgcgtctggctgctggcctgaatagcgaaaatgccctgtctaatgaagcaatggagcgcggttggcaatgtctgcgcctgtttgctgaacgtctgcaagatatccctccctcgcaaattcgcgttgtcgctacggcgacattacgtcttgccgtcaatgcgggtgattttattgccaaagcgcaggaaatcctcggttgtccggtacaggtgatcagcggtgaagaggaagcacgtctgatttatcagggcgttgctcacacaactggcggtgccgatcagcgcctggtggtggatataggcggtgccagtactgaactggtaaccggcacgggtgcacaaaccacctcgttgttcagcctgtcgatgggctgcgtcacctggctggaacgctattttgccgatcgtaatctggggcaggaaaattttgatgctgcagaaaaagcggcacgcgaagtgttacgtccggttgccgatgaattacggtatcacggctggaaagtgtgcgttggtgcttccggcaccgtgcaggcgttacaggaaatcatgatggcacaggggatggatgaacgcattaccctggaaaagttgcagcaattgaaacagcgagccattcattgcggtcggctggaggaactggagattgacgggctgacgctggaacgtgcgttagtgttcccgagtggtctggcgatcctgatcgccatttttaccgaactgaatattcagtgtatgaccctggcgggcggtgcgctgcgtgaaggcctggtctacggcatgttgcatctggccgtcgagcaggatattcgcagccgtacgctgcgtaatattcagcgccgctttatgatcgatattgatcaggcgcagcgcgtagccaaagttgcggctaacttcttcgatcaggtggaaaaggaatggcatcttgaagcaataagccgcgatttgctcatcagcgcctgtcagcttcatgaaatcggcctgagcgttgactttaaacaagcgccgcaacacgctgcttatctggtgcgtaatctggatcttcccggttttacccccgcacagaaaaaattgctggcgacgctactgctcaaccagactaatccggtcgatctctcatcgctgcatcagcaaaatgccgtaccgccgcgcgtcgcagaacaactctgccgtttactccgcctggccatcatttttgccagccgtcgccgtgacgatctcgtgccagagatgacattacaggctaaccatgaactgttgaccttgacgcttccgcaaggttggctaacccaacatccgctgggtaaagagattattgctcaggaaagccagtggcagagctatgtccactggccgctggaagtgcattaatgagtaagtgccggatgcgatgctgacgcatcttttccggccttgattatttccctcgttttgccgccatcatcgctttcagattcgccagatggctttgccctttctgcatccgttcttcggcgctgaccactttgcgctcctgttcccaaatcagatcatcctgcggcagctccagcaaaaagcggctcggctccgggcgcaccagctcgccgtactgacggcgttctttacacagcgtaaaggtcaattccttctgggcgcgggtaatgccgacataggccagccgccgctcctcatcgatattatcttcatcgatgctgctctggtgcggcaaaaacccttcttccataccgaccatgtagacataaggaaactccagcccttttgacgcgtgcagagtcatcagttgcacctgatccagctcttcttcactctcaccacgctccatcatgtcgcgcaaagtaaagcgcgtcaccacctgggtgagcgtcatcggctcatccagttcgctgccttccagcatctccgtcatccagctaaacagttggttgacgttcttcatgcgcatttcggcggctttcgggctgggcgatgtttcgtacagccaggattcataatccatgccgtggatcagatcgcgcaccgcggcaatcggctcccgctccgccagacgctggatttctgccaaccagtgagtaaagcgggtcaatgcttcataaccacgtccgctaagcgtctgactcaggcccatatcaaagctggcggtaaacatgcttttattgcgcgtcatcgcccactcacccagctttttcagcgtcgccgggccaatctctcgcttcggcgtgttaacgatacgcagaaatgcgctgtcatcgtccgggttagtcagcacgcgcagataagccagcaagtccttgatttcaggacgagagaaaaacgacgtaccaccagaaattttgtacgggatgcggttttgcatcaggaatttttcaaacactcgcgactgatggttaccgcgataaagaatagcgtaatctttgtactgcgttttattgacgaagtgatgcgcaatcagttcaccagtgacgcgctcggcttcatgttcttcgttattcgcgcttaaaactttaagctctgtgccgtaacccagttcggagaacagacgcttctcaaagacgtgcgggttattggcgatcaggatgttcgccgctttcaaaatacgtccggaagagcggtagttctgctcaagcttaatcaccttcagcgccggaaaatcctgactcagcagcaccaggttttgtggacgtgcgccgcgccaggagtagatcgactggtcgtcatcgcccaccacggtaaagcgcgcgcggctgcccaccagcagtttcaccagttcatactggctggtgttggtgtcctgatactcatccaccagcagatagcgaattttgttctgccagcgctcgcggacttcttcattgcgttgcagcagcaacgtcggcaataaaataagatcatcgaagtcgagaacattgcacgctttcaggtgtgcatcatacagcccataacaatgggcaaaaatacggtcccgctcgccaatcgcactggctgccgcctgggacggtgttttgagatcgttcttccagttagagatggtcgaaatcaactgttgcaggagaactttgtcatcttcaatcagcccttcggtcaactctttgagcaacgccagctgatcggtatcgtcaaacagcgaaaagttcgccttcatccccagcgccgcatactcacgcttgatgatatccagccccagcgtgtggaaggttgagatcatcagcccacgcgcctctttgcgacccagcgtctgtccgacacgctctttcatctcgcgcgccgccttattggtaaaggtcaccgccgcgatatgtcgcgcctgataaccgcaaccgcggatcagatgggcgattttattggtgatcacacgagttttaccggaacccgcgcccgccagcaccaggcaggggccggtaacgaattcgacagcttgttgttggccggggtttagacgcataggtgtattgctcaatcttcgaacggggggaggattgtagcagaatcgcatttgaatgtgaccgcgtgtaagccgctaaccggttggctgcggatgtttaaatcagagagggaagaccgaaaccggagttcatcgtgaatccattagacttagaaaatatcgggtcgtaacgttgtgttattactttttcagagtttactaaggagaggtttactcgtggcgattaatttcagccctaaggttggtgaaatactggaatgcaactttggtaactatcctgttagccagaatggacagttcagcaccacgtattacgatggccgcattcctcctgaaatgataaaaaacaggttagttgtcgtgctcaacggaaaaattaatggcaacgcatgtatcgtcgttccattatcaaccactcgcgatcatgacaagttaaatcgtggaatgcatgttgaaatagccagtaatgttatcaatgacctgcaattctttgatcagcagattcgttgggccaaagccgacctggtacaacaagtcagtcgaaaccgattaaacagagcaaggacttacagagggtatcttaatcaatgtttgccacatgagttggttgcagacatacagagggcggtcatcaagtcaatcaatgccatatcgctcataaattgacaataaaatcaccatccccgataatgactctgtagcccatagaggccctaagttttctccccttgagggacctgcgaagcccggattttccgggcttttgccatatatgtaccagcccctccctgactgacaattacgttagcatctgcggatcatgctaaaatcgccgcctgacaattattcactcaaggcacgatcatggcaaaaacagcagcagcactgcatatccttgtaaaagaagagaaactggctctggatcttctcgagcagattaagaacggtgccgatttcggcaagctggcgaagaaacactccatttgcccatcaggcaaacgcggcggcgatttaggtgaattccgccagggtcagatggttccggcgttcgataaagtggttttctcttgtccggtactggagccgaccggcccgctgcacacccagttcggttaccacatcattaaggtgctgtaccgcaactaatagcaaggccttctccaggagaaggccttgagtgttttctccctctccctgtgggagagggtcggggtgagggcatcagcgcgcacttaacccgcaacagcaatacgtttcatatctgtcatatagccgcgcagtttcttacctacctgctcaatcgcatggctgcgaatcgcttcgttcacatcacgcagttgcgcgttatctaccgcgccttccggaatagctttacccaagtcgcccggttgcagctctgccataaacggtttcagcaacggcacacaagcgtaagagaacagatagttaccgtactcagcggtatcagagataaccacgttcatttcgtacagacgcttacgggcgatggtgttggcaatcagcggcagctcgtgcagtgattcataatatgcagactcttcaatgatgccggaatcgaccatggtttcgaacgccagttcaacgcccgctttcaccatcgcgatcatcagtacgcctttatcgaagtactcctgctcgccgattttgccttcatactgcggcgcggtttcgaaggcggttttgccggtctcttcacgccaggtcagcagtttcttatcatcgttggcccagtccgccatcataccggaggagaattcgccggagatgatgtcgtccatatgtttctggaacaggggtgccatgatctctttcagctgttcagacagcgcgtaagcacgcagtttcgccgggttagagagacggtccatcatcagggtgatgccgccctgcttcagcgcttcggtgatggtttcccaaccgaactgaattagtttttctgcgtatgccggatcggtgccctcttccaccagcttgtcgaagcacagcagcgagccagcctgcaacataccgcacaggatggtttgctcacccatcaggtcagatttcacttccgcaacgaaggacgattccagcacgcccgcacggtgaccaccggttgctgccgcccatgctttagcgatcgccataccttcgcctttcggatcgttttccgggtgaacggcaatcagcgtcggtacgccgaatccacgtttgtactcttcacgcacttcggtgccagggcatttcggcgcaaccatgactacggtgatatctttacggatctgctcgcccacttcgacgatgttgaaaccgtgcgagtaacccagcgccgcgccgtctttcatcagtggctgtacggtgcgcactacatcagagtgctgcttgtccggcgtcaggttaaccaccagatccgcctgcgggatcagttcttcgtaagtaccaactttaaaaccgttttcggtcgctttacgccaggacgcgcgcttctcggcaatcgcttctttacgcagagcgtaggagatatcgagaccagaatcacgcatgttcaggccctggttcagcccctgtgcgccacagccgacgataaccacttttttaccctgaaggtagctcgcgccgtcggcgaattcgtcgcgccccataaagcgacatttgcccagctgtgccagctgctggcgcaggttcagtgtattgaagtagttagccatggtgattcctcgtgatgttgtgcttcttattgttcggttcgcgtttgcgagattgaattcactatatgacaggaaatttattgcggaaattgatatattcacaacgtcacattgcaatttctgcaacgtcaacattgagggctgcgccattggatttacgcgatctgaaaaccttcctgcatctggcggaaagccgccattttggccgcagcgcgcgggcgatgcatgttagcccatccacgctctcacggcagattcagcgcctggaagaagatctcggtcagccgctgtttgtgcgcgataaccgcacggtaacgctgactgaagcgggcgaagagctgcgcgttttcgcccagcaaacgctgttgcagtatcagcagctgcgccacaccatcgatcagcaagggccgtcgctctctggcgagttacatattttctgctcggtgaccgccgcttacagccatctaccgccgattctcgaccgcttccgcgcggaacacccgtcggtggagattaaacttactactggtgatgcggcagatgcgatggaaaaggtggtcactggtgaagcggatctggcgattgccgggaaaccggagacgctacccggcgcggtggcgttttcgatgctggagaatctggcagtggtgttgattgcacccgcattgccctgcccggtgcgtaatcaggtttctgtcgaaaagccggactggtctacagtgccgtttatcatggccgatcagggaccggtacgccgccgcattgaactgtggtttcgacgcaataaaatcagcaacccgatgatttacgccacggttggcgggcatgaagcgatggtatcgatggtggcgctcggctgtggcgtggcattgttgccggaagtggtgctggaaaacagcccagaaccggtgcgtaaccgcgtgatgattttagagcgcagcgatgagaaaacgccgtttgagctgggggtgtgtgcgcaaaaaaagcggctacatgagccgctgattgaggcattctggaagattttgccgaaccattaacccgccaaaaagaacctgaacgccgggttattggtttcgtcgtggcaatcgtagcccagctcatttagccgggtttcgaaatccggttcatggtcgccaagttcgaatgccgccagtacgcgcccgtagtcggtaccgtggctgcgataatggaacaaagaaatgttccagtgcgtacccagcgtgttgaggaagcgcagcagcgcgcccggcgattccggaaattcgaagctgtagaggcgttcctgcaacggatgcgatggacgcccgccaaccatatagcgcacatgcagcttcgccatttcgtcgtcggagagatccaccacgctgtagccgccgtcgttgagcatctgcaaaatttctttgcgctcttcgaggccgcggctcaggcgcacgccgacaaagatgcaggcgtttttggcatcggcaaaacggtagttgaactcggtgaccgaacgcccgccaagcagctggcagaatttgaggaagctgcctttttcttccggaatggtcaccgccaacaacgcttcacgctgttcgcccagttcgcagcgttccgagacgtagcgcaggccgtggaagttcacgttggcaccggaaagaatatgcgccagccgttcgccgcgaatgttgtgctgggcgatatattttttcattcccgccagcgccagcgcgccagagggttccgccaccgcgcgcacatcttcgaataaatccttcatcgccgcacagatcgcatcactatcgacggtgatgatgtcgtcgagatactcctggcataaacggaaggtttcgtcaccgatgcgttttaccgctacgccttcagcaaatagccctacgcgcggcagatcaaccggatgacccgcatccagcgctgctttcaggcaggcggagtcttccgcttctacggcgatcactttgatttgtggcatcagttgtttgatcagcaccgcaacgcccgccgccagaccgccgccgccgactggcacaaatacgcggtcgagatgggcgtcctgctggagcagttccagcgccagcgtgccttgcccggcaatcaccatcggatggtcgaacggcggcacccaggtgaacccctgctgctgtgacagttcgatcgctttagctttcgcttcgtcaaagttcgcgccatgaagcagcacttcgccgccgaatccacgtaccgcatcgactttgatgtcggcggtggcggttggcataacgatcagggccttcacgcctaaccgcgcagaagaaaacgcgacgccctgcgcgtggttacccgcagaagcagtgatcacgccgtgcgctttttgttcttccgtcaggcccgccatcatggcgtatgcgccgcgcagcttaaagctgtgcactggctggcgatcttcgcgcttcaccagaatgacgttatcaagacgcgacgacagtttttccattttttgtagcggcgtaacctgcgccgcctcgtaaaccggcgcgcgcagcactgctcttaaatattcggcaccttccggagcaccggacaggggttgcgagtcagccattattaaccccccagtttcgatttatcgcgcaccgcacctttgtcggcgctggttgccaggctggcgtaggcgcgcagggcaaaggaaacctgacgttcacggtttttcggcgtccaggctttgtcaccccgagcttcctgcgcttcacgacgcgccgccagttcggcatcgcttacctgtaactgaatgccacggttcgggatgtcgatagagatcaggtcaccatcttcaatcagaccaatgctgccgccgcttgccgcttccggtgagacgtggccgatggaaagaccagaggtgccgccagagaaacgaccgtcggtgatcagcgcacaggctttaccgagacccattgatttcaggaagctggttgggtagagcatttcctgcatgccagggccgcctttcgggccttcatagcggatcaccaccacatcgcccgcgacaactttgccaccgaggatcgcttctaccgcgtcgtcctggctttcgtacactttcgccgggccggtgaatttgaggatgctgtcatcgacgcccgcggttttaacgatgcagccgttttctgcgaaattaccgtagagcaccgccaggccgccgtctttgctgtaggcgtgttccagcgagcggatacagccattggcgcgatcgtcatcgagagaatcccaacggcaatcctgcgagaatgcctgtgtggtacgaatgcctgcaggacctgcgcggaacatattttttaccgcgtcatcctgggtcagcataacgtcgtattgttccagcgtttgcggcaacgtcaggccaagtacgtttttcacatcacggttcagtaaccccgcgcgatccagttcgccgagaataccgataacaccaccagcacggtgaacatcttccatatggtatttctgggtgctcggcgcaactttacacagctgtggaaccttgcgggaaagcttatcgatatcactcatggtgaagtcgatttccgcttcctgcgccgccgccagcaggtgaagtacggtgttagtcgatccacccatcgcgatatccagcgtcatggcgttttcaaacgccgccttactggcgatattacgcggcagtgcactttcgtcgttttgctcgtaataacgtttggtcaattcaacaatgcgtttaccagcattaaggaacagctgcttacggtcggcgtgggttgccagcagcgagccgttgcccggctgcgacaggcccagcgcttcggtcaggcagttcattgagttagcggtaaacatcccggagcaggaaccgcaggttgggcaggcggaacgttcaacctgatcgctctgggagtcagaaactttcgggtctgcgccctggatcatcgcatcaaccagatcgagcttgatgatctgatcggacagtttggttttcccggcctccatcgggccgccggaaacaaagatcaccggaatattcaggcgcagggaagccatcagcatccccggggtgattttgtcgcagttagagatgcagaccatggcgtcggcgcagtgggcgttgaccatatactcaacggaatcagcgatcagttcgcgagatggcagtgaataaagcatccccccgtggcccatggcaatcccatcatccaccgcaatggtgttgaactctttggcaacgccgccagccgcttcaatttgttcggcgaccagtttaccgagatcgcgcagatggacgtgacccggtacaaattgggtgaacgagttcacaaccgcgataatcggcttaccgaaatcggcgtcggtcattccggtggcgcgccacagcgcacgagcacccgccatattacgaccatgagtggtggtggcggaacggtacttaggcatactttatttactcccagtgtctgtctcgtaaatgggacggtgcgtgccgtcccattttttgtatttattgattaacttgatctaaccagccccatttatcttcggtttcgccagtgaagaggccgaagaaggcttgctgaatgcgtttggtaaccgggccacaacggccttcgccaacctgaataccgtctacgctgcgcactggcgtgatttctgccgccgtaccggacataaacacttcatccgccaggtacagggattcgcgcgacagcacctgctcacgtacttcaattcccagctctttcgccagtttgatgatggcatcacgggtaatacccggcagcgcggaggaggtgaacggtggggtgaacagcacaccatctttcacttcaaacaggttttcgcctgcgccttcagagatataaccgttcacatccagcgcgataccttcctgataaccgtggcggcgcgcttcgctacccaccagcagggaagagaggtagttaccaccggcttttgccgccgtcgggatggtgtttggtgctgcgcggttccaagaggaaaccatcgcatcgatcccctgctccagcgcttctgcgcccagatacgctccccacgggaaagcagcgataatcacgtcggttgagtatcccgctggcgggtttactcccatgccaacatcaccgacgaagatcagcggacggatataggcgctggtgagattatttttgcggatcacgtcacgacaagcttccatcagctcatcaatgctctgcgaaaccgggaagcgatagattttggcggagtcatgcagacgctgcatatgctcacgatggcggaatacaaccggtcctttgtgcgagtcgtagcaacggatgccttcaaaaaccgaagtgccatagtgcagcgcgtgcgacatcacatgcaccttcgcgtcttcccagcgaaccatctccccattgaaccaaatgtaatcagctttcttcgtggtcatttttatattccttttgcgctcaggcgcggatttgttgtgatgtggttgtgctctggcagatggcaacgtgtgcgacgtccaccagtttatttaactgactaaacagtaagtcgaccgaccgtgggctggcaacggtcaattcgatatttatattttgtgcatcgctggcggcggccatattcattgagcagacgtggaaaccacgatgacgcaccacgcgtaaaacacgttctaaggtttccggattgaagcgagccgatacattgacctgatgttgcatcatgataatttctccaacatttctgaattactggcaccaggcggcaccagcggccagacgttctcaagttcgtcgattgagacatgaagcaggtatggcccatcactgttcagcatggtgtcgagtgccgcttcaacctggtctttacgggtgatgtgttggccagggatgccgaaggcgctggctaacatgagaaaatcggggttatcggtaagggtggtttcgctatatcgttcctggaaaaacagttgctgccattgtcgaaccatccctaaccgttggttatcgagtaagacgattttcaacggtaactgcttacgttttacggtgcccagctcttgtacattcatcatgaaagagccgtcaccggagatacagacgacggtatcgttcggtcgcgcgacttgcgcgccaaccgccgccggtaaaccgaaacccatggtgcctaagccgctggaggtgatgaaattttccgggcgagtatgggcgatgtgctgcgcagcccacatctggtgctgccccacatctgtggtcacgacgcaatccgcaggtttacgatccgacagttgttttaacaacaatggcgcgtagatagcgtcaccgggatggtcgtaacgccaggcatgttcatcacgcagctgcgcgcagtgtagctgccagtcattgatatttaacggctgctgtaatgctggtaacagagcatttaaatcaccttgtaatgccacatgtgcctgacgcagcttgttcatttctgccgggtcgatatccatatggataacactggcgtgtggtgcgaaggtgttcagtttgccggtcacccggtcatcaaaacgtgcacccacggcgatcagcaagtcgcactcctgcaccgcgaagttcgccgctttggtgccatgcattcccagcatgcccagatagtacggataatctgcttcaactgcgcccagccctttcagcgtgcaggtggcaggcatttttgtggtagcgagaaattctcgtaaagcaggaactgcctgcgccatacccacaccaccaccaacgtacagcatcggtttttgcgcttttgccagcatctggcgcacttgctcgacttcggcatgtgggaaagtcacttcgttttcaacggtggtgaaccacggttccaggtcgccgctggctaactggatatcttttgggatatcgaccagaaccggaccaggacgacctgagctggcaacgtcgaatgcttcagccataatgcgcggcaactcttccagcgactgcaccagaaagctgtgcttggtacaggctaacgacaatcccaggacatccacttcctgaaatgcgtcagtgccgataaacggtgcggacacttgaccggtgatggcaacaacagggatagaatctaacagtgcgtccgcaagcccggttatcaggttggttgcgcccggaccagacgtggcgatacatacgccagttttgccggtagcacgagcataaccgatagccgccattgccgcaccctgctcatgtcggcacagcaagtgctccacgccgccgtcatacaatgcatcgtaaaccggcataattgcgccacccggataaccgaaaacggtgttcacaccctgtgcccgcaacgcatgtaccacccactgtgcgccattcatagttagttccccgtcctgaatcttgagaaacagaattttgtgctgttattcattgtctgctcctcggttatgtttttaaggtcaaaaaaaacccccggacctttcggtgcgggggtcttagttcgttaaggcttgatctctaagcctttcctcgtccaagtgcagccccgcacggtgggataataatcaccaccacgctaatcacgaccaagctaatcactcgtagaagggctgtcattttgtcttttcttgcatcttgttcgaaggaatgcctaaagagttaccatagattttgcgaatagcacaagatattttttggccgttttttatgatggctttaataatttcaatagaaattgttgttttttaaaaagaaaatagtgagtgaaaaaaattcaatttcagtacgaatgttgttccctccctcgtagttcatcctttgtccgctgcatttttgcgagcatcattccaccgccagaacaactcaacttcacttgcacaaataaacaggaatcagccactaaaattcacgaattagcgggctacagcagcgatatcttatgcacataatggtgactcaaggagggcttatgtcactgtcaattgttcatacccgcgcagccctgggagtaaatgcgcccccaatcactgttgaggtacatatcagtaaaggtctacccggtttaacgatggtgggcttaccagaaacaacggtaaaagaagcccgcgatcgcgtgcgcagcgccattatcaatagcggatatgaatatccggccaaaaaaatcaccatcaacctggctccagccgatctgccaaaagaagggggacgatatgatttacctatcgccattgcgttgctggcggcctcagaacagcttacagccaataagttagatgaatatgaattagtcggagaactggcgcttacaggcgctctgcgtggcgttcccggtgcaatctccagtgcaactgaagctattaagtcgggcagaaaaattatcgtcgcgaaagataacgaagatgaagtggggctaattaacggtgaaggatgcctgatagccgatcatctgcaggctgtctgtgcgtttctggaaggtaagcacactctcgaacgcccgaaaccaactgatgcagtatcccgggcgctacaacatgatctcagtgatgttgtcggtcaggagcaaggaaagcgaggactggaaattaccgccgctggtgggcacaaccttttactgattggaccgccgggaacaggtaaaacaatgctcgccagccgtattaatggcctgttgccagatttaagcaatgaagaggcactggagagcgctgcgatattaagtctggtaaatgctgaatcagtacaaaaacaatggcggcagcgcccgttccgctcacctcatcacagtgcgtcgttaactgcgatggtgggcggtggtgcaattccagggccaggtgaaatttcgctggcgcataacggcgtgctttttcttgatgagttacctgagtttgaacggcgtacactggatgccttgcgagagccgattgaatccgggcagatccatctttcacgcacacgagcaaaaataacctatccagcccgtttccagcttgtcgcggcgatgaatcccagccctaccggacattatcagggaaaccataaccgctgcacgccagaacagacattacgttatctcaaccggctctcggggccctttctcgaccgcttcgatctctcactggagatcccattaccaccccccggcattttgagtaaaacggtagtgccgggagaaagcagcaccaccgttaaacaacgtgtaatggctgccagagagcgccaatttaagcggcagaataagttgaacgcctggctggatagtccggaaatacgccaattctgcaagcttgagagcgaagatgcgcagtggctggaagaaacgctgatccatctggggttatcgattcgtgcctggcagcggttattgaaagttgcacgaaccattgctgatattgatcagtccgacattatcacacgtcagcatttgcaggaggcagttagctatcgtgccattgaccgtttgctcatccatctgcaaaaactactgacataaaaaaaagggcatttcgccctttttattaatcgtcagaatcggtgtagtcttcagcaccttcaacctgcggtttaccgccggaaagggtgtgaaaacgttttggacgcttgatacgcgtcatatacttggaccacacgcgttctgcttctgtcactggctcacgttcgccacggcatactgctacgaagagtttctcttcctcggtaaccggctcgcgtttgccaagatccaactcattgaaggcataaccatgacgctcaagcagttgtgcctctttgatggtgaaatcaccatgacgagagaatccacgtggataatgtttattgtcgaaatatcgattagtcgtcgtaaagctttccgccatcctgcacgctcctaattctttgaccgagctagttatggcgcggagtattagttacgcttgacagagtgtaaaacaaaacatttaaatcataacgacaaataattttgcggagagcactgtggatacggaattgttaaaaactttcctggaagttagccgaacgcgtcactttggtcgagcggctgaatcgctctatctgacccagtcagcagtgagctttcgaatcagacaactggaaaatcaactgggtgtgaaccttttcacccgccacagaaacaatatccgtttaaccgctgccggtgaaaaactactgccttatgcagaaacgctcatgagcacctggcaggccgcccgtaaggaggtggcgcatacctcacgacataacgagttttctatcggtgccagcgcctcattgtgggaatgtatgcttaatcagtggctgggacgtttgtatcaaaatcaggatgcccatacaggcttacagttcgaagcgcgaattgcccaacggcagtctctggtaaaacagctgcatgaacgccagcttgatcttcttattaccactgaagcgcccaaaatggacgaatttagtagtcagttgctggggtatttcactttagcgctttataccagtgccccttctaaactaaagggagatcttaactatctgcgactggagtgggggccagattttcaacagcatgaggcaggtttgatcggtgctgacgaagtgcccattctgacaaccagttctgctgaactggcacagcaacagattgcgatgcttaatggttgcacctggctacccgtcagctgggcgcgtaaaaaaggcggcctgcataccgttgtcgatagcacaacactttcacggccgctttatgccatatggctgcaaaatagcgataaaaatacgttgattcgcgatcttttgaaaattaacgtgctggatgaagtgtattaatatgaatggctggcaaggatgccggtagaaggatttacttcggagagggttatttcagataaaaaaaatccttagctttcgctaaggatgatttctggcaggggcggagagactcgaactcccaacacccggttttggagaccggtgctctaccaattgaactacgcccctaattagggtggcggaacggacgggactcgaacccgcgaccccctgcgtgacaggcaggtattctaaccgactgaactaccgctccaccgaattcttttacaaccaccggttttatgaccggcttactgctaaatttgatgcctggcagttccctactctcgcatggggagaccccacactaccatcggcgctacggcgtttcacttctgagttcggcatggggtcaggtgggaccaccgcgctaaggccgccaggcaa

SEQ ID NO: 32 - DNA, 90081 bp, Escherichia coli
  source 1..90081: mol_type = genomic DNA
gaaatggagccaacttcgacaacacgattttgcgccgttcatacgaacggcaggggatcccctgcccgtggcgttactacaacgatcgcgatgtacgcacaatcgttgagctggggaaagccatagatttcgatgccagaacggctattccattcgaaggtgagcgccataatgcacttgatgacgcccgttaccaagcaaaatacgtttcagttatctggcaaaaactgatcccgagtcaggctgattcttaatgttcaactgtcgccggttgtgactggtattctgcaaccggcgctcgtctgatgtaagagataaagaaatcgatgagcgaagtaatcatgattgtctctcccggcaaatgggtatccgaagagcagttaattgcgctgaaaggaataaaaaaaggtacgttaaaaaaggcccgggaaaaatcgtttatggaaggaagggaatataagcatgtcgctcatgacggtatgccatgggataacagtccatgcttttacaacctggaagaaattgatcgctggattgagcgccaggcatcagcaagaccaagacgtcatcttacttgactaaaagccacactaactaatgagagaagttgaaatgaaatatccgacaggcgtggaaaaccatggagggaaattacgtatctggtttgtttataaaggcgtaagagtcagggaaaacctgggggttcctgacacagcaaaaaacaggcgcgttgcaggtgagctacgcgcctctgtttgttacgcaataaaaactggtgttttcgactatgcaaaacagtttccctcctcacgcaatctggaaaaatttggtgagacccgacaagatttaaccataaaagaactggctgaaaaatttctggcactgaaagaaactgaagtcgcaaaaacatcactcaacacataccgtgccgtcatcaaaaatatcctgagcataatcggtgaaaaaaatcttgcctcatcgattaataaagaaaaattactggaggttcgtaaagagctactgactggataccagagccccaaaagtaactatattgttacacaaccagggagatcggctgtaactgtaaataattacatgacaaatcttaacgccgtgttccagtttggtgttgataacggttacctggcagataacccgtttaaggggatctcgccattaaaggaatcaagaaccattccggatcctctttcgcgggaggaattcatccgtcttatcgatgcgtgcagaaatcagcaagccaaaaatttatggtgtgtttctgtttatactggcgttcgccctggtgagctgtgtgcacttggatgggaggacatagatctgaaaaatggaacaatgatgatcaggagaaatttagcaaaagaccgtttcacggtaccaaaaacacaggcgggaaccaatcgggtcattcatcttattaagccagcaatcgacgctctccggagtcagatgacattaacgagactgagcaaagagcatatcattgatgttcacctcagagagtatggcagaacagaaaaacataaatgcacctttgtttttcaacctgaagtgtcagcgagagtaaaaaattatggtgaccattttaccgttgactcaataaggcagatgtgggacgcagcgataaaacgtgccggactccgccatcgaaaatcatatcagtcgagacatacttatgcctgctggtcgctgacagctggtgctaacccggcatttatagcaaaccagatgggccatgcagatgcgcaaatggtatttcaggtatacggaaaatggatgtctgaaaacaataatgcacaggtagctttgttaaatacacagttaagcgagtttgccccaaccatgccccataacgaagcaatgaaaaattaatttaatatttatcaaatagttgacacgtatgactcttgaaatccataaattcaagcgcagtgcccagccatcccgataccgctgctttcaccaaatccttagtgcttctttcgtgtttttctattgtcataatggttatctctaaaaaagaggtaagatgcgtactacttactcgccgttattggtattattcagaaaaagtgagtaagactttgcagcaatgtttttgatcctgttcaaataaactaatggcatcagcaacatgctggaaatcaaacgtatgggtaattaatttttctggtttaattaaccctttacttaaccagtcgataacgaccgggaatttatttgcatttaagcgtgaagagaaaatagagagttcttttccggtaattccttgctgaatcacttcagacggttcactggagaagcccatcaatacaatacgtgccgctggagaagccagcgttacggcctctttcaggatagaaggatgacaagccgcatcgataattaatgtcggctttatgcctttttcagcgaaaatctcgccaagcggtgtctggctgttattaatcgccctgtctgccccgctctctttcgctttttccagtcgttcatcaatgcgatcggcaacaatcacatttttaacgttatagacgccttttaatacctgaacgatcgtcaggccgattggaccggcaccataaaccagaacggtatcattttcagtcggttgaccatgaccggttacgttagccgcaatggtaaaaggttcgatcattaccgcatattgatcggccaatgcttcaggaattttccacgcattttttgccggaaccacagcatattcactgaaaccaccgtcagcgtgcacacctaatacagcgagtgtcgtacaaacgttcggcttacctattgagcacggatagcaatgaccacagctgaccaccggatcgacagcaacacgttcaccgactctggcgctttccacgccgtcacccactgcatcaatgacgccaaagaattcatgaccaatgacgcgcgggtatttcgcaaaaggattatgcccacgataaatatggctatctgaaccacaaattccggcaagtttcacttttactcgtacttcacccgctgacggggtgggtatttcacgttcgacaatcgccagttgattcggtttttcaattaatatgcttttcattatcttactccttaccagttccacagcgtgccatcttccagacgtgcgactggcagataagcaggttcatagggatatttcgccgccagcttttcatcgaattcgatgccaagacccggtttgtctcccggatgcatatagccgttatcgaaagtccagttgtgcgggaagacttcgagcatttgttcggaataacccatgtactcctggacaccgaaattggggacccacagatcaaagtgcagcgctgcagccatgcagactggtgacaaatcggaaggaccgtgtgagccagtacgtacctgatacagcgaagcaaaatcggcaatccggcgcataccggtaattccgcctgcatgggtcagcgtggtgcggatataatcgatgagttgctcttcaatcagttgtttgcagtcccagatgctgttgaagacttcacccactgcgatgggtgtgacggtatgttggcgaatgagacggaagcattcctggttttccgcaggcgtcgggtcttccatccagaacatgcgataatcttcaatgcttttaccaaagcgcgccgcttcaataggcgttaagcgatggtgcatgtcatgcagcaaatgttcattaaaaccaaacttgttacgtaccgcgtcaaacaatttcggcatgaaatcgaggtatttctccgtcgaccacagctgctcttccggccactgtcctttggttgcgggttcataagccagacctttacctttcgacatgccgtaggtggttttcataccagggattccgcactgcacgcggatggctttgaatcccagctcctgatgacgggcataatcatccagagcttcatcaatactgtgaccggtggtatggcaataaaccatcaccccttcacgagacgcgccgccgagtaactggtaaagcggcatgttggcagctttggctttaatatcccacagcgccatatcaaccgctgaaatggccgacatcgtaaccggaccgcgacgccagtaagcacctttatagaaaaactgccagatatcttcgatacggtgcgcatcgcgaccaataagctgcggacaaaggtgatcctgcaaataagaggccacggaaagctcacgtccattgagggtggcatccccaaggcccgtaataccgtcctcagtggtgatttttaatgtgacgaaattacgccccggacaggtaacaaaaacttcagcctttacgatcttcatgttcgattccttgcatcgcttgtcgtgatgcatgaaatctacgcaactgagctactaccatacaagtgtgaagatcgaaaaaagccggagtgatcacaaaaaaaggcgtatatttgcgctgtgaatggttgacaaaagatgaaatagaataccttttgtcagctgacacttcctcttatcttattgataaaatggatttatgttcctacgtgcgcccccagcccgcaacaatgatcaacatgccgcaaagcgcaatcaacgcacccgtccagtcataaagagtcagtttcacgccatccacaacgcgcagccacatcaacgccgtgcagacataaacgccaccataagccgcgtaaacacgcccactcgccgctggatgcaacgttaacaaccagacaaacagcgccagtgaaatccccgccggaagcaacagccagatactggcgtttcgttttaaccacaaccagggcagaaagcatccaataatttcacacagcgcagtagcaaaaaatagtaacgttgttttaatcatctttgtcacttattgacatcatgtatagttatagggcgacataatatcatcaatataaacaccctcctggtacgttttgcgttcgcagtggatggtgtagaatctcctttaatcattcatacagggaatgaattatgaaaatcactctcagcaaacgaatcggcctgctcgcttttctgctgccttgcgcactggcactgagcacaactgttcatgccgaaactaacaaactggtgattgagtctggcgacagtgcacaaagccgccagcacgccgctatggaaaaagagcaatggaatgacacgcgcaatctgcgtcagaaagtgaataaacgcactgaaaaagagtgggataaagccgacgccgcttttgataaccgcgataaatgtgagcaaagcgccaacatcaatgcctactgggagccaaatactttgcgctgcctggaccgtcgaactggccgcgttattaccccctaacctgttattgatttaaggaatgtaaggacacgttatgccaagcgcccacagtgttaagctacgcccgctggagcgtgaagatttacgctatgtacatcaactcgacaataacgccagtgtgatgcgttactggtttgaggaaccctacgaagcctttgttgaactctctgatctgtatgataagcatattcacgatcagagcgaacggcgctttgtggtggaatgtgacggcgaaaaagccggtctggtggagctggtggaaattaaccatgttcatcgccgcgcagaatttcagataattatctccccggagtatcaggggaaaggtctggcaacccgtgccgccaaattagcaatggactatggctttaccgttctcaatctctataagctgtatctgatcgttgataaagagaatgaaaaagcgattcacatttaccgcaagcttggcttttcggttgaaggtgaattgatgcacgagttctttattaatggtcaatatcgtaatgccattcgcatgtgtatattccagcatcagtatctggcagagcacaaaacaccgggtcagactctcctgaagccgaccgcacaatagcattaataataatcgatcgtatttttgatggtgtaaacccgttcgacggcgggttttactccttcatcaacaatgattagctgacagtccaccggattagcgtgactgtcatattcacagctctgttttacattaccaacccgttgattattcagtaaagtaaccgctgtgtaatctaattttttgatcggatccgttgatggcgtggcgctgacagataatgttttgtcgttacttttcgtggttttacccagcggataaccctgatcatcatagcgatattccatctgcatttgtttgctgctggctttaatcacgaagccattatcatcggtttcccaactcaccccggcagaaggtaattctgctagctggcattttccctgtaaacgtactctcttctccagcgtctcggcatcacggtaataattggcgtccagtaccagagcgaccacggtattattttccagatccagtaattcgagtgaatcaaaacagccttcttccgacaaagtcccagaaacacgtttcgtcacttcaccttgctcatccattaatgtctgagtgaaatcttttaccggaccacgcagcggatcaaaatcgaattcattagagaaactggccatctcaggggtaaatgaaagtgttacctctgtgcggtcacatcctgtgaggaatatcgcgagtaagcatggtagtaatttgtatttcacaacagtcaccagagagtagagatgattctcaatcatagtagcaaatacagtactttacacgttaaatgctatgcttaaagaagttatcttcgcgtaaggagcttatgatgaaactctcaacctgctgtgccgcgcttctgctcgccctcgcctcacccgtggtactcgccgcgccgggatcctgtgagcgcatacagagcgatatatcacagcgcattatcaataatggcgtacccgaaagcagcttcacgttaagtattgtacccaatgaccaggttgatcagcctgattcccaggtcgtcggccattgcgctaatgatacgcataaaattctctatacccgcaccaccagcggtaacgtctctgctcccgcgcagtctacccaggatggcgcgcctgccgaaccgcagtaatacattatcgactgaacgccggatacgacacatccggcgatttgaacatacaacataatcccaccttattactcatacccttctattgatatggattaataattcttaacccaaaatgggtagaccccctctattgttagcgcgctaaatattcaatatataaacatttatataacgataaagaacagggagtgagttatgtccaaaaatgaccgaatggtgggcatcagccgcagaacactcgttaaatcaaccgcgataggttctctggcgctggctgcaggcggtttttctttaccgttcaccctgcgcagtgcagcggcaacggtacaacaggccagcgaaaaagtgatctggggtgcctgttccgtcaactgtggtagccgctgtgcacttcgtctacatgttaaagataatgaagtgacctgggtggaaactgacaataccggcagcgatgagtacggcaaccatcaggtacgcgcctgtttgcgcggtcgctccatccgccggcgtattaatcatcccgatcgcttgaattacccaatgaaacgcgtgggtacacgcggtgaaggcaaattcgaacggattagctgggatgaagccctggatactatcgccagtagcctgaaaaaaaccgtcgaacaatatggcaatgaggctgtatatattcagtactcttcggggattgttggcggcaatatgacccgctcttcgccatcagcctcggcggtcaaacgcctgatgaactgctacggcggttcactcaatcagtatggctcctacagcaccgcgcaaatttcctgtgccatgccctacacctacggcagtaatgatggcaacagcaccacggatattgaaaacagcaagctggtcgtgatgtttggtaacaacccggcagaaacccgcatgagcggcggtggcatcacttatcttcttgaaaaagcgcgcgagaaatcgaacgccaaaatgattgttatcgatccgcgatataccgatacggctgctggtcgtgaagatgaatggctccctattcgcccgggcaccgatgccgcgctggttgcgggtattgcctgggtattgattaacgaaaatctcgttgatcaaccttttctcgataaatactgcgtcggctatgacgaaaaaaccttacccgcagatgcacccaaaaatggtcactataaagcctatattcttggtgaaggtgatgataacacagcgaaaacgccgcagtgggcttcgcaaattaccggtatcccggtagaccgtatcatcaaactggcgcgtgaaattggcacagcaaaacccgcttatatctgccagggctgggggccgcaacgccaggcaaacggcgaactgactgcacgcgctattgctatgttacctattttgacgggcaatgtcggcatcagcggcggaaatagtggcgcgcgtgaatcgacctataccattaccatagaacgcctgccggtgctggataatccggtcaaaacgtcaatctcctgcttcagctggacagatgctatcgatcatggtccgcaaatgacggcaatccgcgacggcgtccgcggcaaagataaactggatgtgcccattaagttcatctggaactacgcgggaaataccctcgttaatcagcattctgacatcaacaaaacgcatgaaattctgcaggacgaatcgaaatgcgaaatgattgtgatcatcgaaaactttatgacctcatcggcaaaatatgccgacattctgctgccagacctgatgaccgttgagcaggaagatattattcctaacgactacgccggtaacatgggatatctcattttcctccagcctgtcaccagcgaaaaattcgaacgcaaaccgatttactggatcctgagtgaagtcgcgaaacgtcttggacctgacgtctatcaaaagttcacagaaggtcgcacgcaggaacaatggttacaacatctgtacgccaaaatgcttgccaaagatccggcgttaccgtcttacgacgaactgaaaaaaatgggtatctataagcgtaaagatcccaatggccattttgtcgcctacaaagcatttcgtgacgaccccgaggcaaatccacttaaaacgccttccggtaagattgaaatttattccagcaggctggcggaaattgcccgtacctgggaactggaaaaagatgaagtgataagcccattgccagtttatgcctcaacctttgaaggctggaactcccctgaacgtagaaccttcccactgcaactgtttggtttccattacaaatcccgtactcactcgacctacggcaatattgatctcctgaaggctgcctgccgtcaggaggtgtggatcaaccctatagatgcgcagaaacgtgggattgccaacggcgatatggtgcgggtgtttaaccatcgtggcgaagttcggctaccagccaaagtgacaccacgcattctccctggggttagcgctatgggccagggagcctggcacgaggccaatatgtctggcgataaaatcgaccatggcggctgtgtgaatacgctaaccactctgcgcccttcaccactggcgaagggaaacccgcagcacactaatctggtcgagatcgaaaaaatataacccacgacaaccataaattctggcatgacattttgtttgaaaagcaataagtgagtaatgatgaaaatccataccacagaggcgctcatgaaggctgaaatcagccgtagaagtctgatgaaaacctccgcacttggcagtcttgcgctggcaagcagtgctttcactctgccattttcccaaatggtccgggcggcagaggctccggtagaagagaaagcggtctggagttcctgcaccgttaactgcgggagccgctgtctgttacgtttgcatgtgaaagatgacaccgtgtactgggtggagtctgatacgacaggtgacgacgtctacggtaatcatcaggttcgagcgtgtttacgcgggcgctctatccgccgacggatgaatcatcctgataggttgaaatatcccatgaagcgcgtcggcaagcgcggtgaaggtaaatttgaacggataagttgggacgaagccctggataccatcagtgataatcttcggcggatcctgaaagattacggcaatgaggctgtacatgtcctgtacggaacaggcgtagatggcggaaacatcaccaactcaaacgtcccgtaccgtctgatgaactcttgcggtggttttctcagtcgctatggcagctacagtaccgcacagatcagtgccgcaatgagttatatgttcggtgccaatgatggcaacagcccggatgatatcgccaatacgaaactggtcgttatgttcggaaataacccggcagaaacgcggatgagcggcggtggtgtcacttactacgtcgagcaagcccgcgaacgttcaaacgcacgcatgatcgtcatcgatccacgttataacgacactgctgccgggcgtgaagatgaatggctgcccattcgccctggcaccgatggcgcactggcctgtgcgattgcctgggtactgattactgaaaacatggtcgatcagccatttctcgacaaatattgtgttggttacgatgaaaaaacgctgcccgccaacgcaccacgtaacgcgcattataaagcctatattctgggcgaagggcctgacggcatagctaaaacgccggaatgggcagcaaaaatcaccagcatcccggcagaaaaaattatccagttggcgcgagagatcggttcagcaaaacctgcttatatttgtcagggttgggggccacaacgacattccaacggcgagcaaacatcccgcgctattgccatgctttccgttctcaccggtaacgtcggcataaacggcggcaactcaggcgtacgcgaaggtagctgggatctgggggtagaatggttcccgatgcttgagaaccctgttaaaacgcagatttccgtctttacatggacagatgccatcgaccatggtaaggaaatgaccgcgacccgtgatggtgttcgtggaaaagaaaaactggatgtccccatcaagtttttatggtgctacgccagtaacacattgatcaatcaacatggcgacatcaatcacacccatgaggtgcttcaggatgacagcaagtgcgagatgattgttggcattgaccacttcatgacggcctcggctaagtattgcgatatcctgttgcccgacctgatgccaacagagcaagaagaccttatctctcatgaatctgcagggaatatgggctatgtgatcctcgcccaacccgcaacctctgcaaaatttgaacgcaaacccatctactggatgctgagtgaagtcgccaaacgcttaggaccagacgtttatcaaacctttactgaaggtcgcagtcagcatgaatggatcaaatatctccatgcgaaaacgaaggaacgtaaccctgagatgcccgactacgaggagatgaaaacgaccgggatctttaagaaaaaatgcccggaagaacactacgtcgctttccgcgcattccgtgaagatccccaggcaaacccgttgaaaacaccttcggggaaaatcgaaatttattctgaacgactggcgaagattgcagatacctgggaattgaaaaaagatgaaattattcatccccttccagcttatacgccaggttttgatggctgggacgatcccctgcggaaaacctatccactgcagttaacgggcttccactacaaggcgcgtacccactccagctacggcaatattgatgtgttacagcaggcctgcccacaagaggtgtggatcaaccccattgatgctcaggctcgcggtatccgtcatggcgataccgtgcgggtatttaacaataatggagaaatgctgattgccgcaaaagtgactccgcgtattctgcctggcgttaccgccatcgggcaaggtgcgtggcttaaagcggatatgtttggtgaccgggtcgatcacggcggcagtatcaatattctgacctctcaccgcccttcaccgctggcaaagggaaacccgtcgcacagcaatcttgtccagatcgaaaaggtttaaagagtagcccatgaccacacaatatggattttttatcgattccagccgctgtactggctgtaaaacctgcgaactggcgtgcaaagattttaaagatcttggcccggaagtcagtttccgccgtatttatgaatatgctggcggcgactggcaggaagataatggcgtctggcaccagaacgtgttcgcttattatctctccatctcctgtaaccattgcgatgacccagcatgtacaaaagtctgccccagcggcgcaatgcataagcgtgaagatggctttgtggtggttgatgaagatgtttgtatcggctgccgctactgccacatggcttgtccgtacggcgcaccacagtacaatgctgaaaaagggcacatgacgaagtgcgatggttgttattcgcgcgtcgccgaggggaaacaacccatatgcgtcgaatcctgcccgctgcgtgcacttgagttcggtccaattgaagagctgcgccagaagcacggcactctggctgccgtcgcgccactgccgcgcgcgcatttcacaaaacccaatatcgttatcaaacctaacgccaacagccgcccgaccggcgataccactggttatctggctaatccggaggaagtgtaaaatgggaaatggatggcatgaatggccactggttatctttaccgtattgggtcaatgcgtagtaggcgcgctgattgttagcggaattggctggttcgccgccaaaaatgacgcagaccgtcagcgtattgtccgtggcatgtttttcctctggctgttgatgggcatcgggtttattgcctctgtcatgcacctgggatcgccactgcgagcgtttaactcgctgaatcgaatcggagcttctggtctgagtaacgagattgctgccggttccatattttttgccgttggcggactatggtggctggtggcggtcatcggtaaaatgccgcaagcgttggggaaactctggttacttgtcagcatggcgctcggcgtcattttcgtctggatgatgacctgcgtgtatcaaatcgacaccgtgccaacctggcataacggttacactacgctggctttcttcctgacggtattgttgagcggtccaatacttgctgccgcaattctgcgggcagctcgcgttacatttaataccacaccatttgccatcattagcgttctggcgctgatcgcttgtgccggggtgattgtgctgcaaggtttgtctctggcgtctattcactcatccgtacaacaagccagcgcactggtaccagattacgcctccttacaggtctggcgtgtggtattgttatgcgcaggtctaggatgctgggtttgtccgctcattcgtcgccgtgaacctcacgttgccggacttattctggggttaatcctcattcttggcggtgagatgatcgggcgtgtgctcttttatggcctgcacatgacggtaggaatggctattgcaggttaacaaattggtgcggggcaacccgcacatttcaggatgttaggaatgacccatttttcacagcaagataatttttctgtcgcggcgcgcgtgttgggcgcgctgttttattacgctccagagagtgcggaagccgcacctctggttgcggtactcaccagtgacggctgggaaactcagtggcctctaccagaagcgtcattagcgccgctggtgacggcttttcagacacagtgtgaagagactcacgcccaggcctggcagcgtttgtttgtcggcccgtgggcactgccgtctccgccgtgggggtcggtctggctggatcgcgaatctgtgctgtttggcgattcaacattggcacttcgtcagtggatgcgcgagaaaggcattcagtttgaaatgaagcaaaacgaaccggaagatcattttggttcactgctgttgatggctgcgtggttggcggagaatggtcgccagacagaatgcgaagaattgctggcatggcacctttttccgtggtcaacacgttttcttgatgtttttatcgaaaaagcagaacaccctttctaccgtgcactgggtgaactggctcgcttaacgctggcgcaatggcaatcacaactgttaattcctgtcgcggttaaaccgctgtttcgataggatcaccgtaatattgccggatggtgacgattacgcgcaatccggcaataataggttacagtgtcacgtttttttatctcttaaagcacgcactgcttttgcggctggcctcttttgccgcaaaatagtcgcccgtgtttcattgcccatttctgctcatgcatcatctacacatctatccggatctgcgcactatgttccgccgtctgcttatcgcaacagtcgtcggtattctcgcggcctttgccgttgccgggtttcgtcatgcgatgctgctactggagtggttgttcctcaataatgactccggcagtctggtcaatgcagcgacaaacctttccccctggcgacggttgctaactccggcgctcggcggactggcggcgggtttgttgctgatgggctggcagaaatttacccaacaacgccctcatgcgccgaccgattacatggaagcgttgcaaaccgatggacagttcgattacgcagcaagcctggttaaatcgcttgcctcgctgctggtagtaaccagcggcagtgcaattggtcgcgaaggtgcgatgattcttttagctgcccttgccgcctcctgttttgcccaacgttttacgccacgccaggagtggaaattatggatcgcctgtggggccgcggcgggaatggctgcggcctatcgtgccccgcttgctggcagtttatttatcgccgaagtgctgtttggcactatgatgttggcctctctcggcccggtgattatttccgccgtcgtggcattgctggttagcaatctgattaatcatagcgacgcgttactctacaacgtacaactctcagtgacggttcaggctcgtgactatgcgctgattatcagtacaggtgtgctggcaggtctgtgcggaccactgttgttaacgttaatgaacgcctgtcatcgtggatttgtgagtctcaaacttgcgccgccctggcaactggcactaggcgggttgatcgtgggtctgctttccctgttcacacctgcagtgtggggcaacggctatagcaccgtacaatcctttttaaccgccccaccactgttaatgatcattgccgggatcttcctttgtaaactgtgtgccgtgctggcgagtagcggttccggcgcacccggtggtgtctttacaccgacgctatttatcggtcttgccattggcatgttgtatggtcgtagcctgggattatggttcactgatggcgaagaaattacacttttactcggattgaccgggatggcgacactgttggcggcgaccacgcacgcgccgattatgtcgacgttgatgatatgtgaaatgaccggggagtatcagctactccccggtttattgattgcctgcgtaattgcgtcggtaatttcgcggacgttacaccgtgactctatctaccgccagcacactgcgcagcatagctaagcggatgtattgccccagttcacgctgttcggcgcgcggcagataaggcagttcaccaatgagcggtgccggaagttttttacccagcacatcaatgatttccgcataatgcgccagtcctgggttgattcggttagccacccagccaatgagcggcagcccgtcgttggcgatcgcctgagctgttagcagtgcatggttaatgcaaccttcctgaataccgacaaccatcaacaccggcagttgttcctgcaccacccattcagagagtggacgcaaatcattcatcagactgcgccagccgccagtcccttctaccacgacatgatcgactttttcggtcaggtttgccaggccgtttgaaatgagggtgtaattgattgggcaactgtgcgccacgctactttcttcttcgcttaacgcgataggattaactgcttcataaggcagttcgatggttgaaacactctgcaacaccagggcatctttattacgcagcccttcgggtgtctctttgctccccttcgctacgggtttatatcccgcaaccgtttttccctgggaggctaacgcttgtagcaatgcgcgggaaaccaccgttttccctacagaagtgtctgtaccggtaataaagaaacgcttcagcatcactaactccaccgttatgcttcacaaatataaaccaggaaaataattaaccttgaaagtctaagttatgctttcctggcccaaattgagatagcgcaaattttggtagaacagttaaaaaatgttaaccctgcaacagacgaatcaacaaagaaccgttatacatcgcgtcttttaccagtgcagcccctgccatcgtgccctggttagaaaactgagtactctcaacgctgatgtgctgactatacgcaggaagggcctgctgacggatgctgtctgagatgaccgggaagaggatatctgccgctttacttaacggtgagccaatcagtattttttgtgggttaaataaattcaccatgatggcaagaatgcgccctacatgcgcgcccaccccggtaatgatgtcttttgccagcagatcgccgcgcaatgccgcctgacacaatgagtccacggttaacggttgtccatgtaacatcgagctcatggattgattaagacgcagctgtgccagctcaagtatactgtccacactggcgatggtttcgaggcagccgtgattcccgcaataacaacgtttcccatacgggtcgacctgtgtgtggcctatttccacgaggctactgctgcctgcgtgtagcagatgaccatcggtaatgacgcccgcccccacgttgtgatcgataaccacctgaatcacatcgcgcgccccgcgtgaggcaccaaacaaggcctctgccatcgtccatgcgctgatatcatgctgaatataaaccggaacgccggtatgctgctccagagcctcgccgagcggcatctcttttacatcctcgtagaacggcatgcgatgtacaatgccattttccgtatcaataattcccggcagggttatggcaatcgaagttagacgctcaagttttttctggtggcggataaaaaactgatcgatatgggaaatgatacgatccagcaatggcgagtcatcttttaacgccagttcctgcgactcttccaccaccagtttgctgctcagatcgcgcagagcaaggaaaatctccccgcgactaatgcgcagagaaagatagtgccaggcttcagtttcaaccaccagccccaccgccggacggccacggttccccgcttctttgatttccagctcttgcaccaggtgtgcttcgagcatctcacggacaattttagtgatactggcaggagccagttgcgccagacgggaaagatcgatacgcgagactggaccaagctgatcaatcaggcgataaaccgcgcccgcgttggtctgctttatttgatcaatgtgcccaggctggttttcagcaaccaccgcatactccctatattttcgcgctccgaaataatctgtaggctatggtgaagcacttcaatacgtgtcgtcaaatttttacttaggcatgtgattaacagcacatttttcgggctttttcgctgaaatttccctcacctgagagcattcagcagatgaatacgaaagttacgcgcagctggactttgttcatgatgtttcggccagaccaaccacatttcagaaaccgcatcctcttctgcaatcggcacccagcgcatttcgttgagctgaacacgtttaaatgacgcaggcaaaattgaaacacccagaccggcggaaaccagaccgatgatggtcattgcctcgcccacctcctgagtgatgacgggcgtcaaatggtaacgtcgcatcagcccgagaatatcgtcatacagccctgtcccgacgtgcggatcaaaaaagacgaagggttctttcgccagttcagccagcgttacattcgggttatttgccaggggatgatcgtgcgggatcatcgccataagcggttcatggacgatgactgcgtgttcaagcgtctccggtaacgctgtgttacgcagcaatcccatatccagcgttccttcaatgagcggagcgatttgctcacgagtgttcatttcgcgggtttgtaaatggacatcgggataatcacggcgaaacagcgataacgtatcagacaccgcccgaataaaaggagcggacgaagtaaaaccaatacgcaactcccccgcttcaccctgatgcagtctttcagcgcgagcggcagcgtcatccaccatagacaggatttgccgactatctgcaagaaactgttttcctgctgccgtcagcaatacactgcgattagttcgtgccagcagtcgggcaccgatttgttgctccagtgcctgaatctgctgacttagcggcggttgcgaaatattcaggcgggcagccgcgcgcccaaaatgcagctcttccgcaacagcaacaaagtaacgcagatgacgaagttcaatattcatatttaaaacatcttatttgagattattaatatattagacagaacaattcgattttcctaccctatgtataagcctgatccacaggcatatttagcaaggatttcaagtgagccgtactacaactgttgatggcgctccggcaagcgacactgacaagcaaagcatttctcagccaaatcaatttattaaacgcggtacgccgcaatttatgcgcgtcaccctggcgctgttctctgccggactggcaacatttgcacttctctattgtgtgcagcctatccttccggtgctttcgcaggagtttggcttaacgcccgcgaacagtagtatttcactgtccatttccacggcgatgttggctattggtttgctgtttactggccccctatccgatgccattggtcgcaaaccagtgatggtcacggcgctactgttggcctccatttgtacgttactttcgacaatgatgaccagctggcacggcattttgattatgcgcgccttgattgggctttcgttaagtggcgtggcagctgttggcatgacttatcttagcgaggaaatccaccccagtttcgtggccttttcgatggggttgtatatcagcggcaactcaattggcggcatgagcgggcgcttaattagtggtgtcttcacggactttttcaactggcgaattgctctggcggcaatcggttgtttcgcgctagcctcggcgttgatgttctggaaaatccttccggaatcacgccattttcgcccgacttcgctgcgacctaagacgttgtttatcaactttcgtctgcactggcgtgaccggggattaccgttattgttcgcagaaggctttttgctgatggggtcgttcgtcacgctgtttaattacatcggctatcggttgatgctctccccctggcatgtcagtcaggccgtggttggcttattatcgctggcttatttgaccggtacatggagctcacccaaagccggaaccatgaccacccgctacgggcgcggtccggtgatgttgttttcgacgggggttatgctgtttggtttactgatgaccttattcagctcgctgtggctgatctttgccggaatgttactcttctcagccggattcttcgcagcccactcagtagccagcagctggatcggcccccgcgcaaaacgcgctaaaggccaggcctcctcgctgtatctgttcagttactatctggggtcgagtattgccgggacgctgggtggtgttttctggcataactatggctggaacggcgtcggcgcatttattgctctgatgctggtcattgctctgctggtcgggacgcgtttgcatcgtcgtctgcacgcctgaaaaataagcccggactgcggtaactacacgtccggacttattgcttgctcaaaccaacgttaatagccatcctaaaatagacgaagcgccagccaattcccgcagcgcgtctagcgtcatcaggattataagtacccaaataaacggattcattttgctgtgtgtcatttattactgatgcgcagttattctaccgctttgtaagtagtaaaatagttaacccgatcaagactactattattggtagctaaatttcccttaagtcacaatacgttattatcaacgctgtaatttattcagcgtttgtacatatcgttacacgctgaaaccaaccactcacggaagtctgccattcccagggatatagttatttcaacggccccgcagtggggttaaatgaaaaaacaaattgagggtatgacaatgaaaaaagtattagctctggttgttgccgctgctatgggtctgtcttctgccgcctttgctgcagagactgcgaccacacctgctccgactgcgacgaccaccaaagcagcgccggcgaaaacgacacatcataaaaaacagcataaagcagcacctgcccagaaagcgcaggcggctaaaaagcatcataaaaatacgaaagctgaacagaaagcccctgaacaaaaagcgcaggcagcgaagaaacacgccgggaaacacagccatcagcaaccggcaaaacctgctgcacaacccgcagcgtaagttttcaacagtaatgctggcgcgccccctcgcgcctgaaaattacggtgctaagcgggtaacgtttagcaccgcctttagcggagggtagtatggtgggccgttatcgctttgagttcattcttatcatccttattttatgcgcactgattgccgcccgtttttatctttcctgactgtagttatctgattttactcccactttcatcccgtcccgtctatagtatttatgagggtttgcttttaataatcataattacccaccagagtgtgatatgcgtacaaccattgctgtagtgttgggtgcaattagtttgacgtctgcttttgtgtttgcagataaaccagacgttgccaaatcggcaaacgatgaggtcagcaccctgttttttggtcatgatgatcgtgtgccagtgaatgacacgacccaatcaccgtgggatgcggttgggcaactggaaacggccagcggcaatttatgtacggcgacgctgattgcacccaatctggcattaacggcaggacactgtttattgacacctccaaagggtaaagccgataaagcagtggcgctgcgttttgtgtcaaataaaggtctttggcgctatgagatccacgacatagaaggccgcgttgatccgacactgggaaagcggttaaaagcagatggggatggttggattgttcctcccgcagctgcaccatgggacttcggcttgattgtgctgcgtaatcccccttctggcattacaccgttgccgttatttgagggagataaagccgcgcttactgccgcattaaaatcggctggtcgtaaagtgactcaggcgggatatcctgaagatcatctcgatacgttatacagtcatcaaaactgtgaagtgactggctgggcgcaaacgtcggtgatgtcacatcagtgcgataccttgccgggtgacagcggttcgcctctgatgttgcataccgatgacggctggcaattaattggggtgcaaagttcggctcctgccgcgaaagatcgctggcgcgccgataaccgggccatttctgttaccggttttcgcgacaagctggatcaactgtcgcaaaaataatgttcaaacgctgcccgacagcgcgggcagcgtcttcatcaggcaagtttcaccatgatcattccagccaacagcaagaccaggccaatccagcctttacgatttaaccgttgaccaaacaagatccaacctgcggctaacgtggcggcaataccaaacccgccccacaatgcataagcgacagacaagtcgatcccttttacggcctgagaaagcgcactaaaggcagccagcaccgccgccagggagagcaagccaaatattttgcgacgaaagccgtcagaaaatttcaaaaagacgttagcaacgatttccagcacgattgccaatgccagccaggcggcgtgaacccattcaaactgcgccatggttcacctccagttcaggtttacgcgctttacgggtacctgatttgatcaacacaatcccggcgaccagggtggttaacccggcaattttcatcagcgataaactttcgtcgaataacaaaacgctaaacaaggtaataaataaaataccgataccttcccacagcgcataagctacgcctaaggcgatctttttaacggcgaaagagagaaatatatacgacagagaaatcatcaccagcattaaaataaagccgccatttccctcactgacgctcgcccatttcattgacagcgtaccggtaatttctgtagcaatagccaggcctaataaaatccaataaatatacattgtccttctcctgcaagagaattattttaattttcgcttaattcagcgaaaccaaagtaaagtggtcaagccccgcgcatagggcaagcttaggcagaagaaaggactaaagcgcgttgcgccagtgctgctcacctacgagcaagatagtggatgaggtacgaagatgggtaaatgttgaaaataacgtcctgaacaaattgtccataatattacaattatccgcagtgttgcttctcgtcatcgcggatgataattgtcctcggtagttgaacacgcctgatttgtatcatagcttaagaattaactcaaaatattttcacttctttacctgagcggtttgattttcgttatgatgacggagcgaaaaagacattattattagcaaaggaagaaaaaacggggacaagcatggcaaagccgatcatcacgctcaatggcctaaaaatcgtcattatgttgggaatgctggtcattattctctgcggtatccgttttgccgccgagatcatcgtgccgtttattctcgcattatttattgctgttattcttaacccgctggtgcaacacatggtccgctggcgagtgccgcgtgtactggcggtgtcgattttgatgaccatcatcgtgatggcgatggtgttgctattagcttatctgggttccgcgctcaacgagttgacgcggacgttaccgcaatatcgcaactctattatgacgccgctgcaagctcttgagccgttgttgcaacgcgtagggattgacgtctcagttgaccagctggcgcattacattgatccgaacgcggcgatgacgttgctcaccaacttattgacgcagttatctaatgccatgtcatcaatatttttattgctgctgacggtgctgtttatgctgctcgaagtgccacaattgcccggaaaatttcagcaaatgatggcgcgtccggttgaagggatggcggcgattcaacgtgcaattgacagtgtttctcattatctggtgctgaaaacagccatcagcatcatcaccggcctggtcgcctgggcgatgctcgccgcactcgatgttcgcttcgcttttgtctggggattgctggcctttgcgcttaattacatccctaatattggttcagttctcgcggcaatcccccctatcgctcaggtactggtgtttaatggcttctacgaagcgttgctggtgctggcgggatatctgctgattaatctggtcttcggcaatattctggagccgcgcatcatgggacgtgggctggggctttccacattggtggtatttttgtcgttgattttttggggatggttgttaggaccggtgggtatgctgctttccgtgccgttaacaattattgtcaaaattgcgcttgaacaaacagcgggaggtcaaagcatcgccgttctgttaagcgatctcaataaagagtgacggcctccgcagaggccgtcagggttacagagctttcaggattgcatccacgctggctttggcgtcaccaaacagcatgtgggtgttttccttgaagaacagcgggttttgcacaccagcatagccagtgttcatcgaacgtttaaagacaatcacgttctgcgctttccacacttccagcacaggcataccagcaataggactcttcggatcatcctgcgccgccgggttaaccgtatcgttagcaccaatcaccagtacggtatcggtatcagcaaagtcatcgttgatctcgtccatttccagcacgatgtcatacggtacttttgcttcagccagcaatacgttcatatgtccaggcaaacgccccgcaaccgggtggataccgaaacgcacgttgataccacgagcgcgcagtttctcggtaatttcagcgacaggatattgcgcctgcgcgactgccatgccgtaccccggagtaatgatcactgaatgggagtttttcagcagttccgctgtctcttctgcggtgatttcgcggtgctcgcccacttcctgatcatcgccagtagaagagccgtcggtgccgaaaccacccgcaataacgctgataaaggaacggttcatcgccttacacataatgtaagaaaggatagcgcccgaagaaccgaccagcgcaccggtcacaatcagcaggtcgttgctgagcataaagcccgcagccgcagccgcccagccggagtacgagttcagcatcgacaccaccactggcatatctgcaccaccgatggaggcgactaaatgccagccgaataccagcgcaatggcggtcattatcagcaatgccagcacttgcaggccgacgctatccgtgcgaacaaatacaatcagcagcaggaaggaaacgaccagagccgccaggttcattttgtgacggtttggcagcatcaacggtttagacgaaatcttgccacacagtttgccgaacgccaccaccgaacccgtgaacgttaccgccccgatgaagataccgaggaacacttccgtcaggtgaatattgaccagaatcggtgccattcccgcgtcatgatgcagataactgttaaagccaaccagcactgccgccagacccacgaagctatgcaggatcgccaccagttctggcatttcggtcatttcaactttcttcgccagacggataccaattgccccaccaatgaccatcgccagcaagatccagccaacattacccgtatccggtccaaaaatggttgcgattaacgcaatcgccatcccggcgataccgaagttgttaccctggcgagacgtttcatgtttcgaaagaccggccagactgaagataaacaggatcgcggcaacaatgtatgcagctgtaactaatcctgcagacatatgttaccccttaatttttgcggaacattttcagcatgcgctgagtcacggtgaagccaccgaaaatattaatgctggctataagcaccgcgataaaactaaggaagctaacccagccgccctggccaatctgcaacagtgctccgacaacaataatccctgaaatcgcgttggtgaccgacatcaacggtgtatgcagcgcatgcgatacattccacaccacgtaataaccgacaacgcaggccagcgcgaaaacggtgaagtgcccaagaaactctttcggcgcaacgcttgccagccaaccgaaaaggatgattgccagcgccatcaatgcgtatttacgccacggtgagcaggcacatttttcctcagttttcacttccggtgccgctttttgtgccgcctgcggctgagctgatacctgaatcggcggtgccggccaggtaatttcgcccgcacggatcacggtcacgccgcgaatcaccacatcatcaaaatcaacagtgatattgccgtctttctctttgcacaacagtttcagcagattaacgaggttagtaccgtaaagctgtgaggattgcgtcggcagacggcccggaagatcggtataaccaatcactttgacaccattttccgtagtgaagatttcacccggcacggtgtattcacagttgccaccgttttgggctgccaggtcgacaatcacactgcccgccttcatggagtcaaccatttcacgggtaattagcttcggcgctggtttgcctggaataagcgcggtggtgacaatgatatcgacctcttttgcctgggcggcaaagagttccatttccgctttgatgaacgcgtccgacatcactttggcatagccatcgccgctgcccgcttcctctttaaaatccagctcgaggaattccgcgcccatactttgaacttgttctttcacttccgggcgggtgtcgaatgcacgcacaatcgcgccgagactgtttgctgcgccaatggcggccagacctgcaacacccgcaccaatcaccatcacttttgccggtggcactttcccggccgcagtaatttgcccggtaaagaagcgcccaaattcatgtgccgcttcaacaatggcgcgataaccggcgatgttcgccatcgagcttagtgcgtccagcgattgtgcgcgtgagatacgcggcacagaatccatcgccatcacggtcacgttacgttccgcaagtttttgcattaattccggattctgcgcaggccagataaaactcaccagcgttgtcccaggattcagtaacgcaatttcatcatctaacggcgcattgaccttcagaatgatctctgactgccagacgctattcccttctacaatttcagcgcccgcttgcacaaacgctttatcgtcaaaacttgccagttgacccgcgccgctctctaccgcgacggtaaaacccagtttcagcagctgttccactgtttttggcgttgctgcaacacgggtttcattggttaaccgttctcttggtatgccaattcgcatgatattcccttccatcggttttattgatgatggtttgcctgtgtcaggagccacacaagccgctcatgtacgagctaaatgttactccgttaaaataaattagtaacaaacgccctataacgtactgaaaattatgcctgtgatctagcgccaaaaatcagtatttcggcgtgaactcgcaaaatattaacgattcagccgtgatagtgggataaacaccttagaacgccggataaagactgataattgtcttcgacggtcgggtaaaacgagacatcgccccggcacgaattactacttaacattaaattaacttatataattcagttgcttcagtagtaatgatgctgatacggctgttttttaagcatagacggtcatttgagcaggattaaaattggcttaaagaatgtgatatgaaaaatgacgcagacagttacaccgtttaaatgcaataatcagccacgtttctcgttaataacaataccagtacctggtttgcgcaaggcgaaggattatttttatgaagcttaagaacaccctcctggcgtcggcactgctttctgctacggcattctccgttaacgcagcaacagaactgacaccggagcaagcggcagcggttaaaccttttgaccgtgtagtggttaccggtcgttttaatgctattggcgaagcggtgaaagccgtttctcgtcgcgcagataaagaaggtgccgcctctttttatgttgtcgacacttctgattttggtaacagcggtaactggcgtgtggtcgctgacctctataaagccgatgctgaaaaagcagaagaaacaagtaatcgcgtaattaacggtgttgtcgaactgccgaaagatcaggctgttctgattgaaccgtttgacacggtcaccgtccagggcttctatcgtagccagccagaagtcaatgatgccatcaccaaagcggcaaaagcgaaaggtgcctactctttctacatcgttcgtcaaatcgatgccaaccagggcggcaaccagcgtattactgcattcatctataaaaaagatgctaagaaacgtatcgtccagagcccggatgtgatcccggcagattccgaagcaggacgtgcagctctggctgccggtggcgaagccgcgaagaaagttgagatcccaggtgttgcgactaccgcatcaccaagttctgaagtcggtcgtttctttgaaacccagtcatcaaaaggcgggcgttacaccgtcacgctcccggatggcactaaagtcgaagaactgaacaaagcgaccgcagcgatgatggtcccgttcgacagcatcaaattctctggcaactacggcaacatgaccgaagtctcctatcaggttgcgaaacgtgccgcgaagaaaggtgctaagtattaccacatcacccgccagtggcaggaacgtggtaataacctgaccgtcagcgcagatctgtataaataactattcagttactcctataaggcggcttgatgccgcctttcgcatttttagtcacaaatttccccgcgaccattgcatgcagacacatctcttcgtaaaatcccgcgcttcagtggcaaactccatttttatgcgttttgccctaatatttattcttcttatcacgttttaatcactggatatcgatggaaaagaaactgggactgagcgcactcaccgcgctggtattaagctcaatgctgggcgcgggtgttttcagtctgccgcaaaatatggcggcagttgccagcccggcagcactgctcatcggctggggtattactggcgctggcattttattgctggcctatgccatgctgatcctcacgcgcattcgtcccgaacttgacggcggtatctttacctatgcccgcgaagggtttggcgagctaatcggcttttgttccgcatggggatactggctgtgcgcagtcatcgccaacgtctcctatctggtgatcgttttttccgcgttaagcttttttacggacacgccggaattgcgcctgttcggcgatggtaatacctggcaatcgatcgtcggtgcatcggctttattgtggattgttcactttttgatcctgcgcggggtgcaaaccgctgccagcattaacctggtggcgacactggcaaaattgttgccgctgggtctgtttgttgtgctggcgatgatgatgttcaaactggataccttcaagctcgacttcaccggacttgcacttggcgtacccgtttgggaacaggtgaaaaacaccatgctgatcaccctgtgggttttcattggtgtggaaggtgccgtggttgtttctgcgcgtgcgcgtaataaacgtgatgttggcaaagcgacactgctggcggttctctccgctctgggcgtttacttgctggtaacgctgctttcgctgggtgtggtggcacgtcctgaactggctgaaattcgtaacccgtcaatggccggtctgatggtggaaatgatgggaccatggggcgaaatcatcatcgctgccggtttgatcgtttccgtttgcggcgcgtacttaagctggaccatcatggcggcagaagttccgttcctggctgccactcataaagcattcccacgcatttttgcgcgccagaacgcacaagctgcgccatccgcctcactgtggttgaccaacatctgcgtgcaaatttgtctggtactcatctggctgaccggttccgattacaacacgttgctgaccatcgcctcagaaatgattctggtgccctatttcctggtcggcgcgttcttgctgaaaatcgcaacccgtccactgcataaagcggtaggtgtcggtgcctgcatttatggcttatggttattgtacgcctctggtccaatgcacttgctgttatccgttgttctgtatgcgccggggctgctggttttcctgtatgcgcgcaaaacgcatacacatgataatgtactgaaccgtcaggaaatggtgctgattggcatgctgttaattgcctcagttccggcgacctggatgctggtgggataacgttcatcccatcgttggatagcaaaggagataacgatgggtaaagcccagcccttgccaatattaattactggcggaggtcgtcgcatcggcctcgccctcgcctggcatttcattaatcaaaagcaaccggtgattgtcagctatcggacgcactatccagccattgatggactgattaaggcaggtgcgcagtgtattcaggctgatttttcgaccaacgacggtgtgatggcgtttgccgatgaagtactaaaaagcacccatggtctgcgtgctattttgcataacgccagtgcgtggatggcagaaaaaccaggtacaccactggccgacgtactggcttgcatgatgcagatccacgttaataccccatacctgctcaaccatgcgctggaaagattactgcgtgggcacggacacgccgccagcgatatcattcactttaccgattatgtggtggagcgcggtagcgacaaacatgttgcgtatgctgcaagcaaagcggcactggataatatgacccgctcgtttgcccgcaagctggcaccggaagtgaaagtgaattctattgcgccatcgctgatcctgtttaatgaacatgatgatgccgaatatcgacaacaggcgctgaataaatcactgatgaaaaccgcgcctggcgagaaagaagtgatcgacctggtcgattacttacttaccagctgctttgtcaccggacgcagtttcccacttgatggcggtcgtcatctgcgttaatgcagctttatccagcatataatcaacacccatgcgcttatcccccaacacgcaacagaaccaacaaaagcggcgggcaagcgcatcattccggtgaaataccacagcgacaccaggtaaacaaaatagggaataatcgaccacatactaaaaatgatggttgcgcgtaaggcttcaatgccgcgttcgctggcaacaatataatgcgcgataagcgcaaaggtcgggaaaagtggaatcagcccggcgatataataatttttcgtttttgctaaaacaccaatcaacagcactaccagcgcaccgagcgcggctttgattaccagccccatctttttaccttaacacttccataacaagtcatcagtagaatacctgatgaaaacttgtttagaaacgattgatagtaagtaaaaacagcgcggtgtattgtgacgtttttatatctaccgtgaatgttatgaacactatcgtatttgtgaaagatgatgcggaagtcggttcactgattgccgcgtacctggcaaaacatgatatgcaggttaccgtagaaccgcgcggcgaccaggccgaagaaaccattttgcgagaaagtccggatttggtgttactcgacatcatgctaccaggcaaggacggcatgaccatttgtcgtgatttacgcgcaaagtggtctggaccgattgttcttctaacctctctcgatagcgatatgaaccacatcctggcactggaaatgggtgcctgcgactatattctcaaaacgacgccccctgctgttttgctagcgcgtttacgtttgcatttgcgtcagaatgagcaagccacactgaccaaaggtcttcaggaaacgtctctgactccctacaaagccctgcatttcggcacgttgaccatcgatcccatcaaccgcgtagtcaccctggctaacactgaaatctcgctctcgacagctgatttcgaattattgtgggaattagctacccatgccgggcaaatcatggaccgcgatgcattgctgaaaaatttacgcggcgtcagttatgacggactggatcgtagcgtggacgtggctatttcgcggttaagaaaaaaactgctcgataacgccgcagaaccttatcgcattaaaactgtgcgtaacaaaggctatctttttgcgcctcatgcatgggaataagcgatgaaaaaactgtttatccagttttacctgttattgtttgtctgcttccttgtgatgtctctgctggttgggctggtgtacaaatttaccgccgaacgcgcgggcaaacagtcgctggatgatttgatgaacagttcgctgtatctgatgcgcagcgaattgcgagagatccccccacacgactggggtaagacgctgaaagagatggatttaaatctctctttcgatctgcgtgtcgagccactgagtaaataccatcttgatgatatttccatgcaccgactgcgtggcggcgaaattgtcgccctggacgatcagtacacgtttttgcagcgtatcccgcgcagccactacgtgctggcagttggtcctgttccttatctttattatctccatcagatgcgattgctggatatcgccctgatcacttttattgctatttccctcgcctttccggtgtttatctggatgcgtccgcactggcaggatatgttaaaactggaagcagcggcgcaacgatttggcgatgggcatctcaatgaacgtatccactttgatgagggttcgagctttgaacgacttggtatcgcatttaaccagatggcggacaatatcaacgccttgattgccagcaaaaaacagcttattgacggtatcgctcacgaactgcgaacaccgttagtgcgcctgcgttatcgactggagatgagcgataacctgagcgccgccgaatcccaggcgttgaatcgtgatatcagtcaacttgaagctttaattgaagagctgctgacttatgcccgactcgatcgcccacaaaacgagctttatcttagcgaaccagacctgccgttgtggctgtcaacgcatctggcagacattcaggcagtaacgcccgataaaacggtacggattaaaacgctcgcgcaaggccattatgcggcgttggatatgcgcttaatggagcgcgtgctggataatttgctcaataacgccctgcggtactgccattcaacggttgaaaccagcctgctactgtcggggaatagagcgacattaattgttgaggatgatggcccagggattgccccagaaaaccgcgaacatatctttgaaccttttgttcgcctcgatcccagccgggatcgctcaaccggcggctgcgggctggggctggcaattgtccactctatagcactggcaatgggcggtacggttaattgtgacaccagcgaactgggtggtgctcgcttctcgtttagctggccgttatggcataacatcccgcaatttacctctgcctgacactacgcgcacgatggtcaagtcaccacgactgtgctataaaataagtatgttgtaactaaagtggttaatattatggcgcgttacgatctcgtagaccgactcaacactacctttcgccagatggaacaagagctggctacatttgccgctcatcttgagcaacacaagctattggttgcccgcgtgttctctttgccggaggtaaaaaaagaggatgagcataatccgcttaatcgtattgaggtaaaacaacatctcggcaacgacgcgcagtcgctggcgttgcgtcatttccgccatttatttattcaacaacagtccgaaaatcgcagcagcaaggccgctgtccgtctgcctggcgtgttgtgttaccaggtcgataacctttcgcaagcagcgttggtcagtcatattcagcacatcaataaactcaagaccacgttcgagcatatcgtcacggttgaatcagaactccccaccgcggcacgttttgaatgggtgcatcgtcatttgccggggctgatcacccttaatgcttaccgcacgctcaccgttctgcacgaccccgccactttacgctttggttgggctaataaacatatcattaagaatttgcatcgtgatgaagtcctggcacagctggaaaaaagcctgaaatcaccacgcagtgtcgcaccgtggacgcgcgaggagtggcaaagaaaactggagcgagagtatcaggatatcgctgccctaccacagaacgcgaagttaaaaatcaaacgtccggtgaaggtgcagccgattgcccgcgtctggtacaaaggagatcaaaaacaagtccaacacgcctgccctacaccgctgattgcactgattaatcgggataatggcgcgcgcgtgccggacgttggtgagttgttaaattacgatgccgacaatgtgcagcaccgttataaaccacaggcgcagccgcttcgtttgatcattccacggctgcacctgtatgttgcggattaacgcccggctttcatactgccgaccatctgttctggccgtacccagctatcaaactcggcttcgctaagataccccagcgcaagggccgcagcttttaaggtcagcccttctttatgcgcttttttggcgatctccgcggctttgtcataaccaatgtgggtgttaagcgcagtcaccagcatcagcgattcattgagtaattgattgattcgctcacgattcggttcaatacccactgcgcagtgtttgttaaaactttccatgccatctgccagcaagcgcaccgattgcaggaaattgtggatcaccattggacggaagacgttcagttcaaagttaccggaagcgccccccatgttgatcgccacgtcgttccccatcacctgacagcagagcatggttaatgcctcacactgtgttggattcactttccccggcatgattgagctgcccggctcattttccgggattgagatttcaccaattccgcagcgcgggccagaggccagccagcggacatcattggcgattttcatcagtgacgcagccaaccctttcaacgcgccgtgcgcctgaaccagggcatcacaggtcgcaagcgcttcaaatttgttcggcgcggtaacaaacggtgcacaggtaatgactgccagttcatctgctacgcgacgcgcatactccggatgggtatttagtccagtacccaccgctgtaccgccaagagccagttccgctacgtgaggcaggctgtattcgatatgtttgagattatgctcgagcatcgctacccagccggaaatctcctgccctagtgttagcggcgtggcgtcctgcaagtgggttcgaccgattttgacgatatcggcaaatgcacgcgatttttcactcagcgtctgtgtcagggttttaagctgcggaatgagttgcttgcgcagcgccagcagcgccgcaacgtgcatcgccgtcggaaagacatcgttggaactttggcttttgttcacgtcgtcgttagggtgaactttacgttccatcccgcgcacgccgccgagtaattcactggcccggttagccagcacttcgttcatgttcatgttactttgcgtgccggagccggtctgccagatagccagcgggaattcgtcgtcatgctgtcctgccagtacttcatccgccgcctgccgaatggcgctcgctttctcttcagacaacaagcctaaatcttcattaacttttgccgctgcgcgcttggttagcgccagcgcatgaatcagtgaggtgggcattttctccgtcgaaatgcggaaatgctccagcgagcgttgagtttgtgcgccccacagcttatctgccgggacatcaatcgcccccatcgaatctttttcgctgcgtactgtattcatggcctgctcctcacctgattaattttttctttctgttttgctttcgttaagcaacttttagctcactcattatttactatttgataacaaatgtttggtctttcgtgccatgtaaaaaaccgccccgaagggcggctctgtttatttcacacagcgggtgcattgtgtgagttgtatctgctggaagaagtcatttcctttatcatccacaaggataaacgccgggaaatcttccacttcaattttccagatggcttccattcccagttccggatattcaacacattccaggctcttaatacttccctgcgccaatacagcggccggaccaccgatactgccaaggtagaagccgccgtgttttttacaggcatccgtcacctgctggctgcggttgcctttcgccagcatgatcatacttccgccctgcgcttgcagttgatcgacataagaatccatccgtccggcggtcgttgggccaagagaaccggaggcataaccttccggcgttttggccggacccgcgtagtaaatcggatgatctttaatgtactgcggcagcccttcgccattatccatccgctctttcagcttggcgtgggcaatatcacgaccgacgataatcgtgccattcagcgacaagcgcgtagaaacgggatactgcgacaactgtgcgaggatctctttcatcggacggttaaggtcaacgcgcaccgcttcgccttctcccgctttacgcagctcttcagggatatatttacctggattatgttccagtttttcgatccagatcccctgacggttgatcttcgctttgatattacggtcagcagagcaggaaacacccataccaaccggacaggatgcgccgtgacgtggcaggcgaatcacgcggatgtcgtgagcgaagtatttaccaccaaactgcgcacccagaccgagattttgcgcttcgatcagcaattctttttccagttccacatcgcggaacgcctgaccgtgctcattcccttccgttggcagttcatcatagtatttcgcggaagccagtttcaccgttttaaggttcgtttctgcagaagttccaccaataacgaacgcaatatgatacggaggacaggccgccgtacccagcgtgcgcatcttctcaaccaggtaatttttcagtttccccggcgttagtaacgctttggtttcctgatagagatacgtcttgtttgccgaaccaccacctttggcgatacagaggaatttgtactcgtcgccatcaacggcataaagatcgatctgcgctggtagattggtgccagtattcacctctttatacatatccagcggcgcgttttgcgagtagcgcagattatcttcgatataagtgttatagacaccgcgcgccagcgccgcttcatcaccaccaccggtccatacacgctgcccttttttaccaacgatgatcgcggtgccggtgtcctggcaggttggcagaacgccttttgcggcgatatcggagtttcgcaggaattgcagtgccacatacttgtcgttttcgctggcttccgggtcacgcagaatgtcggctacctgttgttggtgagccggacgcagcataaacgacgcatcatgaaacgcctgacgcgccaacagagttaacgcttcgggtgcgactttcaaaatctcctgcccttcaaattcagatacactaacgtgttcgctggttagcaggtaatactcagtatcatcttttttgagtggaaaaggagcctgataatgaaagggtttgtttgacattgttctctcacttactgcctggtttggttatgctctgggcgggtgttccgttgccctgttaaaagcgagtaacaatatcctacacacttttttaacaaaaactgagactagtacgactttttgcggctccaggttacttcccgtaggattcttgctttaatagcgggattaatttccacattaaaacagggattgatcatgcaaaaactcattaactcagtgcaaaactatgcctggggcagcaaaacggcgttgactgaactttatggtatggaaaatccgtccagccagccgatggccgagctgtggatgggcgcacatccgaaaagcagttcacgagtgcagaatgccgccggagatatcgtttcactgcgtgatgtgattgagagtgataaatcgactctgctcggagaggccgttgccaaacgctttggcgaactgcctttcctgttcaaagtattatgcgcagcacagccactctccattcaggttcatccaaacaaacacaattctgaaatcggttttgccaaagaaaatgccgcaggtatcccgatggatgccgccgagcgtaactataaagatcctaaccacaagccggagctggtttttgcgctgacgcctttccttgcgatgaacgcgtttcgtgaattttccgagattgtctccctactccagccagtcgcaggtgcacatccggcgattgctcactttttacaacagcctgatgccgaacgtttaagcgaactgttcgccagcctgttgaatatgcagggtgaagaaaaatcccgcgcgctggcgattttaaaatcggcgctcgacagtcagcagggtgaaccgtggcaaacgattcgtttaatttctgaattttacccggaagacagcggcctgttctccccgctgttactgaatgtggtgaaattgaatcctggcgaagcgatgttcctgttcgctgaaacaccgcacgcttacctgcaaggcgtggcgctggaagtgatggcgaactccgataacgtgctgcgtgcgggtctgacgcctaagtacattgatattccggaactggttgccaatgtgaaattcgaagccaaaccggctaaccagttgttgacccagccggtgaaacaaggtgcagaactggacttcccgattccagtggatgattttgccttctcgctgcatgaccttagtgataaagaaaccaccattagccagcagagtgccgccattttgttctgcgtcgaaggcgatgcaacgttgtggaaaggttctcagcagttacagcttaaaccgggtgaatcagcgtttattgccgccaacgaatcaccggtgactgtcaaaggccacggccgtttagcgcgtgtttacaacaagctgtaagagcttactgaaaaaattaacatctcttgctaagcttattaaaggcttataacaccttcaggcggccagtccgcctgatttcattttatggataatcattatgaataaatcgctggtagcggtaggcgtcattgttgcgctaggcgtagtctggacaggcggcgcatggtatacaggcaagaagattgaaacccatctcgaagacatggtcgcgcaggcgaacgcgcaactcaaactgacagctcctgaatccaacctggaagtgagttatcaaaactatcatcgcggcgtattcagcagccagttgcaactgttggtgaaacccattgccgggaaagaaaatccgtggattaaaagcggtcagagcgtcatcttcaacgaatcggttgatcatggtcccttcccgcttgcccagcttaaaaaactgaacctgatcccgtcgatggcatcaattcaaaccacgctggttaataacgaagtaagcaaaccactgtttgatatggcaaaaggtgaaacgccttttgagattaactcgcgcattggttacagcggtgattccagttccgatatttcgctcaagccactgaattacgagcaaaaggatgaaaaagtcgcctttagcggcggcgagttccagttaaatgctgacagagacggcaaagccatctccctttccggggaggcgcaaagtggtcggatagacgcagttaacgaatacaaccagaaagtgcagttgacctttaataatctgaaaaccgacggttccagcacgctggcaagttttggtgagcgcgtaggaaaccaaaaactgtcactggaaaaaatgaccatttcagtggaaggcaaagaactggcactgctggaaggcatggagatcagcggtaaatcggatctggtcaatgacggtaaaacgatcaatagccaactggattactcgctaaacagcctgaaggtacagaatcaggatctgggcagcggcaagctgactttaaaagtcggccagattgatggtgaagcctggcatcagtttagccagcaatataacgcgcaaactcaggcgctgctggcacagccagaaattgccaacaatcccgaactttatcaggagaaagtgacggaagccttctttagcgccctgccgctgatgctgaaaggcgatccggtgattactatcgcgccgctaagctggaaaaacagtcagggtgaaagtgccctgaatctgtcgctgttcctgaaagatccggcaacgactaaagaagcgccgcaaacgctggcgcaggaagtagatcgttcggttaaatctctggatgcgaaactgaccattccggtggatatggcaactgagtttatgactcaggtagcgaagctggaaggttatcaggaagatcaagcgaaaaaactggcgaaacagcaagttgaaggtgcatcagcaatggggcagatgttccgtctgaccaccttgcaggacaataccatcaccaccagcctgcaatatactaacggtcagataacgttaaacgggcagaaaatgccactggaagatttcgttggtatgtttgcaatgccggcattaaatgttccggtcgtacccgctattccgcagcagtaattcacagccaaaacgccggagatttttctctccggcgttatttcttacttcagcataaagtcatactgaatactcattttcacatcccagtaattcaggcgatcgcccagcgtactgccatcgcgcttttcccgccctttatcggcagcaagaaagaaattcatcccttgtaacggcccttcgctgacccgatagttcataccacctaagatacccatgccttcaatccgcacatctcgtttactggattcatagccgcgagtcacaatcggtgcaaatgtcagtgtaaattgcggcgttaaacgatagttgacgcccaattgccaggactgcattccttcacggttacgatcaagacttaatgaaaagggatagccaatgtcggtatccaccacggcaccattcattgcatggcgcaaataaccaccactgccaaatacgcttccccacggcgcattccaggtcaattgtccactaaccaacgccgtttcattgggctggctggtattacgacttaaaccttcgagctgcgcgtaaaagccgagcaactcccctttcaacgtataattcgggtcgagcggtatgcttttctcgagaatactttgtatctgattggaaacatctttctgtaccgatgcccccagagaatagcgactggtatcatcatgccaactggcggctaaaaaagaacgtgcgcgatgtttatcgtattttcccgtctggctgttatacaccccttcatcacgaataccggttgttgaatcagtccataaaaatactcgtgaacgccacattccccacagatcaatatttggtgttaaagcccaataacctaatgctccttcagaaactgtcggtaatgtacgttgcgaactgccagccattaacggaatacgataaggtaagctaccataactataatccgtcccgaagcgacctaatttaagcaggctattttcactgggttttatttttactgcccccagggcaaagccaaaacttttatcaccatcaagataccaccgggtactcatatcagcacgagcacctaatttataaacataatatgccccgccttcaacgccaataatattggaataataaccactattgaaatcgagcaatcctccctgtacccatgcgtaaatatctcttcccgcgccagcactgggcttatccgccctgcgcaattcgtttttcagtctgatgcgtagtcccgcttcatcgtcagccagttgcgccgcataagcagaggtaaggccagaggcagccgtcaggcaaataacggccatggccactatttttctcatagttgcacctttgatgttctgattatttttattgaatattaattagtgatatcgctgattaattgctgctgcacttttttacgattatcaatttcaaccacgatttctttgaattttttatccgtgagcggataaaaccagataataacgaatgccagtagcataaatccgcaaggtactaaggcaattgatgtgcggatgcccataataacttccggcgtttgcacctgattggcgatatatccgcttaatcccaaaataaaggcaggaattgaacctccgattgcctgaccgcatttacgggtaaatgagaatagtgaataggtgagcccttcaattcgcacgccggtcaggtattcaccgtattctacggtatcagcttccagtgcccacatcacagtcatagtaacgccctgaccaattgaagcgatggccaacgcaaccaacgccaccggcagtgaccagacggaaacccagaagaatagcagataaccgcaggttcccagcaaagcgccaatcaggaaggtattctttttaccgatcctcgcgaccatccccggcaccagcggtgccgatgccacagtaccaaccaggttttgcaccagtaccagcacagtgaacagcccggtatcatttaacacatagcgcacgtagaacaacgacgaggcgctgaccgcgaaggtcgaaatcagcacacacagcgcaccgatgcacaacataaacagcgggcgattccgtttcagggtttgcagactgatcttcaatgacggctgcgccacgatacgtaccacattctcacgcgtcgatttgaagcagatgaagtaaagcaccattccggcaatcgccagcacaatcgtccagaaatggtataccgacaccatctcttccgggctggagttcttaatgctcggtcctatcagaaatgccaggcagacaaaggttaatgaagcggcaatcccgcgagccgcgcccagacgggcgcgggattgtggttgttgggtcatcgcggtagcaagtgaaccataaggaatattcaccaggctgtagcaaagcccgaggcccatgtaggtcaaatatgcatacactactttgctgctatggctccagtcggtcggtacccagaataccagcacgctgaagatcattaacggcgcagtaccgaagagtaaaaacgggcggaattttccccagcgggtattcacactgtccaccactcgtccggcaaagacgtcggcgaaggcatcgaatacccgcaccagtaacagcatggtgcccgccgcagcggcaccgacgccagcgacgtcggtgtagtaactcaataggaagagcgcccccattgcgaaggcgaagttattggcgacgtcaccgaggctgtagccgacgatggtgcgccaggagagttgttgattcattgtttgcctccctgctgcggtttttcaccgaagttcatgccagtccagcgtttttgcagcagaaaagccgccgacttcggtttgcggtcgcgagtgaagatccctttcttgttaccgccaacgcgcaatatgccttgcgaggtcgcaaaatcggcgaaattccatacctgttcaccgacgacggcgctgacgcgatcaaagacgcggtgatacatatccagccatgcacactgatactcttcactccacatgtcggtgtacattgagtgcagcccggctaacgtatccacgccgtattcggtgatgataatcggctgatgcagtttctcctgccaggccagaagttctttttccagtaccttctctgccgtttccaaatcgccgctttggacataccatccgtaataacggttcaggcacagcacatcaaagagatcgctgatggtatcggtgtgagcgtcgcagaacattacattgacgcaggtgatcggacgcgtcgggtcgagtttacgcgttgcttccgccagtggcgcgaaatattcccgtgcaccttgcggacgggtatccggttcgttggcaatactccacatcaccacgcttgggtggtttttgtcacgcgctatcagctctttaatcgcctgtaagtgcgcttgctgagtttccccgttgactgcctcttcgctgtacagttctttcggcttgttgcccgcttcgaaaccaatgcctaaagagaggttaaagccgacagcagcagtttcatcaatcaccacgatgccatgttcatctgcccagtcgagcatctcttcagcgtaagggtaatgcgaggtacggtaggagttggccccaatccagtccattaatgcgtggtcgtgcaccatcagcacgttatcgaatcctttgccacgcaagtccgcatcttcatgacgaccaaagccagtaaagtagaacggtttgtggttaatcaggaactgttcgcccttcactgccactgaccggatgccgacgcgaagcgggtagatatcacactctgtctggcttttggctgtgacgcacagttcatagagataaccttcacccggttgccagaggtgcggattcaccacttgcaaagtcccgctagtgccttgtccagttgcaaccacctgttgatccgcatcacgcagttcaacgctgacatcaccattggccaccacctgccagtcaacagacgcgtggttacagtcttgcgcgacatgcgtcaccacggtgatatcgtccacccaggtgttcggcgtggtgtagagcattacgctgcgatggatcccggcatagttaaagaaatcatggaagtaagactgctttttcttgccgttttcgtcggtaatcaccattcccggcgggatagtctgccagttcagttcgttgttcacacaaacggtgatacgtacacttttcccggcaataacatacggcgtgacatcggcttcaaatggcgtatagccgccctgatgctccatcacttcctgattattgacccacactttgccgtaatgagtgaccgcatcgaaacgcagcacgatacgctggcctgcccaacctttcggtataaagacttcgcgctgataccagacgttgcccgcataattacgaatatctgcatcggcgaactgatcgttaaaactgcctggcacagcaattgcccggctttcttgtaacgcgctttcccaccaacgctgatcaattccacagttttcgcgatccagactgaatgcccacaggccgtcgagttttttgatttcacgggttggggtttctacaggacgtaacataagggactcctcattaagataaaaatactggtcaacctttaatctgattagttaaccaattctgtgttgcacacagttatctgtgagaaacccatggaagagaaatggaaataaaaagaactgacaccgcgatcaaaaaaccaaaaactgcaatacccacagcgtgatattgatcgcattaatctttaaaacggcgttgacagaagccataaaataagcaaccgaacgttcgttcgagtatattgggaacgataaactctcatgacatatggctacggtgaatatttttgggggggaattctccgatcccggctagattgtattttgtacagggaaattaaagtatgaaacgcgggcacagttatcaccagcccgcgaaatgagaggatcaggatgcggttaagataccgccaatcatcgcgcgtaatccctgagcaaacgacgcttcacgcgccagatcttccgcttcgatatcggccagtacaccgtaggtcagatccagcagtaaacgtgaagtcattgacgtgttgatgtctgggcttatctcgcctttttgctgggcatcacgcatccgctgggcaacaaattcagtgatcgtcatatgcttatttttaagcatggcggcgacctgtgggttacgcatcccttccgccataatttcgaccaccagcgcccgttgcccaaaggcttcatgggtgagagagacaatagactcgaccatatagtcaacaaaatgaatcccttcaatcggttcccggaaacgggccagcgccctctcctggtcctgtaagataatcgcctgaatcaaggcttctttggagatgaaatggtgatagagcgtcccgggactaatggcgcaggatttacagatggctttcatcgaggcactgtgaaatccattttctgaaaaaatctctctggcagcattgaggatccgggtccgtgtcggttgtgcttcagtctgcatgttatccatcattaaaccattatagttagcgtgaataactagtttaccgcgttgtcaggtgagcgcctatcattgctgttgaatagtgcgaaggcacactctattcgtatgcttttcatccagctattggttaaccaatagccgtgatttggctgccagttgtttagcagagacgttgatgaattgcacacgctatcccggtaaacaacacatacggctgtttaccggttcgttagtgtattaattgagctcctgtaccccaccaccggagacggtgagaatttgtccgcttacccagctggctgcaggcgagcaaaggaacagcgccgcgttagcaatatcttgcggttggcccagacgtctgatcggcgtgtgctgtaacattttttgttcaatttctggtgtaataacggatttcagggcatcggttaatattgcccccggcgcaatgccattcacccgaatatttttttcacccaggtcaaatgccatatttctgaccagatgactggccgcagctttagatgatgcataggaagtcatgtttatatttttattttctgccgccatagaagtgatggtcagaataacgccaccgccatttttttccatttctggcgcaacaagttgtgacagatggaaaaaagaaaacacattcagttcataagcacggcgaaaatctgccattggcatatcaaacggtttaggaccaccgccaccggcgttgttaaccaggatatcaactttacccagcttactgacggcaaagtctgccagtgcagagagttcctgttcggaagtaatatcacaacggcaggcaaatgcctgaccacccagttgttgaatttcgtctacaacatggttagctgcgtcggcgttaatatcactgaccaccacagatgcgccagctgtcgcgaatgtaatggcgatttctttaccaatacctgcacccgcacctgtgatgatggcgcattttccgtcgagtctcaggttgtcagaattaaacacataaacctcctgtgaacttcagtaaaaataaaaggcaccgcctgtgtgccacattttttatcattaaccttgaggaaaggacactaccaggtatagcagataaagagaggattatttcgccgcaatgagccgggcgggaataataagattgcgtgaatgcgtctcttcatgggtgattttttgcatcatgcgatccgcaagtgtggtaccaagttcccgcgcaggcgtgctggcccaggtaacgggtatatcatcaagtgtggttggtgtcgcatcggtaaatgccgccagcgaaacttgttgctcaaagtaacgatcgactccgctttccccgctttgccgccctgctttgagcaaaccaaaccatgcccccatcgcaatagtttcgttatagcaaaccacagcactgatggtcgggttatgacgtaaaagcgccgtgatagcttccgcggcttgcttctggctggatgtgcactccagcacccaatcgctgtgaaacggcaggccaaattttagtagagttgcacaatagccccccacccgttctgcacgggttaatgaggaactttgccctcccagccaggcgatccgctgatgcccattgcgaatgagatgctccgtcaacaactgtgcagcctgcatgttgtccgggcgaaccgtatcaacatcatcaagataactggcacgggaagcgaatatcaccgggatagctttttcttctgccatccgtcgcaggtcatcgctgcttcctgcagccccggcaattaccacaccatccacaccctgattcagtaacagtgaaaaccgctgtgccagctgctcgccgtctttaccgccgtgaagcaaaaaaaccatccgtccctgcgcttccagagcttccgtcaatccggccgtcaattcggcgtaaaacggcgcagataaatcacggacgatcaaaccaatgacgccgctttgcccgccgcgcagcgccgacgcctggcgattgcgcacaaatcccagctcttcaatggcggcgttaacgcgttctcctgtggcggtagagattcgccctttgccactaagcaccagcgaaacggtacttaccgacacgcccgcagccagcgcaacatcatgaatggttatttttttggcggtagccatgcagatgacctactccctgattatgtgacagataaaacgttttaccttttatttatcttatacccgctattatcgttgcgtaatgtgatttatgcctcactaaaatttgataaaacgttttatcttctcgcgcaatttactgaatccagattgttctctacgaggagtcgttttatgacggcgaaaacagcaccgaaagtcacgctgtgggagttcttccagcagttaggcaaaaccttcatgttacccgtggcattattgtcgttctgcggcattatgctcggcattggtagttctcttagcagccatgatgtcataaccctgatcccggtcctgggcaaccccgtgttgcaggctatctttacctggatgagtaagattggctcgtttgcttttagtttcctgcctgtcatgttctgtatcgccatcccgctgggcctggcacgcgaaaataaaggcgtagcggcattcgctggcttcgtcggttatgcggtaatgaacctcgcggtaaacttctggttgaccaataaaggcattctgccaaccacggatgccgcggttctgaaagccaataacatccagagcattcttgggatccagtcgatcgataccgggatcctcggtgcggtgatcgccggtattatcgtctggatgctgcatgagcgtttccataatatccgcctgccggatgcgctggcattcttcggcggtacgcgcttcgtaccaattatctcctcgctggtgatgggccttgtcggcctggtgattccattagtctggccgattttcgccatgggtattagcggcttgggccatatgataaacagcgcgggtgatttcggaccgatgctgtttggtaccggtgaacgtctgctgttgccgtttggtctgcatcacattctggtagcattaattcgctttaccgacgcaggcggcacgcaggaagtctgcggtcaaaccgtcagcggcgcactgaccatcttccaggcgcaattgagttgcccgaccactcacggtttttctgaaagcgccacgcgtttcctttcgcaaggtaaaatgcctgcgtttctcggcggtctgccgggtgcagcgttagctatgtatcactgcgcgcgcccggaaaatcgccataaaattaaaggtctgctgatttctggcctgatcgcctgcgtcgttggcggcactaccgaaccgctggaattcctgttcctgttcgtagcgccagttctgtatgtcatccacgcgctgttaaccggcctcggcttcaccgtcatgtctgtgctcggcgtcaccatcggtaataccgacggcaatatcatcgacttcgtggtgttcggtattttgcatggtctgtcaaccaagtggtacatggtgccagtggtggcggcaatctggtttgtcgtttactacgtcatcttccgtttcgctatcacccgcttcaatctgaaaaccccggggcgcgatagcgaagttgccagctcaatcgaaaaagccgttgccggtgcgccgggtaaatcaggttacaacgttcctgcaatcctcgaagcattaggcggtgccgacaatattgtcagcctcgataactgcattacccgtctgcgtttgtctgtgaaagatatgtcgcttgttaatgtgcaggcactgaaggacaatcgggcaattggcgtagtacaacttaatcaacataacctgcaggttgttatcgggccacaagttcagtcagtaaaagatgaaatggccggtctgatgcatactgtccaggcataaggataagatatgttcgatttttcaaaggtcgtggatcgtcatggcacatggtgtacacagtgggattatgtcgctgaccgtttcggcactgctgacctgttaccgttcacgatttcagacatggattttgccactgccccctgcattatcgaggcgctgaatcagcgcctgatgcacggcgtatttggctacagccgctggaaaaacgatgagtttctcgcggctattgcccactggttttccacccagcattacaccgcaattgatacgcagacggtggtgtatggcccttctgtcatctatatggtttcagaactgattcgtcagtggtctgaaacaggtgaaggcgtggtgatccacacgcccgcctatgacgcattttacaaggccattgaaggtaaccagcgcacagtaatgcccgttgctttagagaagcaggctgacgactggttttgcgatatgggcaagctggaagccgtgttggcgaaaccagaatgtaaaattatgctcctgtgtagcccacagaatcctaccgggaaagtgtggacgtgcgatgagctggagatcatggctgacctgtgcgagcgtcatggtgtgcgggttatttccgatgaaatccatatggatatggtctggggcgagcagccgcatattccctggagtaatgtggcgcggggagactgggcgttgctgacgtcgggctcgaaaagtttcaatattcccgcgctgaccggtgcttacgggattatagaaaatagcagcagccgtgatgcctatttatcggcactgaaaggacgtgatgggctttcttccccttcggtactggcgttaactgcccatatcgccgcctatcagcaaggtgcaccgtggctggatgccttacgcgtctatctgaaagataacctgacgtatatctcagataaaatgaacgccgcgtttcctgaactcaactggcagatcccgcaatccacttatctggcctggcttgatctacgtccgttgaatattgacgacaacgcgttgcaaaaagcgcttatcgagcaagaaaaagtcgcgatcatgccggggtatacctatggtgaagaaggtcgtggttttgtccgtctcaatgccggctgcccacgttcgaaactggaaaaaggtgtggctggattaataaacgccatccgcgctgttcgctaaccccaattgcgcaacgtaaaaaatcgttgcgcaatcgtggatttttaccctgctttgtttttataatggtgcgcacttttatattcagaaaaagagtgcgaccatgattgataccaccctgccattaactgatatccatcgccaccttgatggcaacattcgtccccagaccattcttgaacttggccgccagtataatatctcgcttcctgcacaatccctggaaacactgattccccacgttcaggtcattgccaacgaacccgatctggtgagctttctgaccaaacttgactggggcgttaaagttctcgcctctcttgatgcctgtcgccgcgtggcatttgaaaacattgaagatgcagcccgtcacggcctgcactatgtcgagctgcgtttttcaccaggctacatggcaatggcacatcagctgcctgtagcgggtgttgtcgaagcggtgatcgatggcgtacgtgaaggttgccgcacctttggtgtgcaggcgaagcttatcggcattatgagccggaccttcggcgaagccgcctgtcagcaagagctggaggcctttttagcccaccgtgaccagattaccgcacttgatttagccggtgatgaacttggtttcccgggaagtctgttcctttctcacttcaaccgcgcgcgtgatgcgggctggcatattaccgtccatgcaggcgaagctgccgggccggaaagcatctggcaggcgattcgtgaactgggtgcggagcgtattggacatggcgtaaaagccattgaagatcgggcgctgatggattttctcgccgagcaacaaattggtattgaatcctgtctgacctccaatattcagaccagcaccgtagcagagctggctgcacatccgctgaaaacgttccttgagcatggcattcgtgccagcattaacactgacgatcccggcgtacagggagtggatatcattcacgaatataccgttgccgcgccagctgctgggttatcccgcgagcaaatccgccaggcacagattaatggtctggaaatggctttcctcagcgctgaggaaaaacgcgcactgcgagaaaaagtcgccgcgaagtaacaaaatggatggtgcaaattgcaccatccatttttcatgcaaggcacaaagtcgcgcgatgtttggcggattcgatgcccagctcaatcaactccattacctggattgcctggcttgccggaaccggattttcaccatcgccatttaacgcatcacgaatagccgcatagtaagccggataattcccaggcaccgtcaacagcgtttcttcgacacgttcctcaccttccacgcgggtaagtacgccatcacgcatatcgtagccccagtcttcctgcggtagacgctcgccatttttcagacgttcttcctgtggatcgaggccatatttcacataactgcctcgggatccatgcacgatataccgtgctgactcagcggctgccagcatggtaccgtgtaaaatgactcgccgctgtggataggacaagatggcgtggaaataatcggtcgactgcgctccgggccgtaactgtgccaaatctaccgtcatgctgaccggtaaaccaaaaagcgtaatggcctgatcaagaagatgtggtgctaaatcgtaccagataccgctgcctgggccgccctgttcacgccaacgatcgcgcacctgcggacggaagcggtcaaaatgagactcaaagtaagcaacttcacccagcacgccttccgcgagtaaaccttttagcgtcaagaaatcgctatcccagcgacggttatggaatacagacagcacacgccccaggctttttgccagcgcatccagctctcgcgcttgtgacagtgtcacggtaaagggtttatcaacgaccacatgtttacccgcctcaagcgccgctttggctaacgggaaatgggtatcgttgggtgtaggaatgacaatcaggtctatgttgggatcgttaaacagatgcttcggctcagagacaaccgtaaccgttggccagtcggcttttacttttgtttcatcactgctggagattaccgccagttccagcccgggcgtgcccgcaatcaggggcgcatggaaggttttgctcgcataaccatacccaatcaacccaacacggatgttgtcgctcatgtcattgcctctcattgaagtatgatggctatttgacactatcctttacccacgctcaacagtttaataacctgccagcaataagggatgttgtttaacttaagtcaaaaaaatagcgaattttccaacgacaaaagctaaatatcgcaaaaacctcagtaaaaatcttgctggagctattattgctaagtaacatttaccccctgaagttaatggatcaatcaagagagatgtgggctgtaatgaatcgtcttattgaattaacaggttggatcgttcttgtcgtttcagtcattcttcttggcgtggcgagtcacattgacaactatcagccacctgaacagagtgcttcggtacaacacaagtaagctctgcacttgtggagcgacatgctgcccgtccgggtgcatgttttcacttgtcggatattaaaccaggaatttattatcttgttcgatgttgttggtgattgtcagggatagtaaagcgcgttactcttttcagagcagtttttcatccctgaatatttgccatcagcgcattcttattattgtaataacacaagcgttcacttttggtgaaattttatcatcactaataatacctacccctttggtattaattattttatggaccttttatgactgttcaggactacttattaaaatttcgcaaaatcagttcactcgaaagtctggaaaaactctacgaccatcttaattacaccctgacggacgatcaggaactgatcaatatgtatcgtgctgccgatcaccgtcgcgcagagctggtttctggcgggcgtttgtttgacctcggccaggtaccgaagtccgtctggcactatgtccaataaagaaagtagcgatcggttataaaagccttataataacgcccctaaaattagatttgcctgtttgcgtcgctattctggagaacctatgaccaccacaacgccacaacgtattggaggctggttgcttggcccgttggcctggcttttagtcgctctgttgagtacgacgctggcgttgttgctgtataccgctgcgttatcttctccgcaaacatttcaaacgctcggcggacaagcactgacgacacaaatcttatggggcgtttcttttattaccgctatcgccatgtggtattacacactgtggttgaccatcgctttctttaaacgtcggcgttgtgttcctaaacactatattatctggctgcttatttccgtattgctggcagtaaaagcattcgctttttcacccgtggaagatggcatagccgttcgccagttgctgtttactttgttggcaaccgcattgatcgtcccctatttcaaacgctcgtcgcgggtaaaagcgacgtttgtgaatccgtaataaccttacagttaacctgttgtcgcctgctctggattaacggataataggcggcttttttatttcaggccgaaaaatgactgactacctgttactgtttgtcggaactgtactggtcaataactttgtactggtcaagtttctcggtctctgtccgtttatgggggtttccaaaaaactggaaaccgcgatgggcatggggctggcaacaacgtttgtgatgacgctggcgtctatttgcgcctggcttatcgatacgtggattttgatcccacttaatctgatttacctgcgcaccctggcatttattctggtgattgctgtggtcgtgcagttcaccgagatggtggtgcgcaaaaccagcccggtgctttaccgtctgctggggatttttttgccgcttatcaccaccaactgtgcagtgctcggcgtggcgttgctgaatatcaatctcgggcacaatttcttgcagtcggcgctgtacggtttttccgccgctgtcggtttctcgctggtgatggtgctcttcgccgccatccgcgaacgccttgctgtggctgatgtcccggcaccttttcgcggtaatgccattgcgttaattaccgcaggtcttatgtctctggcctttatgggctttagtggtttggtgaagttgtaatgaatgctatctggattgccgttgccgccgtgagcctgctgggcctggcgtttggcgccattctgggttatgcctcccgccgttttgcggtggaagacgatccggtcgttgagaaaattgacgaaatcttaccgcagagccagtgtggtcagtgcggttatcccggctgtcgcccctacgcggaagccatcagctgtaacggtgaaaaaatcaaccgttgcgccccaggtggcgaagctgtgatgctaaaaattgccgagttgcttaatgtcgagccgcagccgctggatggcgaagcgcaagagctaacgcctgcgcggatggtggcggttattgatgaaaataactgtattggctgcactaaatgtattcaggcttgtccggtagacgccatcgttggcgctacccgtgccatgcatacggtaatgagtgatctctgtacgggctgcaatttatgtgttgatccgtgcccgacgcactgcatctcgttgcaaccggtcgcagaaacacctgactcctggaaatgggatctgaacaccattcccgtgcgtatcattcccgtggaacaccatgcttaagttattctctgcattcagaaaaaataaaatctgggatttcaacggcggcatccatccaccggagatgaaaacccagtccaacggtacacccctgcgccaggtaccactggcgcagcgttttgttattccactgaaacagcatattggcgctgaaggtgagttgtgcgttagcgtcggcgataaagtattgcgcggccagccgcttacccgtggtcgcggcaaaatgctgcctgttcacgcgcccacctcgggtaccgttacggctattgcgccccactctacggctcatccttcagctttagctgaattaagcgtgattattgatgccgatggtgaagactgctggatcccgcgcgacggctgggccgattatcgcactcgcagtcgcgaagagttaatcgagcgcatacatcagtttggtgtagccgggctaggcggtgcaggattcccgacaggcgttaaattgcagggtggcggagataagattgaaacgttgattatcaacgcggctgagtgcgagccgtacattaccgccgatgaccgtttgatgcaggattgcgcggctcaggtcgtagagggtattcgcattcttgcgcatattctgcagccacgcgaaattcttatcggcattgaagataacaaaccgcaggcgatttccatgctgcgcgcggtgctggcggactctaacgatatttctctgcgggtgattccaaccaaatatccttctggcggtgctaaacaattaacctacattctgaccgggaagcaggttccacatggcgggcgttcatccgatatcggcgtattaatgcaaaacgtcggcactgcttatgcagtgaaacgtgccgttattgatggcgagccgattaccgagcgtgttgtaaccctgactggcgaagcaatcgctcgcccgggcaacgtctgggcacggctggggacgccagtgcgtcatttattgaatgatgccggattctgcccctctgccgatcaaatggtgattatgggtggcccgctaatgggctttaccttgccatggctggatgtcccggtcgtaaagattaccaactgtctgttggctccctctaccaatgaacttggcgaaccacaggaagaacaaagctgcatccggtgtagcgcctgtgctgacgcctgccctgcggatcttttgccgcaacagttgtactggttcagcaaaggtcagcaacacgataaagctaccacgcataacattgctgattgcattgaatgtggggcttgcgcgtgggtttgcccgagcaatattcccctggtgcaatatttccgtcaggaaaaagctgaaattgcggctattcgtcaggaagaaaagcgcgccgcagaagccaaagcgcgtttcgaagcgcgccaggctcgtctggagcgcgaaaaagcggctcgccttgaacgacataagagcgcagccgttcaacctgcagccaaagataaagatgcgattgctgccgctctggcgcgggtgaaagagaaacaggcccaggctacacagcctattgtgattaaagcgggcgaacgcccggataacagtgcaattattgcagcacgggaagcccgtaaagcgcaagccagagcgaaacaggcagaactgcagcaaactaacgacgcagcaaccgttgctgatccacgtaaaactgccgttgaagcagctatcgcccgcgccaaagcgcgcaagctggaacagcaacaggctaatgcggaaccagaagaacaggtcgatccgcgcaaagccgccgtcgaagccgctattgcccgtgccaaagcgcgcaagctggaacagcaacaggctaatgcggaaccagaagaacaggtcgatccgcgcaaagccgccgtcgaagccgctattgcccgtgccaaagcgcgcaagctggaacagcaacagtctaatgcggaaccagaagaacaggttgatccgcgcaaagccgccgtcgaagccgctattgcccgagccaaagcgcgcaaactggaacagcaacaggctaatgcggaaccagaagaacaggttgatccgcgcaaagccgccgtcgaagccgctattgcccgtgccaaagcgcgcaagctggaacagcaacagactaacgcagaaccagaagaacaggttgatccgcgcaaagcggcagttgccgcggctattgcccgcgctcaggccaaaaaagccgcccagcagaaggttgtaaacgaggactaaatggtattcagaatagctagctccccttatacccataaccagcgccagacatcgcgcattatgctgttggtgttgctcgcagccgtgccaggaatcgcagcgcaactgtggttttttggttggggtactctcgttcagatcctgttggcatcggttagtgctctgttagccgaagctctcgtactcaaactacgcaagcagtcggtagccgcaacgttgaaagataactcagcattgctgacaggcttattgctggcggtaagtattccccccctcgcgccatggtggatggtcgtgctgggtacggtgtttgcggtgatcatcgctaaacagttgtatggcggtctggggcaaaacccgtttaatccggcaatgattggttatgtggtcttactgatctccttcccggtgcagatgaccagctggttaccgccacatgaaattgcggtcaacatccctggttttatcgacgccatacaggttattttcagcgggcataccgccagtggtggtgatatgaacacactacgcttaggtattgatggcattagtcaggctacaccgctggatacatttaaaacctctgtccgtgccggtcattcggttgaacagattatgcaatatccgatctatagcggtattctggcgggcgctggttggcaatgggtaaatctcgcctggctggctggcggcgtgtggttgctatggcagaaagcgattcgctggcatattcccctcagcttcttagtaacgctgacgttatgcgcaacgttgggctggttgttctcaccagaaacactggcagcaccgcaaattcatctgctgtctggagcgaccatgctcggcgcattctttattttgactgacccggttaccgcttctacgaccaatcgtggtcgtcttattttcggcgcgctggcgggcttattagtctggttgatccgcagtttcggcggctatcctgacggcgtggcttttgccgtcctgctggcgaacatcacggttcctctgatcgattactacacgcgtccgcgcgtctacggccatcgcaaagggtaaaccatgctgaaaactatccgaaaacacggcattacgttagcgctatttgcagcgggttcaacagggttaactgcggccatcaaccagatgaccaaaacgacgattgctgaacaggccagtctgcaacaaaaggcattatttgatcaggtgctgccagccgaacgctataacaatgcgctggcacagagttgctatctggtaactgcgccagagttaggtaaaggtgagcatcgggtttacatcgccaaacaggatgacaaaccggtagccgccgttctggaagcaaccgcgccagatggctattccggtgcgattcagctgctggtgggagccgattttaacggcacggtacttggcacgcgcgtgacagagcaccacgaaacgccagggcttggcgataaaatcgaactgcgcctttctgactggatcacccattttgcgggtaaaaaaatcagtggtgcagatgatgcgcactgggcggtgaagaaagatggtggtgatttcgaccagttcaccggcgcgacgattactccccgcgcggtggttaatgcggtaaaacgcgccggattgtacgctcagacgttaccggcacaactttctcaacttcctgcctgtggagaataaagcgtgagcgaaattaaagacgttattgttcaggggttgtggaaaaacaactctgcgctggtccagttgctcggcctttgtcctctgttggcggtcacgtccactgccactaacgctctgggtttaggacttgcgactacgctggtactgacgctgaccaacctgaccatttcgacgctgcgtcactggacgccagccgagatccgcattcccatttacgtgatgatcatcgcctcggtggtcagcgctgtacagatgctgatcaacgcctacgcctttggcctgtatcaatcattagggatttttattccgctgattgtcactaactgtatcgttgtgggccgcgctgaagccttcgccgccaaaaaaggtccggcgctttcggcactggacggcttttcaattggtatgggcgcaacctgcgccatgttcgtgctgggttcactacgcgaaattatcggcaatggcacattgtttgacggtgcagatgcgctgttaggtagctgggcaaaagtattacgcgtggaaattttccacaccgactcccctttcctgctggcgatgctgcctccaggtgcatttattggcctgggactgatgctggcaggaaaatacctgattgatgaaagaatgaaaaagcgccgtactgaagcagctgccgaacgtgcattgccaaacggtgaaacagggaatgtctgatgaacaaagcaaaacgcctggagatcctcactcgcctgcgtgagaacaatcctcatcccaccaccgagcttaatttcagttcgccttttgaattgctgattgccgtactgctttccgctcaggcgaccgatgtcagtgttaataaggcgacggcgaaactctacccggtggcgaatacgcctgcagcgatgcttgaactgggcgttgaaggggtgaaaacctatatcaaaacgattgggctttataacagcaaagcagaaaatatcatcaaaacctgccgtatcttgctggagcagcataatggcgaggttccggaagatcgtgctgcgcttgaagccctgcccggcgtaggtcgtaaaacagccaacgtcgtattaaacactgcattcggctggccgactattgctgtcgacacgcacattttccgcgtttgtaatcgtactcaatttgcgccggggaaaaacgtcgaacaggtagaagaaaagctactgaaagtggttccggcagagtttaaagtcgactgccaccattggttgatcctgcacgggcgttatacctgcattgcccgcaagccccgctgtggctcttgtattattgaagatctttgtgaatacaaagagaaagttgacatctgaagaaaaggggtaacaccgattaccccattgataacctttctttatcctcttttaaaacttctttttaacgtgaatgatgccattgcttagcgttatcatcaggtaatccgtttgcggataaccaaaaatgcaggttaattgtttttttaatagcgaaattttctattcattcgtgatcaagatcacgatgctgtcgcaatgtaaaaacattgcaagaatcaggttaaaatcatttaaatttacacacgcaacaaatattgacctacaaaacattacactggctatttttcagaaactggactatctcactagtaaaaacgctaaatagcagaacatatcgccgttaagccatcacccccctctcagtgcagtgaaaaaatctgccgttacgttttttgaaaaatttaacgctggataacatttcccggaatggttgaattccccgcctcagttatatgtaacagattattacaaaggacttgtctgaaagtgcaagatagtgaacattacctgccgtttcccctcccactataacaattgcgcgtatgttttttagacataacgcgagaaagcacccccgttaatatgggatgtaaaaaaagaggtaaaagtgtccactgcaaaccaaaaaccaactgaaagcgtcagtttgaacgctttcaaacaaccgaaggcgttctatctcatcttctcgattgagttatgggaacgttttggttattacggcctacaaggaattatggctgtttacctggttaaacaactgggtatgtctgaagcggattcaatcacccttttctcttcctttagtgccctggtttatggtctggtcgctatcggcggctggttaggtgacaaggtactgggtactaaacgcgtaattatgctcggcgctattgtgctggcgattggttatgctctggttgcctggtctggtcacgacgccggtatcgtttatatgggtatggcggctattgcggtcggtaacggcctgtttaaagctaacccgtcttctctgctttctacatgctatgagaaaaacgacccgcgtctggacggtgcattcaccatgtactacatgtccgtcaacatcggctctttcttctctatgattgctacgccgtggctggccgcgaaatacggctggagtgttgcgtttgcgttgagcgttgtaggcctgctgatcactatcgttaacttcgccttctgccaacgctgggttaaacagtacggttcaaaaccagacttcgagcctatcaactaccgtaacctgctgctgaccattattggtgttgtggcactgatcgctatcgccacctggctgctgcacaatcaggaagttgcgcgtatggcgctgggcgttgttgccttcggtatcgtggttatcttcggtaaagaagccttcgcgatgaaaggtgctgcgcgtcgtaaaatgatcgtcgccttcatcctgatgctcgaagccattatcttcttcgtgctgtacagccagatgccaacgtcactgaacttctttgcgattcgtaacgttgagcactccattctgggtctggccgtagaacctgagcagtatcaggcactgaacccgttctggatcatcatcggtagtccgattctggccgctatctataacaagatgggcgataccctgccgatgccaaccaagtttgcaatcggcatggtgatgtgttctggtgcgttcctgattctgccgctgggtgcgaaattcgcgtctgacgctggtatcgtgtctgtaagctggctggtcgcaagctatggcctgcagagcatcggggaactgatgatctctggtctgggtctggcaatggttgcacaactcgttccgcagcgtctgatgggcttcattatgggtagctggttcctgaccactgccggtgcaaacctgattggtggttatgttgcgggtatgatggctgtgccggataacgttaccgacccgctgatgtcactggaagtttatggtcgcgtattcttgcagattggtgtcgctactgccattattgcagtactgatgctgctgaccgcgcctaaactgcaccgtatgacgcaggatgacgctgcagacaaagcggcgaaagctgctgtagcgtaaaattcagggaaactcttttacaagccgctaacttttcgttagcggctttttttttgttcagcaacgcactaccatactttaaaccacagacaaaaggagttaccgatgaaattgttctacaaaccgggtgcctgctctctcgcttcccatatcaccctgcgtgagagcggaaaggattttaccctcgtcagtgtggatttaatgaaaaaacgtctcgaaaacggtgacgattactttgccgttaaccctaaggggcaggtgcctgcattgctgctggatgacggtactttgctgacggaaggcgtagcgattatgcagtatcttgccgacagcgtccccgaccgccagttgctggcaccggtaaacagtatttcccgctataaaaccatcgaatggctgaattacatcgccaccgagctgcataaaggtttcacacctctatttcgccctgatacaccggaagagtacaaaccgacagttcgcgcgcagctggagaagaagctgcaatatgtgaacgaggcactgaaggatgagcactggatctgcgggcaaagatttacaattgctgatgcctatctgtttacggttctgcgctgggcatacgcggtgaaactgaatctggaagggttagagcacattgcagcatttatgcaacgtatggctgaacgtccggaagtacaagacgcgctgtcagcggaaggcttaaagtaatatccatcggcccacaggtcgttgtgggccgaaatgagatatttcagagctttgttgcgctgaagtaatgttctggtttggcaatacgatcctgagcagccaccacttgcagctcatattcctgcattgctttggtggtcaccatgatttcgtagactgcagcggtcacatgttccagcgcctcctgcagcgttgccccctgaagcagtttcaccagcagtaaaccgctcgtcacatcaccaacacctaccggctggcgcataccaaaatccaccagcggacggctgatatgccaggcttcatcggcggtgaccagcagcatttcaaaacggtcacggctgtagccagctcgcgccaggtgtttaaccaacacaatttgtggcccttgcgcaatgagttcgcgcgctgccagaaccgcttcttcgacgttatttaccgcatgctcacagagtatttccagctcaaccagattcggcgcaatgatatcgctggcaggcaaaccgtgccgcacatgaaactctgcgacacccggtgcaacgatacagcctttttccggatgacccattaccggatcgcaaaaatatttcgcctgcggattcgcggctttcacctgacggacgataccgaggatatgttcaccctgctccgccgatcccagatagccacttaacacggcatcacaggtgtgtaatttatcaatggcggcaatgccttgcacaatttcagttaaatggctgggcggcatcacgcagccagtccatttgccgtattgggtgtgattagaaaattgaacggtgttcagcggccagacgttcgcgcccaggcggcgcataggaaactctgccgcactgttacccgcatgaccataaacaacgtgagactggatagcgagaatatttttcatcatgttccctgtataaaaaccagggggagtgatttctcactccccctttccacttaatgcattatttccagcaaatcagacagtaattctttttgccgcgacgcagtaaggtaaaacgaccaaacagacgatcttcttctttaaagaagtattcaggatcggactgtttttcaccgttaatggtgatggcattggaggcgatagttttacgcgcctgaccacgggaaggttgcagttcagaatcgaccagcgcctgcatcaggtctgcgcccttttccatctcaaccatcggtacgccgtcctgcgccagctgttcgaagtccgcttcactcagcgcactcaaagaaccgctgaacaggcattcggtaatacgttttgccgcctgtaaaccttcttcaccgtgaaccagacgagtcacctgctccgccagtacatactgggcgcgcggtgctttaccgctgtttttatcttcttcttccagggcgttgatctcttcaatgctcataaaggtgaagaacttcaggaagcggtaaacgtcggcatccgcagtgttgatccagaactggtagaatttgtacgggctggttttcttcggatccaaccagactgcgccgccttcagttttaccaaatttggtgccatctgctttagtgatcagcggaacggtcaggccaaacacctgattctgatgcagacgacgggtcaggtcgataccagaagtgatgttaccccactggtcagaaccaccaatttgcagcaccacaccgtactgtttgttcagacaggcgaagtcataaccctgcaacaggttgtaggaaaactcagtgaacgaaatcccctgatcttcacggttgagacgctgcttaaccgcttctttgttgatcatctggttaacggagaagtgtttgccaatatcgcgcaggaaggtcagcacattcatattgccgaaccagtcatagttgttcgccgcgatagcagagttttctccacagtcgaaatcgaggaacggggcaacctgcttacggattttgtccacccactcctgaacagtttcttcggtgttcagcttacgctcggcagctttgaagctcgggtcgccaatcagacccgtcgcgccgcctaccagcgcaaccggcttgtggcccgcctgctggaagcgtttcaggcataacaatggaacaagatgccccaaatgcaagctgtcagcggtaggatcgaagccgcaatagagcgcgatcgggccttgcgccagtcgctctgctaacgcttcctcgtccgtcacctgggctaccagcccccgctcttgcaattgtttaatcaagttactgcttgccatcaaaatctccatgtatataacgactgcacctttgccggtacacgacttttcgccagatgcgaaagagacatagaataaagtgccagaatcaggagtaccagcgattaaagcaagatttttgcatcttttcagggtgcaagacgatcaatcttccacgcatcattttctcgctggtacaaaaagcggtcatgcaggcgatgctcaccgccctgccagaactcaatctgttcaaggctgatgcgaaaaccgccccaaaagctcggcaatggcacttcgccctgttgaaacttctgcttcagctccaggaatttactttcaaggataccgcgggcagaaatgcgactggactgcttcgaaacccatgcaccaatctggctatcacgcgggcggctatgaaaatatttcatcacttcgagagtcgaaagtcgttctgctttaccgatcaccatcacctggcgttcaagggtatgccacgggaacagcaggctaacgcgcggattattttcaatttgatgtgctttacggctaccgaggttggtgtaaaacaccatgcctttttcgtcgtaatgtttgagtaaaacgatgcgttgataaggctgagcatgttcatccacggtagcgaccaccatcgcggtagggtctgccagtttggcttcacacgcctgagagagccaacgttcaaaaagggttaatggatcggcgggaagatcgcgacggcgtaacccgcctttggtgtattcacggcgcagatgcgcgatttgctgcaattcgtcgttatcagacatggttttctttacggattgtcagtgggtgacgctattgtgcgccgcccctggaaaaatctcaacgctgtggattttgtaactgacagttattcaagacgatgcggtcgcgtttatagacagtcgcttcatcgcctttcgaccagaaaacatagattccgtcagtgtaacgtgcaccagacgctgaaatgccctgtttgagatgcagtagttgattatcgtaaacaaaactgacttcctggcgcggattattcagtttgaccgtcaacggtttttcatcacactggtattccagcgtagcggtttgcatgtgctcaaccagttgattgaacgcgctacagccggtgagaagcaccggcaaacagatcagtaacagttttttcatagacatttcccgaagactttcctggtctggagggcaatacgccctccctaatgttccaagtgtaacggcagacgcggtaagaaaaattcagttaactctgatatcacgggttagcagggaaaatagcccccagtaccgtctcctggcttgcgccagtgacggaaggcagatttcctggtaatcccgccagcgtccgccaggcaagccaggcgaaagccaatgcttccatgtcatcgccactaatgccaacggcatcggtggtggtgacttctgtgcctggcagtaatgccgccagacgcgccatgagtagcggattacgactacctccaccacataccatcaatcgttcgcagccaccgctcaacaaaacttgttcagaaatggtcacggcggtgagttctgccagtgtggcctgaacatcacggggatcaacacccggaaaatggcgtaaatggcgctccagccagccgtagttaaagtattcgcgtccggtgcttttcggtgcaggttgcgagaaatatgggtcgctgagcatattttgcagcagtgggagaataactttacccgcccgtgcccactcggcatctttatcgtaaggtttaccggcctgacgccagatccaggcatccatcagcatgttaccaggaccggtatcgtagccgccaaccggctgcccaggaatgagcagtgacagattggcgatgccgccaatattgagcaccattcgtcgctcggttgagtgagccagcaaggcatgatggaacgcaggtaccagcggtgcgccttgtcctcccaaggcaatatcgcgacggcgaaaatcaccgacaaccgtaattccggtgcgtgccacaatttgattgttatcgccaatctgtaaagtgtgtggtgccacgcccgtcggttcatgccagacggtttgaccgtgacagccgatcgcaactatatctctcgcctgcaggttttgttccttaagcaaggcattgaccgcatcagcaaaaagtcgcccgagttgagtatcaagctgtccaaactgcgaaagtgtaagctgctggccctggcaaatatccagtacagcctgtttcagagacaccgggatcggccagctcaagcttgccagctgtgcgacccggtgttcatctattgtcgccaacacaacatcaacaccatcaaggctggtgcctgacataacgccaataaagcggcccgatttcatagttcatcctttttcaatctgacgtttgcgcaccactcaaacataaacttttcgtgaataccatgcggaatgaccgatttttaccgttggtagtaaaacattatcttcaaatcaataatcatcatgaatgttttgtttataattggttgatcctactttcattatgatttgctcatatttggtagaacatgtaaccatggattcacatatgccatatactttgaccatgagggatgcttgcgtggcgtttcatggtgaacaggagatttttcaatgattaaacgcgtattggttgtttcaatggtaggtctgtctcttgtcggttgtgttaataacgacaccctgtcaggggatgtttataccgcttctgaagcgaaacaagtacagaatgtcagctatggcaccatcgttaacgtacgtccggtacagattcagggcggtgatgattccaacgttatcggtgcaattggcggtgctgttcttggtggtttcctggggaatactgttggtggcggaaccgggcgttctctggctactgcagcaggcgctgttgcaggtggcgtagctggtcagggcgtacagagtgcaatgaacaaaacgcagggtgtcgagctggaaattcgtaaagacgatggtaataccatcatggtggtacagaaacaaggcaacactcgtttctctccgggccaacgtgtcgtactggccagcaatggcagtcaggtgaccgtttctccgcgctaaataagtttgcgtgtggtcaggttactgaccacacgcccccttcatttcaccctttggcctgtaactcaatgatattatgctcaagttttgcgatgagcgtaatcagttgctccagttcctctgcggagatgccatgtaatatttccgcgcgggttttgttaataacagcttccatttcgctgatcagtggctctgccttttccgtcagtttaatacgtttagcccgacgatcgctggcacaagtttgacgcgaaattaaccctttttcttccagttggtccagagtacggaccagtgatggctgctcgatgccaatcgcttttgccagttgaatttgcgactggtctggaggtaactgatgaatattgtgtaacgtaacccaatgggtttgtgttaactccagcggtttcaggcgatggtctatcagagcacgccatatgcgcaccaaccgtgccagatcagaacctagtggcgattccaatttcatctccttataattagcttgctaagatattatgcggcttttagaatagtgtgcagcaattgtattgctaaaacaaatgtattgctgcatttggttaccgtcagacatatttttcagaaattgcgcgtaaatttttcgcacttaaagaatatttattaatctaacgcaatatattcggtcgtaaaggaatctactttgtgaagtttatgctcaatgcaacaggattgcccttacaagatctggtgttcggtgcgtccgtctattttcctccgtttttcaaagccttcgcgtttggattcgtcatctggcttgtcgtacaccgcctgcttcgtggctggatctacgccggtgacatctggcatcccttgttaatggatttatcgctgtttgcgatttgcgtttgccttgctctggcaatactgattgcgtggtaactatgtcaattaaaacaattaagtatttctcaacaatcattgtagcgatagttgcggttcttgccggatggtggctgtggaattattacatgcaatctccgtggacacgcgacgggaaaatacgcgcagaaaaggtttctatcaccccacaggtgtcgggacgtattgttgagctgaatataaaagacaaccaactggttaacgcgggggatcttctgctcacgatcgataaaacgccctttcagatcgccgagctgaacgcacaggctcagctggcgaaagcgcaatctgacctcgcaaaagccaataacgaagcgaatcgtcgtcgtcatctctcacaaaattttatttctgccgaagaactcgataccgctaacctcaatgttaaagcgatgcaggccagtgttaatgccgcacaggccacgctgaaacagacacaatggcaactggcgcaaacggaaattcgcgccccggtgagtggttgggtgactaacctcactacccgcatcggcgattacgctgacaccgggaaaccgctgtttgcccttgtcgacagccactcgttttacgtcattggttattttgaagaaaccaagttgcgccatatccgcgaaggtgcaccagcacaaattaccctctatagtgataacaaaacgttacggggtcacgtttccagtatcggtcgggcgatttatgatcaaagcgttgaaagtgactcaagccttattccggatgtgaaacctaacgtcccctgggttcgtctcgcccaacgcgttcccgtccgctttgcgctggataaagttccaggcgatgtcacgctggtgtcgggcaccacctgtagcattgccgtaggtcaataatgaacgcatcgtcatggtccttgcgcaatttgccctggttcaaggccacgctggcgcaatggcgttatgcgttacgcaataccattgccatgtgtctggcgctgacggttgcctattatttgaatctggatgaaccctattgggcgatgacctcggctgcagtggttagctttcccaccgttggcggtgtcatcagcaaaagcctcggacgcatcgctggcagtttactgggagccattgcggcactgcttcttgccgggcatacgctcaatgagccgtggttttttctattgagcatgtcggcgtggcttggcttttgtacctgggcctgtgcgcacttcacgaataacgtcgcgtatgcatttcaactggcgggctacacggctgccatcatcgcctttccgatggttaatattactgaggccagccagctgtgggatatcgctcaggcgcgcgtttgcgaggtgatagtcggtattttgtgcggcggcatgatgatgatgatcctgcctagcagttccgatgctacagcccttttaaccgcattgaaaaacatgcacgcccgattactggaacatgccagtttactctggcagcctgaaacaaacgatgccattcgtgcagcacatgagggggtgattgggcagatactgaccatgaatttgctgcgtatccaggctttctggagccactatcgttttcgccagcaaaacgcgcgccttaatgcgctactccaccagcaattacgtatgaccagtgtcatctccagcctgcgacgtatgttgctcaactggccctcaccgccaggtgccacgcgagaaattctcgaacaattgctgacggcgctcgccagttcgcaaacagatgcttacaccgtcgcacgtattatcgccccgctacgcccgaccaacgtcgccgactaccggcacgtcgccttctggcagcgactacgttatttttgccgcctttatctgcaaagtagtcaggaattacatcgtctgcaaagcggtgtagatgatcatgccagactcgcacggacatccgctctggctcgtcataccgacaacaccgaagctatgtggagcgggctgcgtacattttgtacgttgatgatgattggcgcatggagtattgcatcgcaatgggatgccggtgccaatgcattaacgctggcagcaattagctgcgtactctactccgccgtcgcagcaccgtttaagtcgttgtcactgctgatgcgcacgctggtgttactttcgctattcagctttgtggtcaaatttggcctgatggtccagattagcgatctgtggcaatttttactgtttctctttccactgctggcgacaatgcagcttcttaaattgcagatgcccaaatttgccgcactgtgggggcaactgattgtttttatgggttcgtttatcgctgtcactaatcccccggtgtatgattttgctgattttcttaacgataatctggcaaaaatcgttggcgttgcgctggcttggctagcgttcgccattctgcgtccaggatcggatgctcgtaaaagccgccgccatattcgcgcgctgcgccgggattttgtcgatcagctaagccgccatccaacactgagtgaaagcgaatttgaatcgctcacttatcatcacgtcagtcagttgagtaacagccaggatgcgctggctcgccgttggttattacgctggggtgtagtgctgctgaactgttctcatgttgtctggcaattgcgcgactgggaatcgcgttccgatccgttatcgcgagtacgggataactgtatttcactgttgcggggagtgatgagtgagcgtggcgttcagcaaaaatcactggcggccacacttgaagaattacagcggatttgcgacagccttgcccgtcatcatcaacctgccgcccgtgagctggcggcaattgtctggcggctgtactgctcgctttcgcaacttgagcaagcaccaccgcaaggtacgctggcctcttaattacttaattacaccacaggcatagcgttcaccgccaccgcccagcggtttaggttgatcggacatattatcgccgccaacgtggaccatcagcgctttgtctttgatttcatccagtgatttcagacgaggcgcgatgacggcatcggtagctttgccgtcattattgacgaccagtgcaggcagatcgcctaaatgcccggcaccttctggcccttcatgtttaccggtattttgtggatcaagatgcccgcctgcggattccgcggcgctggctttgccatctttggtggctggctggcagcttcctttggcatgaatatggaagccatgttcaccggggggtaatgctttcagatcgggcgaaaactccagacctttatcggtttcagtaatggtgacgctaccaattgactgccctaccccttgcgacgtgacgaggttcatctcgactttttcactggcagcttgtgcgccggttgcaacaaccagcgccagaatagccagactaaaacgtttcataggacctccgttcattgtgcattcctgaataagtgtaaaccagtgacacatttttgaacggcggctattcctaaaagtgcttacggtacgtcgtaccccagtgccgctttacggatacgaaaccattgttgacgggtcattttcagtgtttctgcttcgacagctgcccgtacgcgctcaattttacctgaaccgataattggcagcggctgcgatggtaaacgtaatacccaggcgtaaaccacctgttcaatcgagcccgcgtttaactcctctgccaccacagccagttcatcacgcagctgctggaaataatcatcattaaacagacgaccaccaccaaggcaggaccacgccatcggacgaacacgcagttgttgtagttggtcgagcgtgccatccagcagtaacggctgatgcaccggggatatttccacctgattagtggcaagggtaaacggcagacgtgattgcaacagggcaaattgcgcaggcgtaaagttcgatacgccaaaatgacgcactttgccgctctgatgcagatgtttgaacgcgtccgccacttcatcggcatccattaacgggtctggtcggtggattaacagcagatccagatgatcggtcgcgagattaattagcgactgttcggcgctcttaatgatgtgatcgcggtcagtgatgtaatgaccaatgacgttttcttcacgcgcggtcgtcgcgataccgcatttactgacgatttccatccgttcacgcaggtgaggtgccagtttcagtgcctcgccaaacgccgcttcgcactgatagccaccataaatatcagcatggtccacggtggtcacgccgagatccagatgctcttcaataaaactgaccagctggcgggcggacatattccagtccatcaatcgccagtagcccatcacaaaacgggaaaactccgggccttgcggcgcaattgtaatacgctgaaccataatcacttcctcttatcagatatgagaggagtatacgcaagattaggttcaaaagagtgatggttgctccggttcgtctgatgacgctggcttatttgcgcgtaatttgcgcattaatcgctgccgacaaaggcgcagcacctcttgtttttcgccatcgctcattttattccagttaaaacgctcatcacgactacgaaaacagccgcgacaaaacccgcgttcgtcagactggcaaattccccggcacgggctctggacgggaaagaactctaattgctccgccacttcgccctcctcagataagattattaccattattgaagctgttaatgtccaaagtagcaactttgcttgcactagaccgactggtctactacactccaacgcatgaacaaacacaccgaacatgatactcgcgaacatctcctggcgacgggcgagcaactttgcctgcaacgtggattcaccgggatggggctaagcgaattactaaaaaccgctgaagtgccgaaagggtccttctatcactactttcgctctaaagaagcgtttggcgttgccatgcttgagcgtcattacgccgcatatcaccagcgactgactgagttgctgcaatccggcgaaggtaactaccgcgaccgcatactggcttattaccagcaaacactgaaccagttttgccaacatggaaccatcagtggttgcctgacagtaaaactctctgccgaagtgtgcgatctgtcagaagatatgcgcagcgcgatggataaaggtgctcgcggcgtgatcgccctgctctctcaggcgctggaaaatggccgtgagaaccattgtttaaccttttgtggcgaaccgctacaacaggcacaagtgctttacgcactatggctgggtgcgaatctgcaggccaaaatttcgcgcagtttcgagccactggaaaacgcgctggcccatgtaaaaaacattattgcgacgcctgccgtttagcaggcattttttatcaccagacgaccaggagcctttatgtcatctgaaaaactgtattccccactgaaagtgggcgcgatcacggcggcaaaccgtatttttatggcaccgctgacgcgtctgcgcagtattgaaccgggtgacattcctaccccgttgatggcggaatactatcgccaacgtgccagtgccggtttgattattagtgaagccacgcaaatttctgcccaggcaaaaggatatgcaggtgcgcctggcatccatagtccggagcaaattgccgcatggaaaaaaatcaccgctggcgttcatgctgaaaatggtcatatggccgtgcagctgtggcacaccggacgcatttctcacgccagcctgcaacctggcggtcaggcaccggtagcgccttcagcacttagcgcgggaacacgtacttctctgcgcgatgaaaatggtcaggcgatccgtgttgaaacatccatgccgcgtgcgcttgaactggaagagattccaggtatcgtcaatgatttccgtcaggccattgctaacgcgcgtgaagccggttttgatctggtagagctccactctgctcacggttatttgctgcatcagttcctttctccttcttcaaaccatcgtaccgatcagtacggcggcagcgtggaaaatcgcgcacgtctggtactggaagtggtcgatgccgggattgaagaatggggtgccgatcgcattggcattcgcgtttcgccaatcggtactttccagaacacggataacggcgcgaatgaagaagccgatgcactgtatctgattgaacaactgggtaaacgcggcattgcttatctgcatatgtcagaaccagattgggcggggggtgaaccgtatactgatgcgttccgcgaaaaagtacgcgcccgtttccacggtccgattatcggcgcaggtgcatacacagtagaaaaagctgaaacgctgatcggcaaagggttaattgatgcggtggcatttggtcgtgactggattgcgaacccggatctggtcgcccgcttgcagcgcaaagctgagcttaacccacagcgtgccgaaagtttctacggtggcggcgcggaaggctataccgattacccgacgttgtaatccaacattgcgagcggcgtaaagccgccgctatactaaaacaacattttgaatctgttagccattttgaggataaaaagatgcgtcttcttcataccatgctgcgcgttggcgatctgcaacgctccatcgatttttataccaaagtgctgggcatgaaactgctgcgtaccagcgaaaacccggaatacaaatactcactggcgtttgttggctacggcccggaaaccgaagaagcggtgattgaactgacctacaactggggcgtggataaatacgaactcggcactgcttatggtcacatcgcgcttagcgtagataacgccgctgaagcgtgcgaaaaaatccgtcaaaacgggggtaacgtgacccgtgaagcgggtccggtaaaaggcggtactacggttatcgcgtttgtggaagatccggacggttacaaaattgagttaatcgaagagaaagacgccggtcgcggtctgggcaactaatctcctgccgggcgtgaactcatcgcgcccgcatctttactgcatcgacaagtaatatttgtcataatgcgcgctgcaatttatccgtattaagagaatcagatgtccgataacgctcaacttaccggtctgtgcgaccgttttcgtggtttttatcctgttgtgatcgatgttgaaacagccggatttaacgccaaaaccgatgcgctgcttgagattgccgccatcaccctgaaaatggatgaacaaggctggctgatgccggacaccacattacatttccacgtcgaaccatttgtcggcgcaaatttgcagccagaggccctcgccttcaacggcattgacccgaacgatcccgatcgcggcgcggtcagcgaatacgaggcgctgcacgaaatttttaaagttgtacgtaaaggtattaaagcgagcggctgtaaccgcgccattatggtggcgcacaatgccaattttgatcacagctttatgatggccgccgcagaacgcgcctcactgaaacgtaacccgttccaccctttcgccacttttgacactgctgcactggccgggctggcactcggacaaaccgtattgtcaaaggcttgccagaccgctggcatggacttcgacagcacccaggcgcactccgcgctgtacgacaccgaacgcactgctgtgctgttttgtgaaatcgtcaaccgctggaaacgtctgggaggctggccgctacctgccgccgaagaggtgtaatcgagtcgatgcctgatgacatgcaatgattcaggcatctatagtgaggctattccacgcatcaagcatgatattcacggggaatagcgttaatggcagataatccagacccttcatcgctcctgccggacgtgttttcaccggcgacccgcgactggtttcttcgcgcctttaaacagccgaccgctgtccagtcgcaaacctggcatgtggcggcgcgaagcgaacatgcgctggtgattgcaccgaccggctccgggaaaacgctggcagcatttctctacgccctcgatcggctcttccgcgaaggcggcgaagatacccgcgaggcgcataagcgtaaaacctcacgcatcctctatatttcaccgataaaagctctgggcaccgacgttcagcgcaacttgcagctcccgttgaagggtattgccgatgaacggcggcggcgcggcgaaacggaagtcaatcttcgcgtagggatccgtactggcgatacgcctgcacaggaacgcagcaaactcacccgtaatccgccggatattctgatcaccacacccgaatcactctatctgatgctgacctcccgcgcgcgcgaaacgctacgcggcgtcgaaacggtaattattgatgaagtccacgcggtagcgggcagtaaacgtggtgcgcatctggcgttaagtctggagcggctcgatgcgctgctccacacctcagcacagcgaattggcctttctgccactgtgcgctcagccagcgatgtggcagcatttcttggtggcgatcgcccggttacggtagtcaacccgcccgcaatgcgccatccgcagatacgaattgtcgtaccggtcgccaatatggatgatgtctcatcggtcgccagcggcaccggcgaagacagccatgccggccgggaaggctccatctggccatatattgaaacgggtatccttgatgaagtgttgcgccatcgctcgaccattgtctttactaattcacgtgggctggcggaaaaactgacggcacgattaaatgagctttacgccgcacgcttacagcgttccccgtctatcgccgttgatacggcccatttcgagtcgacctccggcgcaacctctaaccatgtacaaagtagcgacgtttttattgcccgctcacaccacggctccgtctctaaagaacaacgagcaatcaccgaacaggcgctgaaatcgggtgaattacgctgcgtggtcgcaacctccagtctcgaactggggattgatatgggcgcggtggatctggtgattcaggtggcaacgccgctttctgttgccagtgggttacaacgcattggtcgcgccggacatcaggttggcggtgtatctaaagggctgtttttccctcgtacccggcgtgacttagtcgattccgcagtcattgtagagtgtatgttcgcaggcaggctggaaaacctgacaccgccgcataatccactcgacgtccttgcgcagcaaaccgttgccgccgcggcgatggatgcattacaggtagacgaatggtactcccgcgtacgccgtgccgcaccgtggaaagatctgccaagacgtgtttttgacgccacgctggatatgctttccgggcgctatccctctggcgatttttctgcttttcgccccaaactggtctggaacagggagaccgggatattgaccgcccgacctggcgctcaattgttggcggttaccagcggcggcaccattccggatcgtggcatgtatagcgtgttattacccgaaggtgaagaaaaggccggttcgcggcgggtgggtgaactggatgaggagatggtatatgagtcgcgggtgaacgacattatcactctcggcgctacctcatggcggatccagcaaatcacccgcgatcaggtgattgtgactcctgctccgggtcgttctgcccggctccccttctggcgtggtgaaggtaacggacgtccggctgaattaggcgagatgatcggcgattttcttcatttactggcggatggcgcgttcttttccgggactattcccccgtggctggcagaagaaaatacgaacgccaatattcaggggttgattgacgagcaacgcaacgcgacgggcatcgttccggggagtcgccatctggtcctcgaacggtgccgtgatgaaattggcgactggcgtattattttgcactctccctatggaagacgggtgcatgaaccctgggcgctggcgattgccgggcgaatacatgccctatggggcgctgacgcgtctgtggtcgccagtgatgacggcattgttgcgcgcattcctgacactgatggtaaattgcccgacgccgcgatttttttgtttgaaccagaaaagttgctgcaaattgtccgcgaggcggtaggcagctcggcacttttcgccgcccgttttcgcgaatgcgccgcgcgggcattattaatgccggggcgcactccgggccatcgcaccccgctttggcaacaacggctgcgcgccagtcagttgctggaaatcgctcagggatatccggattttccggtcattctcgaaaccctacgcgaatgtctgcaagatgtttatgatcttcccgcactggaacgtttgatgcgtcgcctgaacggtggcgaaattcaaatatccgatgtaacgaccactacgccctcgcctttcgccacaagtttattgttcggctatgtcgcggaatttatgtaccagagcgacgccccgctggcagagcgccgggcatccgtactgtcgctggacagcgagttactgcgcaatctactcggacaggtcgatccgggggaattactcgacccgcaggtcattcgccaggtggaagaagagttgcaacgactggctcctggcagaagagcgaaaggtgaagaaggattgttcgacctgctgcgcgaactggggccaatgaccgttgaagacctggcgcaacggcatacaggcagcagtgaagaggttgcgtcgtatctggaaaatcttcttgcagtaaaacgaatcttcccagcgatgattagcggacaggagcgtcttgcctgtatggatgatgccgccaggctgcgtgatgccctcggcgtacgactaccagagtcattgccagagatttatttacatagagtcagttacccgcttcgcgacctctttctgcgctatctccgggctcatgctctggtcacggctgaacaactggctcatgagtttagtctcggtattgccattgtcgaagagcagcttcagcaactgcgtgaacagggtctggtgatgaatctgcaacaagacatctgggtgagcgatgaagtatttcgtcgtctgcgtttgcgctcgctgcaagccgccagagaagcgacgcgtcccgttgcagccacgacctatgcgcgattgctgctggaacgtcagggcgtattacccgccaccgatggtagcccggcgctctttgcctcaacatcgccaggcgtttatgagggcgtagatggcgtgatgcgggtgatcgaacagcttgccggagtcggtttacccgcctcactctgggaaagccagatcctgcctgcccgcgtacgcgactattcgccagaaatgctcgatgaattactggcaaccggtgcggttatctggtcggggcaaaaaaaactgggtgaagatgacggcctggtggcactgcatctacaggaatatgctgcagaatcgttcactcccgccgaagcggatcaggcgaatcgttcggcgctgcaacaagcgatagtcgctgttctggctgacggaggagcctggtttgcacaacaaatcagccaacggatacgcgacaaaatcggcgaatcggttgatctctctgccctgcaagaggcgttatgggcgctggtctggcaaggcgtcatcaccagcgacatttgggcaccgttacgcgccctcacccgcagcagttccaacgcacgcacctcaactcgccgcagtcaccgggctcgtcgtggacgtcctgtctatgcgcaacccgtctcgccgctggtatcttacaacacaccaaatctggctggacgctggtcgttattgcaggtggagccactaaacgataccgaaaggatgctggcgctggcggaaaatatgctcgaccgctacggcatcatcagtcgtcaggcggtgatagccgaaaatatccctggcgggtttccatcgatgcaaacgctttgtcgaagtatggaagactccgggcgaattatgcgaggtcgttttgtagaaggtctgggtggcgcgcaattcgctgaacgtctgactattgaccgattgcgcgatctggcgacacaagccacgcaaacgcgccactatacaccagtggcgctctctgccaacgatccggctaatgtgtggggaaatcttctgccctggcctgcacatccggcaacgctggttccaacgcgtcgggcgggtgcgctggtggtcgtttctggcggcaaattgttactctatctggcgcaaggtggcaaaaaaatgctggtctggcaggaaaaagaggaattactcgccccagaggttttccacgcgctgactaccgcactgcgtcgcgaaccacggctgcgctttacgctaacagaagtgaatgatctaccggtccggcaaacgccgatgtttacgctgctgcgtgaggcgggattttcaagttcgccacaagggctggattggggatagagaaaggactgacggatgcccgttcgcatccgtcagtattgcaggacggattattccgcgtccggctcttcagacttgtatttagcggcagtttctttgatcagctgctgcagttcgccacgctgatacatttcgatcacgatatcacaaccgccgaccagctcgccgtcaacccacagttgcgggaaggtcggccagttagcatatttcggcagttccgcacgaatgtccggattctgcagaatatcaacataggcaaaacgttcgccacatgcggcaagcgcctggactgcctgggcagagaaaccgcagctcggcagtttcggtgaacctttcatgtacagcaggatcgggttttcagcaatctggcgttggattttttcgatagtggtgctcattgtcttgcttcctcaaacttctttacggcagtaatctgacattgtagcgggtcagtgcggcatcggaaaataacattttcatcacgcttttgctattttatccctttgctctatttgttgcatttcaaatattcgtttcttctctgatgcgcggcaaactggcgtatttataaccatttttagctttcactgctgcatttttttgcgctcgccaacgaaacgtattttttaacaataaaagctattaactttctcttcttctatgcattagaatcatcaagttttgtaaatcagacgcaggcatgatagacctgccttaacagagggacgctcagtggcgcggataaaccgtatttcgatcacgctctgtgctttactttttaccaccctgcctttaacgcctatggcccatgcttcaaagcaagccagggagagttctgctaccactcatatcaccaaaaaagcagataaaaagaaaagcacggcaaccaccaaaaagacccagaaaacagcgaaaaaagccgccagtaaaagtacgaccaaaagcaaaaccgcttcttccgttaaaaaatcttccattaccgcttctaaaaacgccaaaactcgcagcaaacacgccgtcaataaaacggcctcagccagctttaccgaaaagtgtaccaaacgtaagggctataaatcgcattgtgtgaaagtcaaaaatgccgcgtcaggaactcttgccgacgcgcacaaagcgaaggtgcaaaaagctacgaaagtggcaatgaataaactgatgcagcaaattggtaagccatatcgttggggtggcagctcaccgcgtaccggttttgattgcagcggcctggtttattacgcttataaagatttggtgaaaattcgtattccgcgtacggcgaatgaaatgtatcacctgcgtgatgcagcgccaatcgaacgtagtgaactgaaaaacggcgacctggtctttttccgtactcagggacgcggcacagccgatcatgtcggcgtgtatgtcggcaacggcaaatttattcagtcaccgcgcacaggtcaggaaattcaaatcacttctctcagtgaagactactggcagcgccactatgttggcgctcgtcgggtaatgaccccaaaaacacttcgctaaaactttaccctgttgttacggcaacagggtaagttcatcttttgtctcaccttttaatttgctaccctatccatacgcacaataaggctattgtacgtatgcaaattaataataaaggagagtagcaatgtcattcgaattacctgcactaccatatgctaaagatgctctggcaccgcacatttctgcggaaactatcgagtatcactacggcaagcatcatcagacttatgtcactaacctgaacaacctgattaaaggtaccgcgtttgaaggtaaatcactggaagagattattcgcagctctgaaggtggcgtattcaacaacgcagctcaggtctggaaccatactttctactggaactgcctggcaccgaacgccggtggcgaaccgactggaaaagtcgctgaagctatcgccgcatcttttggcagctttgccgatttcaaagcgcagtttactgatgcagcgatcaaaaactttggttctggctggacctggctggtgaaaaacagcgatggcaaactggctatcgtttcaacctctaacgcgggtactccgctgaccaccgatgcgactccgctgctgaccgttgatgtctgggaacacgcttattacatcgactatcgcaatgcacgtcctggctatctggagcacttctgggcgctggtgaactgggagttcgtagcgaaaaatctcgctgcataataactgatggcaaatgcagcattgcctgatgcgcctcgcttaccatgccaacgcggatgaggcgttaacagcgcattcggcaagataaatcgcacgttgtcagcaactgtaacgcagaaggttatccttctgcgtttttgtttaattagctgttagcaacgcaaactgtttcaggttgttttctggctgacataaacaccagcaataatgccagtcccgcgacaatcgctcccatcaccggcacaaagctgtatcccagcccagcggaaattaccgcaccaccagcagctgctcccagcgcatttccaagattaaaggcaccaatattgactgatgaagacagacccggcgcttcactggcgacacgcatcacgcgcatctgtaacggcggtacgaccgcaaaggttgctgcgccccacaccaccatgctaatagctgcgccgaactcattgcgggccaggaacgggattgccagcataatcaccatcagcagcaacaaaaagcctttcaacgtgccgttaactgaacgatctgccagtttgccgccgagatagttaccgatagagaatccgacaccaatcagcaccagcattgccgtgacgaacactggtgttgcgtgggtaatactttgtagtaccggagagatataggtgtagagagtaaacattgcaccagctcccagtaccgtcgtcagcaatgcagacagcacctgcggacgcattaataccgccagctcttttttcacttcaggtcgtgcccctgcaccacctttaggtaatgagaagaacagacttaccattgaaatcactcccagccccgccgttgccagaaatgacatccgccagccgatggtttcacccaaccaggtcgccgccggcacgccaccgatatttgccagggttaaccccataaacatagtggcaactgcgctggcctgtttatgttttggcaccacgcttgcggccacgactgaacccaaaccaaaaaatgctccgtgattcaggctggtcaaaatgcgtgaaagcatcagggtcatataatccggcgcgatggcggaaagtacgttgccgagcgtgaaaattgccatcaggaaaatcaacgcactgcggcgggcacgatgagaaagtagaagcgtcatcagcggcgcgccaaccattacgccaactgcataggcactgattaacattccggcagcgggaatcgagacatccacaccgcgcgcaatgacgggcaacaagcccattggcgagaactccgttgtcccgataccaaacgcgccaatcgccagcgccagcaacggatagttaattttcatgccttatctccacctcttcgcgtcattacgcgatattcattaaagtggcgaaagcatgacagcaatcacaaaaaaatgaaaataacaaaaagagaaaacacttttgccattttgctaacaaacaggaaggagatgcgagggagaacgcgctccctcgagaggaaatcagtgcagcgcggcagtcaaacccacggccacgatcaaaccgaggacgataatcgttgttaccagtgaaaatttaaggtcggtgctcatcaagttttctccttttttattaccacacaaatagtgatattacgcatttttacacactgtgatgaaaaaatctcccgtcatttataatgataagtgtttttaccacttccccttttcgtcaagatcggccaaaattccacgcttacactatttgcgtactggccattgaccccttcctgacgctccgtgtcgtttttccggcgtaccgcaacacttttgttgtgcgtaaggtgtgtaaaggcaaacgtttaccttgcgattttgcaggagctgaagttagggtctggagtgaaatggaatggcaacaataaaagatgtagcgaaacgagcaaacgtttccactacaactgtgtcacacgtaatcaacaaaacacgtttcgtcgctgaagaaacgcgcaacgccgtgtgggcagcgattaaagaattacactactcccctagcgcggtggcgcgtagcctgaaggttaaccacaccaagtctatcggtttgctggcgaccagcagcgaagcggcctattttgccgagatcattgaagcggttgaaaaaaattgcttccagaaaggttacaccctgattctgggtaatgcgtggaacaatcttgagaaacagcgggcttatctgtcgatgatggcgcaaaaacgcgtcgatggtctgctggtgatgtgttctgagtacccagagccgttgctggcgatgctggaagagtatcgccatatcccaatggtggtgatggactggggtgaagcaaaagctgacttcaccgatgcggtcattgataacgcgttcgaaggcggctacatggccgggcgttatctgattgaacgcggtcaccgcgaaatcggcgtcatccccggcccgctggaacgtaacaccggcgcaggccgccttgccggttttatgaaggcgatggaagaagcgatgatcaaggtgccggaaagctggattgttcagggtgactttgaacccgaatctggttatcgcgccatgcagcaaatactgtcgcagccgcatcgccctactgccgtcttctgtggtggcgatatcatggcaatgggcgcactttgtgctgctgatgaaatgggtctgcgcgtcccgcaggatgtttcgctgatcggttatgataacgtgcgcaacgcccgctattttacgccggcgctgaccacgatccaccagccaaaagattcgctgggtgaaacagcgttcaacatgctgttggatcgtatcgtcaacaaacgtgaagaaccgcagtccattgaagtgcatccgcgcttgattgaacgccgctccgtggctgacggcccgttccgcgactatcgtcgttaatcacccgttgcgggagtctcttccggctcccgcagccactccttattcagcgtctcactatcgccgagatactcaagcagccaggttaacgcaggcgacatatcattttgctgccatgtcagacaacatgccgaatccgggaaggggttttccaattcaagtgctacccacttcccctcattaagccacggtttggcgaaatgtgttggcaccatccctatgcataatcctgccgagatacaggttgccgatgattcccagtcaggcacgacaactcttttttggttatccagcaaccaggtaatacgtttaggtagcgttcgcgaggtgtcttcgcgcaccaacgacggccagttgcgcaacgtatcatcgctgaatgggccatccatcaacgccagcgggtggtggctggcaacaacgcaactccagcttagcatccccatatcccggaaggcataacgaccgcctaccggaatcgcgcgtgttgcgccaatcgccagttccacgcgcccgtcggaaagcgcatcccagacaccgttgaacacttcctgaaagacaagaagttcgacatcatcaaaatggcgataaaaatcaacgatcatctgccgtgtacgttctggcctgacaatattatccactgcgatagctaactgaccgcgccagccgttcgctatctgctgacattgctggcgggtgatctgcatttttttgacaacagagcgcccttctttgagaaaccacgctccagcagcggtcagctccacatcacggtgccgtcgttcaaagagcggcaccgccagccactcttccagctgacgcacggtatagctgaccgcagaaggaacgcgatgcagctcctgtgccgcagcgctaaaactaccattacgcgctaccgcatcaacaacttcgagtgaatattctgaccacatagtctgcctgcaaaatttttgaaaccagtcatcaaatattaccgtttcacaacactaatttcactccctacactttgcggcggtgtttaattgagagatttagagaatatacatgcaacctgggaaaagatttttagtctggctggcgggtttgagcgtactcggttttctggcaaccgatatgtatctgcctgctttcgccgccatacaggccgacctgcaaacgcctgcgtctgctgtcagtgccagccttagtctgttccttgccggttttgccgcagcccagcttctgtgggggccactctccgaccgttatggtcgtaaaccggtgttattaatcggcctgacaatttttgcgttaggtagtctggggatgctgtgggtagaaaacgccgctacgctgctggtattgcgttttgtacaggctgtgggtgtctgcgccgcggcggttatctggcaagcgttagtgacggattattatccttcacagaaagttaaccgaatttttgcgaccatcatgccgctggtgggtctatctccggccctggctcctctgttaggaagctggctgctggtccatttttcctggcaggcgattttcgccaccctgtttgccattaccgtggtgctgattctgcctattttctggctcaaacccacgacgaaggcccgtaacaatagtcaggatggtctgacctttaccgacctgctacgttctaaaacctatcgcggcaacgtgctgatatacgcggcctgttcagccagtttttttgcatggctgaccggttcaccgttcatccttagtgaaatgggctacagcccggcagttattggtttaagttatgtcccgcaaactatcgcgtttctgattggtggttatggctgtcgcgccgcgctgcagaaatggcaaggcaagcagttattaccgtggttgctggtgctgtttgcagtcagcgtcattgcgacctgggctgcaggcttcattagccatgtgtcgctggtcgaaatcctgatcccattctgtgtgatggcgattgccaatggcgcgatctacccgattgttgtcgcccaggcgctgcgctgagagatcccctcataatttccccaaagcgtaaccatgtgtgaataaattttgagctagtagggttgcagccacgagtaagtcttcccttgttattgtgtagccagaatgccgcaaaacttccatgcctaagcgaactgttgagagtacgtttcgatttctgactgtgttagcctggaagtgcttgtcccaaccttgtttctgagc

SEQ ID NO: 33 - DNA, 89904 bp, Escherichia coli
  source 1..89904: mol_type = genomic DNA
ggtaggccattttgtccagcacctgcgcaaattcaagggagagaaactgctggctgaccagggagagatcgagggaaaagagcgaagagagtgactggttcagatgaaaggaaaccaccgcaaaagcgtccggcggcaggccgtccacttccagtgtgaaacgtaatccggttgacatagcaacctccagtaaaatgaataatgatccgtaccgtacaactgcggataatgtgataagcgggacgacttcagacgttattagggaaggaacagaaaatgctatggttatgtgagaattttgtttaaatattactttacagaaacgggtgtctgttcagtcaaaaaaataatcacaagctcaacctcttgtttcttggcgttattcaggacaggtacgcatatcacaacgagtaacaaaaacgtaaagttaaaccaatattcataatatatttttattcacagcaataaataatccaattaacattattaaaatgaatgattgcataagaaatatatgctaccgctccaccctgataacatgatctgcacattgcacatcttaacgttgttaaatactggctcaatagtggatattttaaattaggaatttatcaaattcacttgataaatagattgagtgaataatataacaattaatgatgattaatcgcgattaaattattcattgctttatatgatagatggcttgtttataacgatgaaaatttagaaagggcattgtgatctacaattggaagaaacacagatttaactaagtttcatatacaaacatctcgtgaaactttgaaaaataaaagccttcgatatttcatatgtttaataagtttttctctaatttgttgatcaacaataccaggaggtgatgcaccacgccctgaatttgaacttaataatcactctctctccggcagcataatcacaaaccttgtcccccgcgcatctgacgttactgcaaccgtgcctttatgcgcgacaacaatcgatttcactatcgccagcccaatgccgctaccttcgccttttcgctggcgggaagggtcaacgcggtagaaacggtcaaacaatcgcggtaagtgctcgggcgcaatgggcgtaccggggttttcgacggtaacttgcacctggtgatcgaccgtctggcagcgcactacaattgcctctccgggcggcgtataacgcagggcattagaaagcaggttgcttaacgcccgacgcagcatcagcggatcgcccgcaacctgacattcgtcgccaacaaatcgcaactccacgccgcgatcttccgctaacgcctcgaaaaaatcgaacactttgccgacttcatccgccaggttgagcattttcttttcggggattagctggttgttatcggcctgagcgagaaacagcatatcgctgaccattttcgccattcgcgtcagctcttcgagattagagtagagcacatcttccagctccttctggctgcgagactggctgagggcgatttccgtttgcgtgatgagattggtaatcggcgtgcgaatttcgtgagcgatatccgctgagaaattggactggcgggtaaagacatcctcaatacgctcgatcatatggttgaacgacagtaccagctgttccagctcaatgggcacggtctgcgggtcaaggcgaacgtcgagatctttcgaggtgatattctggatttgacggctgacgctgcggatcggcgcgtgacctttatgtaccgccaacagtacgataaagacgatcaggatgctgattaccgatgcggtcataataagtttattcatcaaatcatttatgtaatgaagatgaaaatcgatcgaaagcgcgatgtagagcgtataaatcggtttgccgtccaccaacgggccaaccgacaagttaatcatccgccagttgctgtgttccatatgcccgtgaccgtggcctggcatcataatcgtcgggccggaaaggagatacacctcgccaccccgcgcgtctttatcgggtatggcatcacgtgcaaactcgcggatatcaggcgcaccgggggagtgatacaccgttttgccgtggctatctgccagggaaatcaacacgttggaataaccactgacgatatcttccagcgtcattaagcgtcgggcttgcgtttcgtcagggtgattaagtacccgttcaagcgtggcgctaatctcttttaaatcattaatatcctgctcggcaaaatgcacttttactgagtggatcatgatccatgcaaaggcgaaaaacgccgcgatggtggccaggctgataaaaaaggtcaggcgggttgccagcgaaaacgggcgctgaaatggcttactgaccatccggcacctcaagcatgtagcccacgccgcgcacggtctgaattagcttcggctcaaagtcgttgtcgattttgccgcgcagccgcttcaccgctacatcaatggcgttagtgtcgctgtcgaaattcatgtcccacacctgcgaggcgataagcgagcggggcagcacttcgccctgatggcggaggaaaaactccagcagagtaaactctttactggtcagagtgatgcgcgtgccgctgcgggtgactttgcggctgacgagatcgaccatcagatcggcaacctgaaactgactttcgataatcaccgccgccccgcgccgcaggagagtgcgcacccgcgccagcagttcagcaaaagcgaacggcttcaccagatagtcatccgcccccaactccagccccttgacgcgatgttcaatggtgccaagcgcggtaagcaacagaatcggcatccctttattggcggaacgcaacatgcgcacgatatcccagccgttcacgtccggcagcataatatcgaggattatcagatcataatcaccggtcatcgccagatggtagccattcaacccgttgtcggccaaatcgaccacaaaaccggcttcggttaaccctttggtcaagtattctccggttttcttttcatcttcgacaatcaacagtttcatatttcctccgcatgttgcccgggcaattctagagtagcgggatcagatggcaatcgcttattggcaaaatgacaattttgtcatttttctgtcaccggaaaatcagagcctggcgagtaaagttggcggcataaaatcaccagaaattatgagcctatgtctccttgtaaacttctgccattttgtgtggcccttgcgctaaccggttgttcactggcaccggattatcagcgtccggcaatgcccgtgccgcagcagttctcactcagccagaacggcctggttaacgcagcagataactatcagaacgcgggctggcgcaccttttttgttgataatcaggtgaagacgctgattagcgaggcgctggtgaataatcgggatttgcgcatggcgacgctgaaagtgcaggaggcacgggcgcaatatcgtctgaccgatgccgaccgctacccacagctcaatggcgagggcagcggcagctggagcggtaatcttaaagggaataccgccacgacacgggagttttcgaccggccttaacgccagctttgacctcgattttttcggtcgcttaaagaacatgagcgaagccgagcgacaaaattatttagccactgaggaagctcagcgcgcggtgcatattctgctggtttctaatgtcgcgcaaagctatttcaatcagcaactggcgtatgcgcaattgcaaatagccgaagaaacgctgcgtaattatcagcagtcatatgcgtttgtcgaaaaacaactgttgaccggtagcagcaatgttctggcgctggaacaggctcgcggggtgatagaaagtacccgcagtgacatcgctaaacgtcagggggaactggcgcaggcgaataatgcattgcaactgttattgggaagctacggcaagctgccgcaagcgcagacagtaaacagcgacagcctgcaaagcgttaaattaccggcgggcttgtcgtcgcaaatcttattgcagcgcccggatattatggaagctgaacacgcgttaatggcggctaatgctaatattggtgctgcgcgtgcggcatttttcccctctatcagcctgaccagtggaatatcaaccgccagtagcgatctatcctcattatttaacgccagcagcgggatgtggaattttattcctaaaattgagatccccatttttaatgccggacgcaaccaggccaatctggatatcgccgaaattcgccagcagcagtcggtagtgaattatgaacagaaaatccagaacgcctttaaagaagtggcagatgcgctggcattacgtcaaagcctgaacgatcaaatcagcgcccagcagcgttatctggcgtcgctgcaaattactttgcaacgggcgcgggcattatatcagcacggcgcggtaagttatctggaagtgctggatgccgagcgttctttatttgcaacccgacaaaccttacttgacctgaattatacccgtcaggtcaacgaaatttctttatataccgcacttggtggcggttggcagcaataatttttaactccaggagagaataaatgaaaaaagcactgcaagtcgcaatgttcagtctgtttaccgttattggctttaatgcccaggctaacgaacatcatcatgaaaccatgagcgaagcacaaccacaggtcattagtgccaccggcgtggtaaaaggtgttgatctggaaagcaaaaaaatcaccatccatcacgatccgattgctgccgtgaactggccggagatgactatgcgctttaccatcacttcgcagacgaaaatgagtgaaattaaaactggcgacaaagtggcgtttaattttgtccagcagggcaacctttctttattacaggatattaaagtcagccagtaacccaggtttaatgagatgaaaaaaatcgcgcttattatcggcagcatgatcgcgggcggtattatttctgcggcaggttttacctggtttgaccgggctgaaccgcccgcagaaaaaacgtcgaccgcagaacgtaaaatcttattctggtacgacccgatgtatcccaatacgcggttcgataaaccaggtaaatcgccgtttatggatatggatctggtgccgaaatatgccgatgaagagagttctgcgtctggtgtgcgcattgacccgactcagacgcagaatctgggggtgaaaacggctaccgtcacgcgcggaccgctgacttttgcccagagtttcccggcgaatgtcagttacaacgagtatcagtatgccattgtgcaggctcgcgctgccgggtttatcgacaaggtgtatccgcttaccgtgggcgataaagtacaaaagggcacaccgcttctcgacctgaccattcccgactgggtggaagcgcagagtgagtatttactgctgcgcgaaacgggcggtacggcgacccagactgaaggcattcttgagcggctgcgactggcgggaatgccggaggcggatattcgccgcctgatcgccacgcaaaaaatccagactcgctttacgctcaaagcacccattgatggtgtgatcaccgcgtttgatctgcgcgcgggaatgaatatcgccaaagataacgtggtagcgaaaattcagggtatggacccggtgtgggtcactgctgcgatcccggagtctatcgcctggctggtgaaagatgcctcgcagtttacgctcaccgttccggcacgaccggataaaacactcaccatccgcaaatggacgctgctacccggcgtggatgccgcgacccgcacgctgcagctgcgtctggaagtcgacaacgccgacgaggcgctaaaaccgggaatgaacgcctggttgcaactcaataccgccagcgaaccgatgctgctcattccgtcacaggcgctgattgataccggcaacgaacagcgggtgattaccgttgatgccgacggacgctttgtaccgaaacgcgttgccgttttccaggcatcgcaaggcgtcaccgcgttacactctggtctggcggaaggtgaaaaggtggtttccagcggcctgttcctgattgattccgaagccaatatttctggcgcactggagcggatgcgctctgaaagtgctacccatgcgcattgagggaataaccaatgattgaatggattattcgtcgctcggtggcgaaccgttttttggtgctgatgggcgcgttgtttctgagcatctggggcacctggaccatcattaatacgccagtggatgcgctgccggatctctccgatgtgcaggttattattaaaaccagctatcccggtcaggcaccacaaatcgttgaaaatcaggtgacttatccgctaaccaccaccatgttgtcggtgcctggcgcgaagactgtgcgcggtttctcacagtttggcgactcttatgtgtatgtcattttcgaagatggcaccgctccgtactgggcgcgttcgcgggtgctggagtacctcaaccaggtacagggtaagctgcctgcgggagtcagcgccgagctggggccagatgccacgggtgttggctggatctatgaatatgcactggtggatcgcagcggtaagcacgatctggccgatttacgctcattacaggactggtttctcaaatatgagctgaaaaccatccctgacgttgcggaagtggcgtcggtgggcggtgtggtgaaagagtatcaggtggttatcgatccccagcgcctggcgcagtatggcatcagtctcgccgaagtaaaaagcgcgctggatgcttcaaaccaggaagcgggcggttcgtcgatcgaactggcggaagcggaatatatggtgcgcgccagcggctatctgcaaacgctcgacgactttaatcacatcgttttaaaagccagtgaaaatggcgtgcccgtttatctgcgcgatgttgcgaaggtccagattggcccggagatgcgccggggcattgccgaactaaacggcgaaggcgaagtggcgggcggggtggtgatcctgcgatccggcaaaaacgcccgagaagtgatcgccgccgtgaaggacaaactggaaacgctgaaaagtagtctgccggaaggcgtggagatagttacaacatacgatcgcagccagctcattgaccgcgccatcgacaacctcagcggcaagttgctggaagagtttattgtggtggcggtagtctgtgcgctgtttctctggcatgtgcgctcggcgctggtggcgattatttcgttgccgctggggttgtgtattgcttttattgtcatgcacttccagggactgaatgccaatattatgtcgttgggcggcattgcgattgccgtcggggcgatggtcgatgccgctatcgtcatgatcgaaaatgcacataaacggctggaagagtggcagcaccagcatcctgacgccacgctggataataaaacgcgctggcaggtgatcaccgatgcgtctgttgaagtggggccggcgctgtttatcagtctgctgattatcacgttgtcgtttatcccgatcttcaccctggaagggcaggaagggcgtctgtttggcccgctggcgttcactaaaacctatgcgatggcgggtgcggcgctgctggcgatcgtagtgatccctatcctgatgggttactggatccgtggcaaaattccgccggaaagcagtaacccgctcaatcgctttttgattcgtgtttatcatccgctgttgctgaaagtactgcactggccgaaaaccacgctgttggtggcagcgctttcggtgctgacggttctctggccgctcaataaagttggcggggaatttttaccgcagatcaatgaaggcgacctgttgtatatgccatcgacgctgccggggatttccgcagcagaggcggcgagtatgctgcaaaaaaccgacaagctaattatgagcgtacctgaagtggcgcgggtatttggcaaaaccgggaaagcggaaaccgccaccgattctgctccgctggagatggtagaaacgaccatccagcttaagccgcaggatcagtggcggcctggcatgacgatggacaaaatcattgaggaactggataacaccgtgcggctgccggggctggcgaatctgtgggtgccgccaattcgtaaccgtatcgatatgctctcgactggcattaaaagccccatcggcattaaagtttccggcactgtgctggcggatatcgacgcgatggcggagcaaattgaagaggtggcacgaacggtaccaggcgtggcttctgcgcttgccgagcgtctggaaggtgggcgctatatcaacgttgagattaaccgtgaaaaagccgcgcgttacggtatgacggtggcggatgtgcagttgtttgtgacttctgcggtgggcggggcgatggttggcgaaacggtggaagggattgcccgttatcccattaatctgcgttatccgcaaagctggcgcgatagtccgcaggcactgcgccagttgccgatcctgacgccgatgaagcagcaaatcaccctggcagacgtggccgacgttaaagtctctaccggaccgtcgatgctgaaaaccgagaatgcgcgcccgacgagctggatttatatcgatgcccgcgatcgtgacatggtgtcggtggttcacgatttgcaaaaagcgatagctgaaaaagtgcagttaaaaccgggcaccagcgtggcattctccgggcagttcgagctactggagcgcgccaaccataagctgaaactcatggtgccgatgacactgatgatcatcttcgtgctgttgtatctggcattccgtcgggtgggcgaagcgttgctgattatcagcagcgtaccgtttgcgctggtgggcggcatctggttgctgtggtggatgggctttcatctttccgtggcgacgggtactggctttattgcccttgccggggtcgccgccgaatttggcgtggtgatgctgatgtatttacgtcacgccatagaggccgagccgtcgttgaataatccgcaaacattcagcgagcagaagctggatgaggcgttatatcacggcgcggtcctgcgcgtgcgcccgaaagcgatgacggtggcggtgattatcgccggtctgctgccgattctgtggggaacgggggctggttcagaggtgatgagccggattgccgcgccgatgattggcggcatgatcaccgcacctttgctgtcgctgtttattatcccggcggcgtataagctgatgtggctgcaccgacatcgggtacggaaataaaagcaggataccccgtttaaccgtgtggattgtgtcttgcgacgatgggcactaaatgttaaaaggtgcccctcaacaaaaaagacacacaggggaaaggcgtgaaaaacgcgtcaaccgtatcggaagatactgcgtcgaatcaagagccgacgcttcatcgcggattacataaccgtcatattcaactgattgcgttgggtggcgcaattggtactggtctgtttcttggcattggcccggcgattcagatggcgggtccggctgtattgctgggctacggcgtcgccgggatcatcgctttcctgattatgcgccagcttggcgaaatggtggttgaggagccggtatccggttcatttgcccactttgcctataaatactggggaccgttcgcgggcttcctctctggctggaactactgggtgatgttcgtgctggtggggatggcagagctgaccgctgcgggcatctatatgcagtactggttcccggatgttccaacgtggatttgggctgccgccttctttattatcatcaacgccgttaacctggtgaacgtgcgcttatatggcgaaaccgagttctggtttgcgttgattaaagtgctggcgatcatcggtatgatcggctttggcctgtggctgctgttttctggtcacggcggcgagaaagccagtatcgacaacctctggcgctacggtggtttcttcgccaccggctggaatgggctgattttgtcgctggcggtaattatgttctccttcggcggtctggagctgattgggattactgccgctgaagcgcgcgatccggaaaaaagcattccaaaagcggtaaatcaggtggtgtatcgcatcctgctgttttacatcggttcactggtggttttactggcgctctatccgtgggtggaagtgaaatccaacagtagcccgtttgtgatgattttccataatctcgacagcaacgtggtagcttctgcgctgaacttcgtcattctggtagcatcgctgtcagtgtataacagcggggtttactctaacagccgcatgctgtttggcctttctgtgcagggtaatgcgccgaagtttttgactcgcgtcagccgtcgcggtgtgccgattaactcgctgatgctttccggagcgatcacttcgctggtggtgttaatcaactatctgctgccgcaaaaagcgtttggtctgctgatggcgctggtggtagcaacgctgctgttgaactggattatgatctgtctggcgcatctgcgttttcgtgcagcgatgcgacgtcaggggcgtgaaacacagtttaaggcgctgctctatccgttcggcaactatctttgcattgccttcctcggcatgattttgctgctgatgtgcacgatggatgatatgcgcttgtcagcgatcctgctgccggtgtggattgtattcctgtttgtggcatttaaaacgctgcgtcggaaataaggcattcacgctacatccgacaaaacgatgtccgctctcatccattcgatgagagcggtttttttaattactgcttaaatgcacccgccagagagcgaatatcattgccggttggcgactgatgaagtcgcagaccaaactcttcgacaatcgcaaatatgtgatcgaatatatcagcctgaatgctttcatattccagccacaccacggtgttagtaaacgcgtagatctcgagcggtaaaccgttatcacctggagccagttggcgtaccattaaggtcatatctttacgaatccgcggatggttacgcagatattcgttcagataggcacgaaaggttccaatattggtcattcggcgcaggtttaatatcgactccgtagaaccttgctggcgattccactcattaatttcctgatggcggctggttaaataaggttttaacaagtgcgctttattcagacgttgcatttcgtcttcatcaagaaaacgaatactggtgacatcaatactgatactgcgcttaatacgtcgcccgccagatgctgacatcccgctccagtttttaaaggagtcagaaaccagagaccaggtgggaatagtggtaatggtattgtcccagttacgcactttgacggtggttaacccaatatcgatcaccgcgccatccgcgccgtatttcggcatctccagccagtcgcccagtttcagcatatcgttcgcggaaagctgaatacctgccaccagaccaagaatcggatctttaaaaaccaacatcagcacggcagccattgcaccaagaccgctgatcagaatcgctggcgactgaccaatcagcagcgagatcatcaaaatgccgaccaggattgcgccgatcagtttaatcccctgaaatatccctttcagcggtaactgagatgccgccgggaatttctgcgccagattcaaaataacatccagcaacgagaagactgaaagcagcgcatacatcatgatccacaactgcgcgcaggtagtcagaatatctgccgcttcggtgcctttttgcagccagaataccgcctgaatattgacgataatcccctgcagggtaaaagctaaacggtggaagagtttattctgggtaatgatttgcaaccaaagccgtgaactggcgatggcacgtttttcgaaggtccgcagtaccacccaatgcaaaataatatgcaccacgacggcggtcagaaaaataataccgaaaatcatcaccatcgaggtggtgtgatcgatctcaatacccgctaaatcttcaacctgggatattaaatcctgcataacgtctcctttatacaacagcagcctatgatgacggctgaaacagggttatgcaaatcaggagaatctgaggggaaatagccgggcagatgcccggcaagagagaattacacttcggttaaggtgatgttttgcggcagacgagatttcggcagcgtagcgttaaaatcttcaacgctgtgatgacctaccggaacaaccaccagactggtgtagcctttctctttcagaccaaattctgcatcgaggatggcggcgtcaaaaccttcgatgggtaccgcgtccagacccagcgccgccacgccgagcaggaagttaccgacgttgagataaacctgttttgccatccactctgcatcatcatgcagatctttacagtgcatatcagcgaagaacttgcgacctttatcgttcgcggctttcgcttccggcgtggcaaagcggccatcagcatcttcctggtcaacaaccagcttcagccaggcatcgtccatcgcggtttttgcacagaacaccacgacgtgcgaggcatcaagtattttacgttcgttgaacacataattaccggcagcggatttggcaacacgcgctttaccttcttccgtgctggcaacaataaaatgccacggctgggagttggtgctggatgggctgtattgcaggagagttttgatctgctcggcctgttccggggtaagttttttactggcatcaaatgccttagtggaatgacgctttaaggcgacagaaatgatatccataaagactccatgtgaaagtaattttgcgtgccagcagattacaaggttcaacgagaaatggtaagcgagaaaaatgcgctatagatttccgctttagcctggacgcactcttttttgatcgcgtttagccagaccatcaaccaccagattccacgaatcgttgatcagatcgcgaagtaacgcttcggagatttcctcgccgggatacaccgaaatccagtgctttttattcatgtgataccctggcttaatgctcgggtatatctgctgatttaacagggatttttgtggatcggacttcagattgataaaggggacgccgcgcagctccgacgacagcataaaaattttgccgccaattttaaaaacatcgaactccgggccaaaaggccagcaaagctcgacaaagggtaactcaagggccaggcgtttcgccgtttcgtgcagtgattgcttatccataaacgttcctttaggcgaaggagaataagcaaagtatgccgcgaagtacggcgataatcgacgtttaatccgccagcgagaaccagcgtcgccagataaagcgcagaacaaaatactcaatagcgcccagcactaaaaaccacagacaaaacaataaagtgtaaagctggctaagatccatcagatggaacatggtcaccagtttttgtgccagcgtcagccccagtgcgggggcgggcagcagcaggcaagagaggaaagccatcagcaaaatgcctgctgcggtagtcaaggtttctaaagggtgtttcataacattgttaaatgtaagttaaaacaccattgtcagggatattcttctgtaaggcaattccctacttagtcaccggcccagatctcacaatgctttttcaccagcccaatcagcgagccaccatcggcgacgaaatcgcgcatcagctgcgcttcattcagaccgctgacgacctggcgatgcagggcctcaatcgcgctcgatgcacccattttatgtgcggaaggggcgattttttccagcaatcgcaaggtatcttccgttagcggtcgacgatcgccagtgtgcggatcggtaatgacgccttccagcccatagcggcaggcctggaaacggttgaatttatacagcaggtaatctttctcctgatgtttaaacgggcgttccgtcagtaaccagtgggcggtggcctgaattaatcccgccatatttaccgcgtggctaagggttaacggggtatccatcacccgaacctccaccgtgccaaaatgaggactggggcgaatatcccagtgcagatctttaatgctgtcgatcatcgtggtgtaactcaggcagcgaaacagggcttcaaattgttgccagttactgacccacggcatcgggccattatcgggaaaggcggaaaaaatattcggtcgtgaggaggcaaaacgcgtatccgttccctgcatatacggcgacgcggcggaaagggcgatgaagtgcggcacaaaccgtgacaggccgtgcagcaaataaatggcgtcatcgccactggcgcagccaacatggacatgctgaccaaaaacggtcgcctgctggatgagatagccaaagttttccagcgttcgttgatagcgttcgttgtcgcatacctcctgacgctgccatttctgaaacgggtgcgtgccaccgccgcaaatttccagatgatggtctgcggctgcctgcaatacgactttctgcatcgctgaaaactgcccggcagcctggttgatatcacggcaaacatccgtcgccagctccagcatactttcggtgatatcgtgctttacctctccggccgtgatctcatttttaaccgcgtcaatcagcattgaagagtcctggcttaagtcatagcccggcggattaaccacctgcatttccagttcaataccgagggtaaaaggttcagaaacatgaaaatcgggtaatggcataggtttctcttaagttggcgttttctattcagtatagaagtcggagcggctgggcgagatgcggaagttctggaatgtttctttttttggtgatggtgactgaagcaatttggctacttttgcaatgtgacaagttatggcacggctggctggtggcgaagaattttgacgattgaggcatgcagaaaaaaacgggttcagcttcagttgatcaaatggggagtgagaagtccgaaacaggacttactgtataaataaacagctattttgctaagcaagggtaagataactgcgggtgcctgaagctttccggtttcaggtttactctgaggtctggaaagatgaagccccaggacgatatttctatcaaccctggggctacctacccaaacctgaacaatttggatggtagtcccttcttcgcatggaggcaatataaacatgctgacgaaatatgcccttgcggcagtcatagtgctgtgtttaacggtgctgggatttacgcttctggtcggggattcgctgtgtgagttcaccgtaaaggaacgtaatattgagtttaaggttgttctcgcttacgaaccgaagaagtagccgttgtgcggggagcaatccccgcatatccggttgtcaggtcaggatggtaaggcacctgctttacactttcgcccgcggtcagtgatggctgcgggcgatttcgttttaagagcaatgatgagttttgccgacagaagtccgaaacaggattcactgtataaataaacagctattttgttgaggaagggtaagataacggcgggtgcctgaagctttccggtttcaggttaactctgaggtctggaaagatgaagccccaggagatatttctatcaatcctggggctgccactccgagcctcaacaactcggatggtagtcccttcttcgcatggaggcaatataaacatgctgacgaaatatgcccttgtggcagtcatagtgctgtgtttgacggtactgggatttacgcttctggtcggagactcgctgtgtgagttcaccgtaaaggaacgtaatattgagtttaaggctgttctcgcttacgaaccgaagaagtagccgttgtgcggggagcaatccccgcatatccggttgtcaggtcagagtggtaaggcacctgctttacactttcgcccgcggtcagtggtggctgcgggcgaatcgtaccagatgttgtcaattaatcgtgttggcacagagttatgactattttttcttttatctgccagtgcacagcaaacatctcattctcacgatgaatgatgacctgctgtttattccagctaattatctgatagtccagaaaacctgcatcagtttggatctcacttgccttaaatgcgctctctttggcggaaaatgccagtgtcagcgccagagaaaaggctaaaccgcagtctgcgagtcgctcgtgttctgctggtgtaataatgttgtctgtcaattcggtcgctgtttgcgcagaaaaaatttcttcgatatcaacgccaatcggttgacgggaaaccacggccaatgccgtagccccgcagtggctaatactgccgtatacctccgcaggccacaccggttggcgtagctcgccgattgcgggcacacatttatagccatattcccgcagcgcataaattgcagcgatccgcccggctaaatgttcggctttgcgcttccgtccagcgtgttgcagttgcgcgtaatgcggcagccagagtaaatcctgctcacaaaaattcgccggatcgaactcaacaaaatgcagcgtatgtccggcaaaggggagggaggtatgcgtagttttcatgtcgaccatattagagactgatgacaaacgctaaactgcctgatgcgctacgcttatcaggcctacatggtcctgcaatatattgaattggcaagatttttgtaggccggataaggcgttcacgccgcatccggcatgaacgacgcgcactttgtcaacaatctgacgttagcatcagaagtgagtgtttacgctcatgtaccacgtacgtcccggctcgttataggtatacgccccggcacccgcgatatagttggcccctgccagatcgcccgtggtctgggcattacccgcacgccacaaacgtttgtcgaacaggttgtccacgccgccggtcagactgacattcttcgtcacatcccaggtcgcgctcagacccacaatgctgtaaggactgatttctttggtttccgggccaaccgctggctgacctttgtagttgtattttttcggctgctgcttaccgtaccaggtgaaggtcgtttgcatcgacaaatcttcccgcgcctgccagctcagcgttgagttcaacgtgtactccgggatgatcgacaaacggtcgcccgtggttttgttttcactcttcagcatataagtgatgttattggtccacatcaccgtttcgctaactggtacgtttaacgatccttccagaccttcaaccactgctttcggcacgttatcccactgatagagatcggtgccgactgcgttttgccctacagccacatagcccgcttcaatcttattgcgataatcgttacggaaccaggtgacgcccgccagccagccgtcgcgtttgaactccagaccaatctctttgttgatgctggtttctgctttcaggtcatcgttaccttgcagatagcagccgcccgcgctggcatagcagccctgacctttactgtagagaatgtagttcgggttagtctggtacaggctcggtgctttataagcacgggcaatgcccattttgagcgtgaagtcatcgcctaaaccttgcgatatgttcagcgccgggctccagttattgccgacaatactgtgatgatcgaaacgcagccccggcgttacgatggtgctgtcagtcagctccatgttgttttcggcaaacagcgagaaaatttctgcttttgaatacgggctacggtcggtggcactcacaccatcaatagcgccgccggtgttcgccccggtcagcgcctgggtattggaactcaagtccttcatccgttgctgattccactccgtacccagcgtcagcgtctggttaacgaggaaatcaatcggcaggttaacttcgctgtgcagcatcacgtcatcgagatcgatatcgacgaaatcctgtgtcgctttttcgttaaatttcccttcggtaccgcccgccagaccttccggaatacgcgagttacgggtgtgttcatactgcacccagttgctggtggtcacgccgttatcccagccaccgttccaggtcagcgcgtagttctggcgatacaggcggttggtttcatcgccatatttcgagcgagtgtaagcgtcagagttggtgttctgggtatcgcccgcatacaggttaccctggcggctgtaacccgcttccagttccagcgattgcaatggtgcgaagtcccagcgcaccacgccgttaatatctttattgatcaccccttcgcgcccggctggtaacgtcgtggcatacgttccggcacgcgcggactgatggccctggttgatatcccacgcgtcagcctgggttttgtcgaggttgccatacaagcggaagctgaattcgtcgcccagcggaccggtcaggctgaagttggtgcgtttagtggcaccttcctctttatgttctggtgcattgaaataagcgtcccaggagccgtgccactcaccgctgccttttttggtaatgatgttaaccacgccgcccgccgcgccgttgccataacgcgcagctgccggaccacgcagaacttcaatacgttcaatcatttcaggtggcacccaggaggtatcaccacgggtatcgcgctcgccacgccagccctgacgcaccgagttacggctgcttaccggcttgccgtcaatcaaaatcagcgtgttttccggacccataccgcgaatatcaatctgtcggttattcccacgctgaccactggtggagttaccggtcaggttaacgcctggcatggtacggatgatctccgacacatcgcgggcaacggggtttttgcggatttcatctgcggtgatggtcgaaacgccaggcgcctgtaagttctgctcggcggcggtaacgacaatggtatcgtcatgtgaaacaggagtatcggtcggctcttgtgcctgcgctaccccataaatccccagattgaccaacaaggccagggaatgaatcttcttgttcattgttttattcctgcatttttgccacgaattgcaactgtcgggcatggtcgtcctcaacacgacgcatcccgctaccgcgaaaacctttgatcctgaaagacacgcagtgcagttggttaataaatgtccgcgcttcccacggcgcgccattacgctattgcaaatgcaaatagttatcaataatattatcaatatatttctgcaatcaatgaaaaattgcacagtaaacatggggttatggtgtgacggcgttaaaagtaggaagtgagagctggtggcagtcgaaacatggcccggaatggcagcgtctgaatgacgaaatgtttgaggtcactttctggtggcgtgatccccaaggttctgaagaatactcgacgataaagcgcgtatggatctacatcactggtgtgaccgatcatcatcagaacagccagccccagtcgatgcagcgaattgcaggtactgatgtctggcagtggacgacacaactcaatgccaactggcgcggcagctactgctttattcccaccgaacgcgatgacattttttctgcaccatcccccgatcgcctcgaattacgtgaaggctggcgaaaactattaccccaggcaatagccgatccgctgaatccacaaagctggaaaggcgggcgagggcacgctgtttctgcactcgaaatgccgcaagcgcctctgcaaccgggatgggattgtccgcaagcgccagaaatagcagccaaagaaattatctggaaaagtgaacggttgaaaaattcacgtcgtgtatggatttttaccaccggcgatgtaacagcagaagaacgtccgctggcagttttgctcgatggcgaattttgggcgcaaagtatgcccgtctggcctgtgctgacttcgctgacccatcgtcagcaacttcctcccgccgtgtatgtgttgatcgacgctatcgacaccacgcaccgcgcccacgaactgccgtgtaatgcggatttctggctggcagtacagcaagagttattacccctggtgaaagctattgccccttttagcgatcgcggcgatcgcaccgtggttgccgggcagagttttggtgggctgtccgcgctgtatgccggactgcactggcctgaacgctttggctgtgtattaagccagtcaggatcgtactggtggccgcatcggggcgggcagcaagagggcgtgttacttgaaaagcttaaagctggtgaagttagcgccgaaggtctgcgcattgtgctggaagcgggtattcgcgagccgatgattatgcgggccaatcaggcgctgtatgcgcaattacaccccataaaagaatccattttctggcgtcaggttgacggcggacatgatgcgctttgttggcgcggtggcttgatgcaggggctaatcgacctctggcaaccacttttccatgacaggagttgaatatggcattcagtaatcccttcgatgatccacagggagcgttttacattttgcgcaatgcgcaggggcaattcagtctgtggccgcaacaatgcgccttaccggcaggctgggacattgtgtgtcagccgcagtcacaggcgtcctgccagcagtggctggaagtccactggcgtactctgacaccggccaatttcacccagttgcaggaggcacaatgagccagcatttacctttggtcgccgcacagcccggcatctggatggcagaaaaactgtcggatttaccctccgcctggagcgtggcgcattacgttgagttaactggagatgttgatgcgccattactggcccgcgcggtggttgtcggactagcgcaagcagatacgttgcggatgcgttttacggaagataacggcgaagtctggcagtgggtcgatgatgcgctgatattcgaactgccagaaattatcgacctgcgaaccaatattgatccgcacggtactgcgcaggcattaatgctggcggatttgcaacaagatttgcgcgtcgatagcggtaaaccactggtctttcatcagctgatacatgttgcggataaccgctggtactggtatcagcgttatcaccatttgctggtcgatggcttcagtttcccggccattactcgccagatcgccaatatttactgcacatggctgcgtggcgaaccaacgcctgcttcgccgtttacgcctttcgctgatgtagtggaagagtaccagcaataccgcgaaagcgaagcctggcagcgtgatgcggcattctgggcagaacagcgtcgtcaactgccgccgcccgcgtcactttctccggcacctttagcggggcgcagcgcttcggcagatattctgcgcctgaaactggaatttaccgacggggaattccgccagctggctacgcaactttcaggtgtgcagcgtaccgatttagcccttgcgctggcagccttgtggctggggcgattgtgcaatcgcatggactatgccgccggatttatctttatgcgtcgactgggctcggcggcgctgacggctagcggacccgtgctcaacgttttaccgttgggtattcacattgcggcgcaagaaacgctgccggaactggcaacccgactggcggctcaactgaaaaaaatgcgtcgccatcaacgttacgatgccgaacaaattgtccgtgacagcgggcgagcggcaggtgatgaaccgctgtttggtccggtactcaatattaaggtatttgattaccaactggatattcctggtgttcaggcgcaaacccataccctggcaaccggtccggttaatgaccttgaactggccctgttcccggatgaacacggtgatttgagtattgagatcctcgccaataaacagcgttacgatgagccaacgttaatccagcatgctgaacgcctgaaaatgctgattgcccagttcgccgcggatccggcgctgttgtgcggcgatgtcgatattatgctgccaggtgagtatgcgcagctggcgcagatcaacgccactcaggttgagattccagaaaccacgctgagcgcgctggtggcagaacaagcggcaaaaacaccggatgctccggcgctggcagatgcgcgttacctgttcagctatcgggaaatgcgcgagcaggtggtggcgctggcgaatctgctgcgtgagcgcggcgttaaaccaggggacagcgtggcggtggcactaccgcgctcggtctttttgaccctggcactccatgcaatagttgaagctggcgcggcctggctaccgctggataccggctatccggacgatcgcctgaaaatgatgctggaagatgcgcgtccgtcgctgttaattaccaccgacgatcaactgccgcgctttagcgatgttcccaatttaacaagcctttgctataacgccccgcttaccccccagggcagtgcgccgctgcaactttcacaaccgcaccacacggcttatatcatctttacctctggctccaccggcaggccgaaaggggtaatggtcgggcagacggctatcgttaaccgcctgttatggatgcaaaatcactacccgcttacaggcgaagatgtcgttgcccaaaaaacgccgtgcagttttgatgtctcggtgtgggagtttttctggccgtttatcgcaggggcaaaactggtgatggctgaaccggaagcgcaccgtgacccgctcgctatgcagcaattctttgccgaatatggcgtaacgaccacgcactttgtgccgtcgatgctggcggcatttgttgcatcgctgacgccgcaaaccgctcgccagaattgcgcgacgttgaaacaggttttctgtagtggtgaggccttaccggctgatttatgccgcgaatggcaacagttaaccggcgcgccgttgcataacctgtatggcccgacggaagcggcggtagatgtcagctggtatccggcttttggcgaggaactggcacaggtgcgcggcagcagtgtgccgattggttatccggtatggaatacgggtctgcgtattcttgatgcgatgatgcatccggtgccgccgggtgtggcgggtgatctctatctcaccggcatccaactggcgcaggggtatcttggacgacccgatctgaccgccagccgttttattgccgatccttttgccccaggtgaacggatgtatcgtaccggagacgtcgcccgctggctggataacggcgcggtggagtacctcgggcgcagtgacgatcagctaaaaattcgcgggcagcgtatcgaactgggcgaaatcgatcgcgtgatgcaggcgctgccggatgtcaaacaagccgttacccacgcctgtgtgattaacctggcggcagccaccggtggtgatgcgcgtcagttggtgggctatctggtgtcgcaatcaggtctgccgttggataccagcgcattacaggcacagcttcgcgaaacattgccgccgcatatggtgccggtggttctgctgcaacttccacagttacctcttagcgccaacggcaagctggatcgcaaagccttaccgttgcctgaactgaagacacaagcgtcgggacgtgcaccgaaagcgggcagtgaaaagattatcgccgcggcattcgcgtcgttgctgggttgtgacgtgcaggatgccgatgctgatttctttgcgctgggcggtcattcgctactggcaatgaaactggcagcgcagttaagtcgacagtttgctcgtcaggtgacgccggggcaggtgatggtcgcgtcaaccgtcgccaaactggcaacgattattgatggtgaagaggacagctcccggcgcatgggattcgaaaccattctgccgttgcgtgaaggtaatggcccgacgctgttttgtttccatccggcatccggttttgcctggcagtttagcgtgctctcgcgttatctcgatccacaatggtcgattattggcattcagtcgccgcgccctcatggacccatgcagacagcgacaaacctggatgaagtctgcgaagcgcatctggcaacgttacttgagcaacaaccgcacggcccttattacctgctggggtattcccttggcggtacgctggtgcagggtattgcggcgcgactgcgtgcccgtggcgaacaggtggcatttcttggcttgctggatacctggccgccagaaacgcaaaactggcaggaaaaagaagctaatggtctggacccggaaatgctggcggagattaaccgcgagcgcgaggccttcctggcggcacagcagggaagtacttcaacggagttgtttaccaccattgaaggcaactacgctgatgctgtgcgcctgctgacgactgctcatagcgtaccgtttgatggtaaagcgacgctgtttgttgctgaacgcacgcttcaggaaggtatgagccccgaacgcgcctggtcgccgtggattgcggagctggatatctatcgtcaggattgtgcgcatgtggatattatctctccaggggcgtttgtaaaaattgggccgattattcgcgcaacgctaaacaggtaaattaataatatctataaacccataattacagaaaataattatgggtttttttatttgtttgatttataggtttgatgaatatttctcttaaatagagtgaatgttgcattcagtggaaggaatttacaaacttcagcttcggataattctcaccaactggtaaagtgagcgccgtggagattttcccctattggactcattttcaggttataccccatgtcatcattgaatattaaacagggaagtgacgctcatttttctgagtatcctctggcgtcgcccagtaataatgaaattgatttacttaatctaatcgcagttttatggcgggccaaaaaaacggtcatggcggtcatttttgcgtttgcctgcgcaggcttgctgatctctttcatcctgccgcaaaaatggaccagcgcggcggttgtcacgcctccagaacctgttcagtggcaagagctggagaaaacattcactaagcttcgagtgctggatctggatatcaaaattgatcgtacagaagcatttaacctgtttatcaagaagtttcagtctgttagcttgctggaagagtacctgcgttcatcaccttatgtgatggaccaattaaaagaggcgaaaatcgatgaactggatttgcatcgcgctattgttgcattgagcgaaaaaatgaaagcggttgatgacaatgccagtaagaaaaaagatgaaccgtcactgtatacctcctggacgctaagttttaccgcgccaaccagtgaagaggcgcagaccgttttgagcgggtatatcgattatatctctgcgttggtggtgaaagagtcactagaaaacgtccgtaataaactggaaatcaaaacccagtttgaaaaagaaaaactggctcaggatcgcattaaaacgaaaaatcaacttgatgcaaacattcagcgcctcaattattcactcgacattgccaacgcggcgggaattaaaaagcccgtatacagtaatggtcaggccgttaaagatgaccccgatttctctatttctctcggcgcagacggtattgaacgcaaactggaaattgaaaaagcggtcactgacgttgcggaactgaacggtgaattacgtaatcgtcagtatcttgttgagcagttaacaaaagcaaatatcaacgatgtgaattttacgccgtttaaatatcagttaagcccgtcattgccagtgaaaaaagacggtccgggtaaggcgattattgtgatcctttccgcgctgatcggcgggatggtggcttgtggtagcgtgttattgcgctatgcgatggcatccagaaaacaggatgccatgatggcagaccacttagtttaactatttgcggttgaaggtgccgttcgtccgagcggcaccacaagcggcgttccggctaccggatcgtcaatgatcatgcatcgcagaccataaatgcgctcaatcagttcagcagtgacaatctccttcggcgctccctgagcaacaattttcccttcccgcaatgcaatcaaatggctggcgtaacgacaggcctgattaagatcgtgcagcaccgccgccagggtatagcctttctcgcggttcagttcgcttaacagttccagtagatcaatctgatgactgatatccagccaggtcgtgggttcgtcgagcagcataattgccgtttcctgggccagcaccatcgcgatccacgcgcgctggcgttgtccgccagaaagggtatccacgctttgatctgccagatgagttattcccgtggcctgcatcgctttcgttaccgcttcttcatcttctttgcgccagcgggtaaatagcggttgatgcgggtaacgcccacgcgccaccagctcctgcacggtgatatcgcctggcgtggtagcattttgcgccaacagaccaatccggcgtgcaacctctttactggcgtaatgttgaatgtgctcgccatccagccagacatgcccgtgagcaggcgtcatcaggcggcttaaagtacgcagtaaagtggatttaccgcagccatttggcccgataattgccgtgaagtgaccatcaggtatttctacagtcagattttccgcaacggtatatttgccatatccgagggttaactgttcgccgcgcaaacgggctacagattcgttcattttttgcgagactcctgaattaacaagacgataaggtaaataccgccgaggctgacggtaacgacgccaaccggaagttgatacggcataaacagttgttgggcgcagagatcggccgccagcagtaacagcgccccgcacagcgccgcctgggtcagcccccagcgagcggtgccgctaatgcgtcgggcaatgtgcggcgcgactaaagcaataaaggaaatcggcccggcaagcgcggttgccgcagcggtaagcaccactgcaaccagcatcattaacagacgcgaacgttcgacgctgacgcccagcgcacacgcggtatcatcgcccatttccagcaagcgcatccggcgtaccagtaaggcggcggcaatgagcatcaatataatgatgggtgcggaaggcgaggtttttgcccacgtcaggccgttgagcgatcctgcattccacaaacccgctgttagcgccgtttctaaagacgctttcagcaacagccaggtattaaaggccaccagcatggcacgaacgccgataccgataataatcaaccgaaaggtgtcgatgccgttacgccaggcgagcagccagaccagcagcgaagtgacaatgccgcccaccattgctgccagcgcgatagccgtcaggtcctgaccaaacagcaccatcgctaccagcacgccgctccacgccccggtgttaaagcccattacgtcagggctgccgagcgggttacgcatcagcgactgaaaaatcgcgccgctgacgcccagtgccgcgccaatcaacagcgccatcagcacgcgtggtaaacgccattcggtgaccaccatcgtcatactgcgcggcgcatcgcccatcagcgcggcgaatacctgcgaggtttccagcgtgacggcaccgctgcgtaatccccagatacctgcaaccacacaggcggaaaccaacagcaaacaggtgatgattaatcggcgagagacgtaaatcatgcgccacctcgcgttttacgtcgcacgaggaagatcagcaccggtgcaccaataaacgcactgaccacagaaacgcgcagttcgccgggcacaatcacccgcccgatgatatcggcaaacagcagcagggcaggggtagcaagtagcgtgacgggcagcgaccagcgatgatcggcacctaccagccagcgcgccatgtgcggcatcatcaggccgataaaggcaatcgggccaactaccgccgtcgcactaccacaaagcacggtaatcgccagcagaccaattaactgtgtgcgcgccacgcgactgcccagcgccgtcgcggtgtcgctgccgaggcttaaactgttcagcgcgcggctcagtaatagcgcggttgctccggcgatcagcaccgggatcagcaccacttttaaggtatgtagattgcgaatatccagcgaaccggcttgccagaaacgcagttgatcgtagacatcaggattaagcagggcgatgccgctggtcagcccttccagcaccgccgccagcgccacgcccgccagggttaaacgcaccggacttaactgcccgccgccctgactgccggtaaaggcaacaatcaatgaggccaccagcgccccggcgaaggccatcgccagttgttcctgcgcggatgagtaaccaaacagcgccgcacccagcacaatggcaaagctggctccggcattcacgccaagcaagccggggtcggcaagtggatttcgggtgagggtttgcatcaacgccccggcaaggccaagcgcgccgcctgcaagtaaaccggcaagggtgcgcggcagtcgcgcgtcgagcacgatggtgcagtcggcgctctggcaggtgccggagagggcctccagcactacggaagcggggagtgattttgccccaatgagcaggcttaatgccgtcgcgataatcagtaataacagcaatccgggcacggcaatggcgcgtgtcacggcaacagaaccagacatacgaacttccatgataatgaaattaattatcgttatcgatcttatttggatatgttagcatgtgcagcctaagaataggtatttaaaatatttgatggcaaggcattgtaatgaataaacaatcctggctgcttaacctcagcctgttgaaaacgcacccggcgtttcgcgcagtattcctcgctcgttttatctcaattgtgtctctgggtttgctcggcgtcgcggtgccggtgcagatccagatgatgacgcattctacctggcaggtggggctttcggtgacgctgaccggcggcgcgatgtttgttggcctgatggttggcggtgtgctggcggatcgctatgagcgcaaaaaagtgattttgctggcgcgcggcacctgtggcattggcttcattggactgtgccttaatgcactgctgccggagccgtcattgctggcaatctatttacttggtttatgggatggttttttcgcatcgcttggcgttacggcgctattggcggcgacaccagcactggtagggcgtgaaaacttaatgcaggccggggcgatcaccatgttgaccgtgcgtctggggtcggtgatttcgcccatgattggcggtttattgctggcgaccggtggcgtagcctggaactacgggctggcggcggcgggcacgtttattaccttgctaccgttgttaagccttccggcgttgccaccgccaccgcagccgcgtgagcatccgttgaaatcattactggcaggatttcgttttctgcttgccagcccgctggtgggcgggattgcgctgctgggtggtttattgacgatggcgagcgcggtgcgggtactgtatccggcgctggctgacaactggcagatgtcagcggcacagattggttttctctacgcggcgatcccgctcggcgcggctattggtgcgttaaccagcgggaagctggcacatagtgcgcgaccagggttattgatgctgctctccacgctgggatcgttcctcgccattggtctgtttggcctgatgccgatgtggattttaggcgtggtttgtctggcgctgttcggctggctgagcgcggttagttcgttgctgcaatatacaatgctgcaaacgcaaaccccggaagcgatgttagggcggattaacggtttgtggacggcgcagaacgtgacgggcgatgccataggcgcggcgctgctgggtggtttgggcgcgatgatgacaccggttgcttccgcaagcgcaagcggttttggtttgttgattatcggcgtgttgttattgctggtgctggtggagttgcgacgttttcgccagacgccgccgcaggtgacagcgtctgacagttaatgcttaaaacagcgccttaagtcgttccagcacttgcgtggcgctgtagtaatccagacggaacgtctcggttcccagcgcataaacctgcttgttttgtactgcgggaaggtgcgcgagcagtggattggcataaatcgcatcggcatctttctgatcaccggcgaacaggaatagtgactcgccatttaacccagcagccagattttccccaccaagctgaatgatgtcatggcgtttgccctggctttggctggcgtttaaccctgcgggcaacttcgccagcgtaaagccgagttgttccagcatctgcccttgtgctgattccggcgtccagagattggcactgtgtgcagcggcggtatagacaatggcagtgaccggctgcggcggtaatttgatttgctctttcgccgctgccagttgcttatcaaactgtgcaatccgctctgccgcttgtttctcatgcccggtaatttcgccaagctgcgttaacagcgactgccagcttttgtcgtcgtaattgatgattaatgtcggggcgatggtggaaagctgatcatacagtgccagcgccgaatccccgccggttgcgctaattaaaatcagatccggcatttgcgcggcaacggcttcggcgctcggttcgccgatatagagccgttgcagtttgcgttctttcgccaccttgctccactggcgtaaaaagccctggtcatccgcgacgcggttattcggcgtggtcgcgccgctggcgatcaccggagcatcaatcgccagcagtgagccggtcagggtgacgctggtggaaacaatacgctgcggctggctttccagtgtatgtgtgccacggctgtcagtaatctgacgcggccagtcagcggcctgaactgcggctattcctgaaagtaaaagtcctgttaatagaagggcgttgcggtagagcggggcgagtctcacaaatcagcttcctgttattaataaggttaagggcgtaatgacaaattcgacaaagcgcacaatccgtcccctcgcccctttggggagagggttagggtgaggggaacagccagcactggtgcgaacattaaccctcaccccagccctcaccctggaagggagagggggcagaacggcgcaggacatcacattgcgcttatgcgaatccatcaataatgcttctcattttcattgtaaccacaaccagatgcaaccccgagttgcagattgcgttacctcaagagttgacatagtgcgcgtttgcttttaggttagcgaccgaaaatataaatgataatcattattaaagcctttatcattttgtggaggatgatatggatacgtcactggctgaggaagtacagcagaccatggcaacacttgcgcccaatcgctttttctttatgtcgccgtaccgcagttttacgacgtcaggatgtttcgcccgcttcgatgaaccggctgtgaacggggattcgcccgacagtcccttccagcaaaaactcgccgcgctgtttgccgatgccaaagcgcagggcatcaaaaatccggtgatggtcggggcgattcccttcgatccacgtcagccttcgtcgctgtatattcccgaatcctggcagtcgttctcccgccaggaaaaacagacctcagcccgccgttttacccgcagccagtcgctgaacgtggtggaacgccaggcaattcctgaacaaaccacgtttgaacagatggttgcccgcgccgccgcacttaccgccacgccgcaggtcgacaaagtggtgttgtcacgattgattgatatcaccactgacgccgccattgatagtggcgtattgctggaacggttgattgcgcaaaacccggttagttacaacttccatgtcccgctggctgatggtggcgtcctgctgggggccagcccggaactgctgctacgtaaagacggcgagcgttttagctccattccgttagccggttccgcgcgtcgtcagccggatgaagtgctcgatcgcgaagcgggtaatcgtctgctggcgtcagaaaaagatcgccatgaacatgaactggtgactcaggcgatgaaagaggtactgcgcgaacgcagtagtgagttacacgttccctcctctccacaattgattaccacgccgacgctgtggcatctcgcaactccctttgaaggtaaagcgaattcgcaagaaaacgcactgactctggcctgtctgctgcatccaacccccgcgctgagcggtttcccgcatcaggccgcgacccaggttattgctgaactggagccattcgaccgcgaactgtttggcggcattgtgggttggtgtgacagcgaaggtaacggcgaatgggtggtgaccatccgctgcgcgaagctgcgggaaaatcaggtgcgtctgtttgccggagcggggattgtgcctgcgtcgtcaccgttgggtgagtggcgcgaaacaggcgtcaaactttctaccatgttgaacgtttttggattgcattaaggagcgaggatgagcattccattcacccgctggccggaagagtttgcccgtcgctatcgggaaaaaggctactggcaggatttgccgctgaccgacattctgactcgccacgctgcgagtgacagcatcgcggttatcgacggcgagcgacagttgagttaccgggagctgaatcaggcggcggataacctcgcgtgtagtttacgccgtcagggcattaaacctggtgaaaccgcgctggtacaactgggtaacgtcgctgaattgtatattacctttttcgcgctgctgaaactgggcgttgcgccggtgctggcgctgttcagccatcagcgtagtgaactgaacgcctatgccagccagattgaacccgcattgctgattgccgatcgccaacatgcgctgtttagcggggatgatttcctcaatactttcgtcacagaacattcctccattcgcgtggtgcaactgcacaacgacagcggtgagcataacttgcaggatgcgattaaccatccggctgaggattttactgccacgccatcacctgctgatgaagtggcctatttccagctttccggcggcaccaccggcacaccgaaactgatcccgcgcactcataacgactactactacagcgtgcgtcgtagcgtcgagatttgtcagttcacacaacagacacgctacctgtgcgcgatcccggcggctcataactacgccatgagttcgccgggatcgctgggcgtctttcttgccggaggaacggttgttctggcggccgatcccagcgccacgctttgcttcccattgattgaaaaacatcaggtgaacgtcaccgcgctggtgccaccggcagtcagcctgtggttgcaggcgctgaccgaaggtgaaagccgggcgcagcttgcctcgctgaaactgttacaggtcggcggcgcacgtctttctgccacccttgcggcgcgtattcccgctgagattggctgccagttgcagcaggtgtttggcatggcggaagggctggtgaactacacccgtcttgatgatagcgcggagaaaattatccatacccagggttacccaatgtgtccggacgatgaagtgtgggttgccgatgccgaaggaaatccactgccgcaaggggaagttggacgcctgatgacccgcggtccgtacaccttccgtggctattacaaaagcccgcagcacaatgccagcgcctttgatgccaacggtttttactgttccggcgatctgatctctattgatccagaggggtacatcaccgtgcaggggcgcgagaaagatcagatcaaccgtggcggtgagaagatcgctgccgaagagatcgaaaacctgctgctgcgccacccggcggtgatctacgccgcactggtgagcatggaagatgagctgatgggcgaaaaaagctgcgcttatctggtggtaaaagagccgctgcgcgcggtgcaggtgcgtcgtttcctgcgtgaacagggtattgccgaatttaaattaccggatcgcgtggagtgtgtggattcacttccgctgacggcggtcgggaaagtcgataaaaaacaattacgtcagtggctggcgtcacgcgcatcagcctgaaggagagaacacgatggctattccaaaattacaggcttacgcactgccggagtctcacgatatccctaagaataaagttgactgggcctttgaaccgcaacgtgccgcgttgttaatccatgatatgcaggactattttgtcagcttctggggcgagaactgcccgatgatggagcaagtgatcgcgaatattgcggcactacgcgactactgcaaacagcacaatatcccggtttattacaccgcccagccgaaagagcagagcgatgaagatcgggcgctgttgaatgatatgtgggggccaggcctgacccgttcgccggaacagcaaaaggtggtggatcgcctgacgccagatgccgacgacacggtgctggtgaagtggcgctacagcgcgtttcatcgttctccgctggagcaaatgctcaaagagagtggacgtaaccagctgattattaccggggtatatgcccacattggttgtatgaccaccgcaaccgacgcatttatgagcgatattaaaccgtttatggtggcagatgcgctggccgatttcagccgtgacgagcatttgatgtcgctgaaatatgtggccggacgttctggccgggtggtgatgaccgaagaattgctgccagcacctgtccccgccagcaaagcggcgctgcgtgaggtgatcctgccgttgctggacgagtccgatgaaccgttcgatgacgacaacctgatcgactacggtctggattcggtgcgcatgatggcgctggcggcgcgctggcgcaaagtgcatggcgatatcgactttgtcatgctggcgaaaaacccgaccatcgacgcctggtggaagctactctcccgcgaggtgaaataatggatttcagcggtaaaaatgtctgggtaaccggcgcaggtaaaggtatcggctacgccacggcgctggcgtttgttgaggcgggagcgaaagttaccggttttgatcaagcgttcgctcaggagcaatatccctttgcgaccgaagtgatggatgttgccgatgctgcgcaggtcgcgcaggtatgtcagcgactgttagctgaaacggagcgactggacgtgctggtcaatgcggcgggaattttgcgcatgggcgcgaccgatcagctcagtaaagaggactggcagcagacttttgcggttaacgtcggcggtgcgtttaacctgtttcagcaaaccatgaaccagtttcgccgtcagcggggcggggcgattgtcactgtggcgtccgacgccgcacacacgccgcgtattggtatgagtgcttatggcgcatcgaaagcggcgctgaaaagcctggcgttgagcgtcgggctggaactggcggttagcggcgtgcgctgtaatgtggtttcgcctggctccaccgacaccgatatgcaacgcacgctgtgggtgagcgatgacgccgaagaacagcgtattcgcggctttggcgagcagtttaaactcggcattccgctggggaaaatcgcccgtccacaagagatcgccaacacgattttgttcctcgcctctgacctcgccagccatatcaccctacaggatattgtggtcgatggcggctcaacgctgggggcataagcatgatctggaaacgccatttaacgctcgacgaactgaacgccaccagcgataacacaatggtggcgcatctgggaattgtgtatacccgtctgggagatgatgtgctggaagccgaaatgccggttgatacccgtactcatcagccgtttggcctgctgcatggcggcgcgtcggcggcgctggctgaaacgctgggatcgatggccggatttatgatgacccgtgacgggcagtgtgtggtgggtacggaacttaacgccacccatcatcgcccggtgtctgaaggcaaggtacgcggcgtctgccagccgctgcatcttgggcggcaaaatcagagctgggaaatcgtcgttttcgatgaacaggggcggcgttgctgcacttgtcggctgggtacggcagttttgggatgagcccgacagaattaaatgagattgcaggaaaactcggttaacggagtgatcgagttaacattgttaagttaaatattggtttcaactccgatttacatggttaccgtgttgttaaatcgtacaaagatgttatagaaacaaaatgtaacatctctatggacacgcacacggataacaactatgaacaaatcagggaaatacctcgtctggacagtgctctctgtaatgggagcatttgctctgggatacattgctttaaatcgtggggaacagatcaacgcgctgtggattgtggtggcgtcggtctgtatctatctgatcgcttaccgtttttatgggctgtatatcgccaaaaatgtgctggcggttgacccgacgcgtatgacgccagcggtgcgccataacgacgggctggactatgtgccgacggacaagaaagtgctgttcggtcaccattttgcggccattgccggagcaggtccgttggttgggccggtactggcggcgcaaatgggttacctgccagggatgatctggctgctcgccggggtggttctcgccggtgcggtgcaggatttcatggtgctgtttgtttctacgcgccgtgacggtcgatcgctgggtgagctggtcaaagaagagatggggccaaccgccggggtgatagcgctggtggcctgctttatgatcatggtcattatccttgcagtactggcgatgatcgtggtgaaagccctgactcatagcccgtggggaacgtataccgttgcgttcaccattccgctggcgctgtttatggggatctacctgcgctatctgcgtccggggcgtattggtgaagtgtcggtcatcggtctggtattcctgattttcgccattatctctggcggctgggtggcagaaagtccgacctgggcaccgtactttgactttaccggcgtgcagctgacctggatgctggtgggttacggttttgtggcggcggtgctgccggtgtggttgctgctggccccgcgtgactacctctctaccttcctgaaaatcgggacgatcgtcggtctggcggtaggcattttgattatgcgcccgacgctgaccatgcctgcgctgaccaaatttgtcgatggcactggcccggtatggaccggtaacctgttcccgttcctgtttatcaccatcgcctgtggcgcggtgtctggcttccatgcgctgatctcttccggcaccacgccgaagatgctggcgaacgaagggcaggcttgttttatcggctacggtggaatgttgatggaatccttcgtggcgattatggcgctggtttccgcctgtatcatcgatccgggcgtttactttgccatgaacagcccaatggcggtgctggctccggcagggacggcggatgtggtcgcttctgccgcgcaggtggtgagtagctggggctttagcattacaccagatacgctcaaccagattgccagcgaagtgggtgaacagtcgatcatttcccgtgcgggcggtgcgccgacgttggcggtggggatggcttacatcctgcacggtgcgctgggtggtatgatggatgtggcgttctggtatcacttcgccattctgtttgaagctctgtttattctgacggcggtagatgcgggtacgcgtgctgcgcgctttatgttgcaggatctgctgggcgtggtgtctcctggcctgaagcggaccgattcactgcctgctaacctgctggcaacggcgctgtgcgtactggcgtggggctacttcctccatcagggcgtggtcgatccgctgggcggtattaacactctgtggccgctgtttggtattgccaaccagatgctggcagggatggcgctgatgctctgtgccgtggtgttgttcaagatgaaacgtcaacgttacgcctgggtggcgctggtaccaacggcctggctactgatttgtaccctgaccgcaggctggcagaaagcgtttagcccggatgcgaaagtcggcttcctggccattgctaacaagttccaggcaatgatcgacagcggcaatattccgtcgcagtatactgagtcacagctggcgcaactggtgttcaacaaccgtctggatgccgggttaaccatcttctttatggtggtcgtggtggttctggcactgttctcgattaagacggcacttgcggcattgaaagagccgaagccaacggcgaaagaaacgccgtatgagccaatgccggaaaatgttgaggagatcgtagcgcaggcgaaaggtgcacactaaagtcagagtgaggggggatgttggcgaatgttggcatagtgccgagggttccccctcaccctaaccctctccccgatggggcgaggggactgaccgagtgcgttgatagcatttgtaggccggataaagcgttcacgccgcatccggcactctttcagcaacatggttagcggaggccaagatgtttgattcactggcaaaagccggaaaatatttaggtcaggcggcgaagctgatgattggtatgcctgattacgacaactatgtcgaacatatgcgggttaaccatcccgatcaaacgccgatgacctacgaggagtttttccgtgagcggcaggacgcgcgctacggtggaaaaggcggcgcgcgctgctgctaaatttgcacgtcaggctttaaacgattccactttttcgaacgctgcacgcaacgtatctggtgtcagcgtgactggcaggtaatgaatggactccaccgggcgcaaggtgtgggcaatcactttgtcgatctccgcctgattattgatatccacttccagctccgccagcgtagtcggcagatgaaaacgctgatacgccccggttaattgcgccagcacatcatcctgacccagcaaggcgctttgcaccagaattccgtaagcgactttggtgccgtggagaaatttctcggtttgcggcaggacagtcagaccgttatgcacggcatgggccgcagccacacgcgtaaaacgatcgcccagaccaccgaccattccacccccggcgataatcgcatccaccacatcgcaaaatgattgcgttaactgctgattttgctgatcggcaagtgcctgttcgctactgtttaacaagacgtcgcgaatggcctgcgcattattgatccccagccgcacggttagcggcaacgtttctggttgcggagccagcaccaccgcttcataccatttcgccagcgtgtcaccgatccccgccagcagatattgttgcggtgcattgaggataatctccggttccaccagcaccataaaattggcgtcgtcgaaaatctcataatgcagcgcctgtccggcatcgttataccagacggagagcggtgtccaggctgcgcaggtggcggcgatcgtcggagcggcaacaaatggcagaccgaggcggcgggcgagggctttcgcggtgtcgagcagtgcgccgccgccgacgccaatcaccacgctgcgatcgtcaccggactcagccgccagttgctgtacatcgctttcgctgcaatgaccacgaaacaaaatatgctttgcccctggaagtccaaacgctggcggaagtttggtttgcgccgcagcaatggcgcgtttgccgtagatccacaccgtgcgagaaagttgttcatcagtgaaaaaatcgttcaggtgattgaaacttcctggatgtgaaaagtagttagccgggccgacgaccacgcggataggattgtgaggcatgttgtgttgtccttattgttttatttagacatctaaacgtcttgattgccaaatactagcatcgtgttatagtgccttcaacacgcaacttcgtcaggtacaataaaaatgacaaataaccctctgattccacaaagcaaacttccacaacttggcaccactattttcacccagatgagcgcgctggcgcagcaacaccaggcgattaacctgtcgcaaggctttcctgattttgatggtccgcgctatttacaggagcggctggcgtaccacgttgtccagggggcaaaccaatacgcgcccatgaccggcgtgcaggccttgcgcgaggcgattgctcagaaaacggaacgtttgtatggctatcaaccagatgccgatagcgatatcaccgtaacggcaggggcgacggaagcgttatacgcggcgattaccgcactggtgcgcaatggcgatgaagtgatttgttttgatcccagctatgacagttactcccccgccatcgcgctttctgggggaatagtgaagcgtatggcactgcaaccaccgcattttcgcgttgactggcaggaatttgccgcattattaagcgagcgcaccagactggtgatcctcaacactccgcataaccccagtgcaactatctggcagcaggctgatttcgccgctttgtggcaggcgatcgccgggcacgagatttttgtcattagcgatgaagtctacgagcacatcaacttttcacaacagggccatgccagtgtgctggcgcatccgcagctgcgtgagcgggcagtggcggtttcttcatttggcaagacctatcatatgaccggctggaaagtgggttattgtgttgcgccagcgcccatcagcgccgaaattcgcaaggtacatcagtatctgaccttttcggtgaataccccggcacagctggcgcttgctgatatgctacgtgcagaacctgagcattatcttgcgttaccggacttttatcgccagaagcgcgatattctggtgaatgctttaaatgaaagccggctggagattttaccgtgtgaaggtacatactttttgctggtggattacagcgcggtttctaccctgaatgatgttgagttttgccagtggctgacgcaggagcacggcgtagcggcgattccgctgtcggtgttttgcgccgatcccttcccacataaactgattcgtctctgttttgccaagaaggaatcgacgttgctggcagcagctgaacgcctgcgccagctttagctatttaaccgtccaggcgcgggaatattgacggtcggcaaacaactcttgcaggccgttaatttgcttcaggcgcagcacttcgtcgctgtccattcccagctctttgccaattttattatcgtcccatcccaactggctaagttcacggacgatttccgacatggcggtgatttgatggcgtccacgagcgcgattatgacgaatagtcgcggcgatgcgttgattacgcgtaccttccagacaggtcaccggcaaataaccttttaagcgtaattttaatgatgatgagcctttaccaatttcatggcggtgaaaaccatccacgatttccagggcatttttatccgtatgcgtgaccacaatgggttgggtaaaaccatctatttcaatggattttttcagcagttttttttcgggtggtgccacgttgtttgggttgtaatcattaggcataagttggctgtttttaacccacagaacgcaatccactggctcttgacgaaaggggctaacctgatggatcgccatgcggatttcattaatcgctttgatgcgatcatcttccggcaagctggcgagaaattgcgttaaatcctgcgttaatcgttgttgcatagtatcccccattcctgacgttttccttttatccgttcgttataacgctgatagttcttcgctttcgtaggactaaatgataatgctcgacaccagtaatcgttattgagtaaaactttgcatatccgccgccaggaggggatatctttcgcgccaatgtccccttgctgggtttgtggaacctcgatgccttttttctgataccagtgcaaataaatggcgattttattgcggtaatgctcagctgttttttccggcatgctattgagcagcaataatgcatattcttgccagtctaaatgttctggcttgaggattttccgatgcccatagaaatgattgtcatgtccggcgtaaatgccgccactttttaccccgctgactcgtgcgcacatagctgcccagcgatccggttcgataacgtgatagagccataatccttgtcgttgctccgggccaaaaggttcgcaaattcgcatatgacgcagaggaacgcctgcctgatacattaggttatacagtgggttgcagagactttgatgatttgcataccaggtccagatatcagccactttccagtcgtaaatggggtaaatgtaccagctatgaccgcctggtgcggccgtagtccatggtttatcgtcggcaaaacgttgtttatttaaactggcgatggcgacaaaacggttgtaggactcatccgcacggatgccgatcatcatcgccgccggacgtttttgtgaaaaccattcggcaaactcacgtacaaattgttcgaaggtcatgccaggctggtaaaagcagaaaaagtcaggatcggttatcgcatcttgcgggggctgacgcacccattcgacatcaggttcccagcactgccattcgggttggaattgtgaaagggaattttgcgtcgtaagcgggagcgcaacccagtaaaactcttcgatgacatcggtgtacaactcgcgcagggactgaacatagttaatggtgcaagagaattgcgcctcccagtcgataaacaaaacgcagatttttttgcccatttgtcgggcaagttcggctgtcagatgcagcattaaaccagagtctttgccgccagaaaatgagacacaaacgcggggtagggtgttgagtgtccaggtaatacgctctcgtgcagcttccagaatattgagcggaagaggaattttataaatagacatctgaagacgctctctgaacgttacagggtgatcagtgagataagtctgttaattataaagtaaacactgcaaagcagagtgttttatttttcattcgcgctgtgaataaatagatgaaagttatagtagctgtctgtagttatatatcaaaaactctcatttagacggtcaataaatcgggagaacaccaaattatttaaagaagatttattataggaaatgtaaagctttattgaaggtaacggatgttctagttttatctcttttaaattaagaaagtcacggtaggaattataaagttcataggggactattcccagtaaatctgtaactgcaatgctattaatgattgtcagcaaagaggaaccacgaaatgaaattttgcgattcataaacttctcgtctatttccatttgaatatcatcaactcctgctgatttggatattaattgggtgaactcttctgccataatttgttcataagtgctattgtcagtaattcgcggatgcttattactacaaattagagtattgcgaattgtatgcaatggcatgcaaatgacggaacggctgatcactggcatttgggtgatcaccagatcggctttgcggtgaaccaacagttcttcagcattctctgctgacatgaggatatcatggcactcaatctcgacagaggcatcttgccgtaggcagcggatcagcatactattattagagcaagaaatgagctgagggccgtagataataaagtttttctttagttcggacttattgactatattaattgtttgttcaaggcctttgaggtttttctcaagatggtgatgcagattcaaccctgttgtcgtcggcgcgataccttttcctgagcgaatgaataaagggtcattaaattgcgcacgtaagcgttgtaacgactggctcacggctgatggggtgatatatagtgattcagcagctttgctaatgcttaaatgctggtaaatacactcaaatatgacaagaaggtttaagtcgaactttttcaagtcgtagagattggccatacactactccggttatatttttcttccatggtatattcacttaatcaatgttttttgcgtatatatttttattgattatatttttttgcttaactcaggattaagtttttctaaaatagcatagccacttagggcagagcgagcaattcatgcttttttaggatggttgaaaagcagggatgtatttcaaccatccatgaattatcttttatttattccccataatgatattaagcgttttctgatcgggcaaccccacggcctgttgcagcgtattttccttactcatgtaatagatcgctggtgtgacatttgcccccagatcgtccatgagtttctcgttggcgcttaacactttcatttgttctgtacttacgtttgcaggcacgtttagcttaagcttgccaccagaggattcatattcttgccaggtttttgcgggatctttggaggcaagaattgccgctgctgtcgccgggctttctggcttgataaccccaaccaacaatgttcttaattgcactttgccagaatctacccacgggcgcgcctgctgccagaactgtttacaatatgggcagaacggatcggcgaacacgtagacaatgaccggcgcatcttttttaccgtcgaggagccagtgggattgttccatccgttgccacatttcgcgtccggctggtgcgtaaatttctttttcgataagtgtgttactcaggttttcacctttctcgttgtacatgtaaccagagatagcgtgcttaccatcgggagtcaggtagatggtgacgcccatatcctgatactttccgagataacctttcattcctccgggggcatcgaacgttttgatgattgtaatgccctgtttttcaatcgcttttactggggaaggaagttcctctgcgaaggcgattgcaggaagcagagccagtaaaagtatcttttttaacattaatttgtccttttcagtcagtgcaaaagtcgagtaaaaggcataacctatcactgtcataggtaagagcttagatcaggtgattgccctttgtttatgagggtgttgtaatccatgtcgttgttgcatttgtaagggcaacacctcagcctgcaggcaggcgctgaagataccaaagggtagttcagattacacggtcacctggaaagggggccattttactttttatcgccgctggcggtgcaaagttcacaaagttgtcttacgaaggttgtaaggtaaaacttatcgatttgataatggaaacgcattagccgaatcggcaaaaattggttaccttacatctcatcgaaaacacggaggaagtatagatgtccttgattaacaccaaaattaaaccttttaaaaaccaggcattcaaaaacggcgaattcatcgaaatcaccgaaaaagataccgaaggccgctggagcgtcttcttcttctacccggctgactttactttcgtatgcccgaccgaactgggtgacgttgctgaccactacgaagaactgcagaaactgggcgtagacgtatacgcagtatctaccgatactcacttcacccacaaagcatggcacagcagctctgaaaccatcgctaaaatcaaatatgcgatgatcggcgacccgactggcgccctgacccgtaacttcgacaacatgcgtgaagatgaaggtctggctgaccgtgcgaccttcgttgttgacccgcagggtatcatccaggcaatcgaagttaccgctgaaggcattggccgtgacgcgtctgacctgctgcgtaaaatcaaagcagcacagtacgtagcttctcacccaggtgaagtttgcccggctaaatggaaagaaggtgaagcaactctggctccgtctctggacctggttggtaaaatctaagttccgcaatcgcgtaattaatcgggtgctgcggcacccgattttcttccccgcaccatgatgcaagctgcatccaggtagccgcagaggccgcttgcatgatgatgtttaaagcccaggagataaacatgctcgacacaaatatgaaaactcaactcaaggcttaccttgagaaattgaccaagcctgttgagttaattgccacgctggatgacagcgctaaatcggcagaaatcaaggaactgttggctgaaatcgcagaactgtcagacaaagtcacctttaaagaagataacagcttgccggtgcgtaagccgtctttcctgatcaccaacccaggttccaaccaggggccacgttttgcaggctccccgctgggccacgagttcacctcgctggtactggcgttgctgtggaccggtggtcatccgtcgaaagaagcgcagtctctgctggagcagattcgccatattgacggtgattttgaattcgaaacctattactcgctctcttgccacaactgcccggacgtggtgcaggcgctgaacctgatgagcgtactgaacccgcgcatcaagcacactgcaattgacggcggcaccttccagaacgaaatcaccgatcgcaacgtgatgggcgttccggcagtgttcgtaaacgggaaagagtttggtcagggccgcatgacgttgactgaaatcgttgccaaaattgatactggcgcggaaaaacgtgcggcagaagagctgaacaagcgtgatgcttatgacgtattaatcgtcggttccggcccggcgggtgcagcggcagcaatttactccgcacgtaaaggcatccgtaccggtctgatgggcgaacgttttggtggtcagatcctcgataccgttgatatcgaaaactacatttctgtaccgaagactgaagggcagaagctggcaggcgcactgaaagttcacgttgatgaatacgacgttgatgtgatcgacagccagagcgccagcaaactgatcccggcagcggttgaaggtggtctacaccagattgaaacagcttctggcgcggtactgaaagcacgcagcattatcgtggcgaccggtgcaaaatggcgcaacatgaacgttccgggcgaagatcagtatcgcaccaaaggcgtgacctactgcccgcactgcgacggcccgctgtttaaaggcaaacgcgtagcggttatcggcggcggtaactccggcgtggaagcggcaatcgacctggcgggtatcgttgagcacgtaactctgctggaatttgcgccagaaatgaaagccgaccaggtgctgcaggacaaactgcgcagcctgaaaaacgtcgacattattctgaatgcgcaaaccacggaagtgaaaggcgacggcagcaaagtcgttggtctggaatatcgagatcgtgtcagcggcgatattcacaacatcgaactggccggtattttcgtccagattggtctgctgccgaacaccaactggctggaaggcgcagtcgaacgtaaccgcatgggtgagattatcattgatgcgaaatgcgaaaccaacgtcaaaggcgtattcgcagcgggtgactgtacgacggttccgtacaagcagatcatcatcgccactggcgaaggtgccaaagcctctctgagtgcttttgactacctgattcgcaccaaaactgcataagaagaagtaagattcacctgcaattgcttagccgccggggtcaaacctggcggcttttttatggcattaaaaagccctgccgggatggctccgggcagggcgggatatttattctggcaattaacgcacaaccagcaccggcagattggcatggcggatcacgctcgaggcgttagaacctaacagatgggtcgaaatcgatgggttgcgagaaccaataactacaacatcagcccccagttcttctgccaactcattgacttcatcccgcacgctaccaaaacggacatgttgtttaatgcgggaaggatcgatggtgaagtggctgaccatcgtttgcagacgttcttctgcttcatgttgcagatgctcttcaaaacgacgcacatcagcggcaaaacggtgcaggctcaggctggctgacccgggtagtacgtgaagtagatgaataactccgtcatcctgggcgaggaattcagcgtggcgaacagctttgtcgctcaattccatttcaaatacatcaactggcataatgattgtcttatacataaccctttctccctgttaatcatgaacaaatcattcgccatgattataatatttatccctgatatttgtctggttctttttccttacgaacggtttctgtgattaatatattctcactgaacaccaggaattctcccaaaacctgcggtaccgcccgttttcccgctgtgatagctacccttaaagactgactcttttttgaactgtctctggaggttgcatgaaagcattgacttatcacggcccacatcacgttcaggtagaaaatgttcccgatccgggcattgaacaggcagatgatattattctgcgtattacggcaacggcgatctgtggctctgacctccatctttatcgaggcaaaataccccaggttaaacatggcgatatttttggtcatgaatttatgggggaagtcgttgaaaccggaaaggacgtaaaaaatttgcaaaaaggcgaccgggtggtaattccgtttgtcattgcttgtggcgactgttttttctgtcgattacagcaatatgccgcttgcgaaaataccaatgcgggtaaaggcgctgcgctcaataaaaaacagataccagctcccgcggcattgtttggttatagtcacctgtatggcggcgttcctggtgggcaggcggaatatgtccgcgtccctaaagggaatgtggggccgtttaaagtaccgcctttgctttcagatgataaagcccttttcctttctgatattctgccaacggcatggcaggcagcaaaaaatgcgcagatccaacaaggttcaagcgttgcagtctatggtgccggtccagtgggattgttgacaatcgcctgtgcacggttgctcggtgcggaacagatttttgttgttgatcatcatccctaccgcttgcgtttcgccgctgaccgctacggcgcgatcccgattaatttcgatgaagatagcgatccggcacagtcaattattgaacaaacggcaggtcaccggggcgtggatgcagtaatagacgccgtcggttttgaagcgaaaggcagcaccacggaaacggtgctgactaacctgaaactggagggcagcagcggtaaagcgttgcgccagtgtattgcggcggtcaggcgtggcggcattgttagcgtaccgggcgtctacgctggatttattcacggtttcctgtttggcgacgcctttgataaagggttgacgtttaaaatgggacagacccacgttcacgcatggctgggagaattattaccgttaattgagaaaggattactgaaaccagaagaaattgttacccactatatgccgtttgaagaggccgcccggggatatgagattttcgaaaaacgtgaagaggagtgccgtaaggtgattctggtacccggtgcacaaagcgcagaggcggcgcagaaggcggtttcaggtctggtgaatgcgatgccggggggaacaatatgatcgtcaggagtggttttcgaagtaaaggacagccatgacgataatcgccgccataatcagaaatcctatcaggatgtaaaatgcttctgccatggttattcccacaaacgaaacggaataattttgcagcaaaagtgaacagtgagaaccaggaaaaattgctgattttgcgtaaagaggatgcgagtgcatcctctgggcaaagcgagttatcgcttgtgcagatgggattaaagcaggtagtcgccagcagcttctggctggtattcgagttccagcacttcaaggtgggttgcaacgccgcccggaagttcccagtgaatggaatcgccaacgcgcagccccagcagtgcggcacctaccggagccataacggaaagctgagtattgctatcggtcatttttgccggatacaccagcgtgcgcacacgcacttcgccatcgctaagattgcggaatttaacccggctgttcattgtcaccacgtcgtgtggcatctcttctggcgaacacatttgggcgcgatccaactctgcgtttaacgcgtcggcgattggcaaaccagcataggcgggttgctccagcagaatatcgatgcgttcggcatccaggtcgttaatgatgatagttggtctggacatttttactccatgtcgtcggtactgcgagtgtcgcagataaacatacccaaaagaaaaccctcaccgtcaggcggcgagggtttaactcacatgatgatactgactgttgctcactctttgaagtgatttgcgtcacattcagggaattcctcaatgcagcgcattatgtataattcttaatcgtcacggtttatggaagacgaattagcgtgttttgtaaatcagatgattaataacccactttatcaatcacaaaggttttgccacagttgcctgggtgtggttgtggcaagaatgagtttgcagaaagcggagcgttgatggcgtcagctttgatcgagatctgaatttcagtcaaatacgcagggttaccctggcacgttagcttaactgctttcacgttctcttttccccagcttttggcaaaggcggcgtcaaagtcacggcggctcactgttttaccgtaattatccgcaaggaattttccggcttcgctctctttaatttcttgattcaggcgtaccatcgtaccgaagtatgcgtccggatcaaaaccaaagcaggcaccgtgtttggcatattcgtagcgttccaggcaggaacgtccgccagctcctggcatgacttcacttagtttagcggccgtttccagtgataatccggtttccggcgatgaacacattcggctggcgcgcgcttctggtagattcgggattgggcgagtagcgcaaccgaagcgcatccagcggcgttcatcaacaccacgggcagcaaccgatttaggcaatcctggccacagaccatgtacggtcagaaaatcagctttgttggtcgtttcggtttgcaggcgacattcatctcgttcgttacgatttcgatcgtgttgactctggcaaaatccggtttgccaggagagggccaggacatagcgatcaaaatcgccatactgttttgcctgcaacgctaaggcgttggcagaagagaagggaagcagagaaaccgcgagcaacgcggcgttacgccagaatgctttcataatgggtgtggaactcatacatacactgaatactatctattaaatcataaaaaagcccgccaggtgggcttacctggcgggcgtgatgatttattcagcgtttggcgaacgtattagttccacatggcgagaatcggccagccaaccaacagcaacatagagatgtaaatcaccccgaagattgcgccaagacgccagtaatcttttgatttcacatagccacagccgtaaataatcaccccaggaccggttgcatacggcgtcagacagcccatgataccgatagacagcaccagcaggatacacagttgttccattggtacgcccggaatacctttaccgacggccagaataaccggcagcatggttgcggtgtgcgcagacaggctggcaaacaggtagtgtgcaaagtagaacaccagaaccagtacaatcaccgttgcgtttggtgagaatccttccaggtgcgtactcatggtaccggcgaaccagtcaataaaaccagaacgagtcaggccgttagccatcacaaccagagttgccaggttgaccagcgtgttccatgcgctgttatagcgggtaatgtctttccacggcacaacgtgcagagccagcattagcgaaactgccagcagaccaaccgcagtagcattaatgacttcactgccaaatacccacaaacctaagctgagcaatacaaggccaatcagcgtccactctctgcgtgtcagcgcacccatggtttttagttcatcacccgcccaggttgccacttcttcactgtgtgtgatttccggtttgtacagcacgtaggaaagccacggcgcaatgataagcaagataaccccaaccggcaggaagcagaggaaccactgcaaccagctaatctggataccggcaattttgctgacgaactccagacccagcacgtttggtgccgcaccggtgacaaacatggacgaactcagactggtactaatgaccatcatccacatcaaatagccgccaatacgacgcgcggacggatcgttggggaatgatttaaacagcggcggcaggtttttaatgaccggaaaaaccgtacccccggtacgcgcggtgttggacggtgtaaacggtgccagcagaatgtcgataatgacaatcgcataacccaacgtcagcgtgcgtttgcccatgaatttcaccaggaaaagggcaatgcgacgacctaacccggaaacttcataccctaatgcaaaaataaatgcgccaaataccagccataccgtggtgctggaaaaaccagccagaccccatttcagcgcctgtttttgcgcattaaacgctgggtcagctaattctttggcatcaaagagcaggtaattactgccaataacgcaaatagtaaccgcaataaaactgatcgctgttgccggaattggctcgaggatcatgccgacaatcattgccacaaacacagcgaagtaatgccatgcctgtggtggcataccgtcggggacagggataagaaacatgacacccatcaccaccagtggggccaatagtttccatatattatcttttgctaaagacatacgggttctccaaaaattaatatttccaaatttatcaagtgcttaaataattaaatctgtgctaaaaaccaggtaaggatcagcaggtcggcactgccgcctggactgagatttcgttcgatacactccctgtcgaactgccggagataatcgagatcggcgggggttcgaatgccccctttttgcaataatgtttgcgcctcgcgctgtagccagcgcaggcccccctcgccaccgcgcgatgcaacgttggtatcgccgttgatcgccatcagtaggagcaaggtatcgagcaatgccagttcaggatctaacccctgatccagcagagtgaggtaatgcggcaaggcgtgattgatcaccagtggataacccgcttcggcttcaccgcgtgcgccggtaaggccaagctgttggtacaaccgttgacctgccgtcagttgtgaattattggtacgcagttctcgatcggtcaggccacggcagaaacttgccgccgtagaacaaacggttgttggcgttaccggttggttgagttgaagcaaacgaccaattgccgcacatagcagccctaaagaaaaaatgctgcctttatgcgtgtttacgcccgcagtggcgcggaacatatcaccttcgcaagccataccaattgggcgtaatccgtggagtaccgcttccggtgccatttctgcactacaggcaccaaattcaatgaaacggggtaaacagccctgaatcgccagcgcgctgcggtggaaatcttccagtgccatatctttgtgcgcaccgcagttaatgcgatccacgaggcctggtttcggtgacagattgacttcagtcagcatggcgcgccagcccagcagggcgtactcatcgattaatgacgtcgcaagctttgtggttttagttgacgttgcaggcatcgacatcgttcagcagtgcctccatgcggttgagtaaatcggtcagttgatgggtttttccacgcgcgcagacggctgcgctttgctcgcacaacaggcagcggcgaggcggcagtgaatagtcgcggcgggagagaatttcgccttcgggcgtcaggacatcgatatcccataaccgcccgagaggatgactatgttcaagctcaatggtggcgagcttgaggtcgcgagccggggcggcaatgctcaacatgccctccggcccgctggcggaaaccagtgcagcctgctcctgaatttgccagccctgttttgcggctaaggcacgcaaggctgtcacgccatgattaaaaattcggcgtgtgacctcgctgtctttaatcggcccaggcgcaaccacggtaaaggagaccagtggaacaggatggcgcttgagccagacgtgttgccgtgcttgcctttcatcccggctgacgagcagctcgggaattgacaccgcatggtggctggcgagttcaggaagcaggtgcatggcttattccttcacctgatgcacaacatcgatcaccgagccatcgcggtaacgcacaacggcaacgacgcggtcggtgaattcaatcggctgtggttcaccggtcagcagacgcgcacgttcgcgcagccactcaatggaaaccactttaatgcccgcttcctgcagacgttctgccagttccggacgtgccgggttaactgcgataccgtggtctgtgaccagaatatcgacactggagcccggggtgatgcaggtcagcacgttatccaccagagtcggaatacgaccgcgtaccagcggcgcgacgatgatggaaagcgcagaggcaatcgcggtatcgcagtgaccaccggaagcaccacgcagtacgccgtcagagccggtcagcacgttaacgttgaactgggtgtcaatttccagcgcgctcagtaccaccacgtcgagacgatcaaccgatgcgcctttcgaaccccagttagcgtactggttggcgctgatttcgatgtgattggggttacgggccagcgattgcgcagcatggctgtcaaagctctgtacatccagcagtttgcggatcagacctttttcgtgcagatcaaccatcgtcgcggtaataccaccgagggcgaagtcggcgcgaatatcgcggctacgcattttgtcttccaggaaacgggttaccgccagcgatgcgccgccggtgccggtttgcatggagaaaccttctttgaagtagcctgagttgacaatcacatccgcagcgctacgggcaataagcagttcgcgcgggttagtggtcatacgggtagcaccagcgccgatttttgcagcatcgccaacgcgatcaactttgacgattaaatcaacctgatcttgctcaatgcttgccggattatgcggataaggcagcagttcttcggtaagcatcacaacctgttttgcgttgtcggcatcaaccattgcatagccgagggagccgcagcaggctttaccggtgtagccgttggcattaccgaattcatcacaggacgggacgccgaggaaagccacgtcgatattcagttcgccgctctgtaccagatgcacacgaccgccgtgagagtggatctgcaccggttccgccagcagaccgcgggagatttcttccgccagtggaccgcgcaggccggaggtataaatgcgggtaaccacgccctggcgaatgtgttctaccaacggcgcatggcaatcactcagggagctggacgccagggtcaggtttttaaagcccatcttcgcgatgacgtccatcaccatattgacggtcaggtcaccgccacggaaagcgtgatggaaggaaaccgtcatgccgtcctgtaaaccagagcgacgaatcgcttcttccaggttggcgcacagtttgcgatcgcgcgctttttcagcctggtaggtttgctttggcgagttctggaaagcggcaagatcgcattcagcgcgacgattccaggccgctacccgttcttgtcgttgagattgttcaattttctgcgtcattttgattgccttattcttcgcggatgccggaaagttctgcacgagagagcaccagacgggcgcgatcgataaccggaccgtccaccatcttgccgttcagggaaaccacgccgaggccttcgcgagcggcggcttcagcggcttctacgacgcggcgggcgtgatccacttctttctgggttggtgcgtagaggttgtgcaacagatcaatctgacgcgggttgatcagcgatttgccgtcaaagcccagctgtttgatgtgggcggcttcttgcaggaatccggcttcgttgttagcgtcggaatagacggtatcgaacgcctgaatacccgcagagcgcgcggcctgcaaaatggaacagcgtgcgaacagcagttcagttccttccggggagcgttctgtacgcaggttgcgcacatagtcttctgcaccgagggcgataccgatcaaacgctcggaagcgtgagcgatttccactgcgcgggtaatgcccagcggagattcaatcgccgccagcaggccggtgctgccgggttcacgaccacaggctttttcgatacgcaggatctctttttcaatatccagaacatcctgagcggtatcggttttcggcagacgcacaacgtccgcaccaccgcgaacgacggcttccaggtcgttaacaccccattcggaatccagcgcgttgacacgcacaatggtttcaatatcgcgatacagcggatgttgcagcgcgtgataaaccatgcggcgggcggtgtctttttcacgtaatgccacggagtcttcgaggtcaaacatcagggcatcagccgggtagatgaaggagttgctgaccatcgcggcattggcaccaggcacaaacaacatgctgcggcgggtgcgagttttacgttgttgcagcgaagcggaaatcattggcaatcctcccatggcagagccgggataccgctggcgcgtgccagcagggcttccagtcgtgcacgtaaaatgcagtccagtgcgcctttgtcatcgacattcagctgtacgccgcgcacgttgtagcgggcgagaacgtccagaatggtggtgcgaattgcatcgccaaactgtttctcaacgctgctattgatttgcaggtcgatatcctgcgtatcgagtggggcgatgcgtatcatcacatccccagactcaagggtgcctgcaacggcgggctggtttattttcatttttcacctgtttctcatgcgggggtcttttgacgagctgccgcgtcctggcgggagtgctcaagcaggttctgcaaataatgcagcgtgactgcagggaccagcggcgcgatagccgtgagatcgtttttcgccagcagttgacgtacccgggaagcggatatcggcatctcctggtaacgcagccgctcaatttcaaccagttcgatgggcggtgcggagatagtcggcgtttccagccagtagcgcatatcctggttgtactgggcggtaacgcgacaaaagggttcagtaccgacaaagcggtgagttacacccagcgcgggagcgaggtactgacggaaaatcttcagatcaatttcggtgtaacaatggttaatgacgctctgttctttaatgaagtagcaagggaacgtagcgcgggagatgatgtattcggagccgcgatgcacagtcaggcgtggaatatcggcggtgccttttaacaccagatccaaccggtcttcataggggaagcgtgaagaatcttctttgactaaaaacagatgcaaccagtcgcactgtgccgcagcttgttgaatcagataacggtgaccattcgtgaagggattggcgttcatcacaatgcagccaatcttgttccctggatgacgaaattttttcagcgattcggcatagcgtttcagccgcgtggcgctgttttccatcagcaccatcacgccgggtacgctggtcagcgtggaaaaaccgcactggcggaacagcgcctcgtattcggttttggtataaataaacagatgcgtgctgtgccgctcataggcgaggtttatcagttcagtggctaatgtcagcgccagtccttcaccgcgaacggattcactgatagcaacgcatttaataatatttccggcaattccaccgcacgcgataagcttttcatcgcgggttacggtaataaatacttcgactgtggtgtcaacgctcaaatcattttcatgcaggaattgggcgatttccgccatttttttattttctgaacgttttacgtgggtgaaaatatcattgccgaacataataaatagtatcctgaaggtgcatgttgttatcgatttgcaacgaatgttgttcaatgttgcaaactgataaccttttattttcacttgggagaaaggggggtgatcgaggtatatctttttctcctttcgctatacatcctaaggagtatttcggcgtgaaattttgatttatttcacatagagttagtggttttttatttatttaatggttttaagttttttaattaatgtaattacgaaatgaccagcaggtttaagtgatttaattgatttaatgaataaaatttgccacgatcataattaatatctatgtattttgattcaacattttaattacatccgtcaaagaggctcgggacaacccgcaaggaaaacaatgttgcagcttaacgagaataaacagtttgcatttttccaaagactggcatttccgctgcgtatctttttgctgattctggtgttctcaatatttgtcattgcagccctggcgcaatattttacggccagttttgaggactatttaacgcttcatgtacgcgacatggcaatgaatcaggcgaaaattattgcctccaatgacagtgtcatctctgcggtgaaaacgcgtgactacaaacggctggcgaccatcgctaacaaattacaaagagataccgattttgattatgtggtgattggggaccggcactcgatccgcctttaccatcctaatccggagaaaattggttatcctatgcagttcaccaaacagggcgcgctggagaaaggggagagctacttcattaccgggaaagggtcaatggggatggcgatgcgcgccaaaacgccaatctttgatgacgatggaaaagtcatcggcgtggtgtcgattggctacctggtgagtaaaatcgatagctggcgggctgagtttttattaccgatggcaggcgtgtttgtcgtgctgttagggattctgatgttgctgtcgtggttcctggcagcgcatatccgtcggcaaatgatgggcatggagccaaagcaaatcgcacgcgtggtccgtcagcaagaggcgctgtttagttcggtttatgaagggctgattgcagtggatccgcatggttacattaccgccatcaatcgtaacgcaagaaagatgctggggctgagctctcccggacggcaatggttgggtaaacccattgctgaagtggtcaggcccgccgatttctttaccgaacagattgatgaaaaacgtcaggatgtggtggctaactttaacggtctgagcgttattgccaatcgggaagctattcgttcaggtgatgatttgctgggggccattatcagctttcgtagtaaagacgaaatttccaccctcaatgcgcaactgacgcaaataaaacaatacgtcgagagccttcgtacattgcgacacgagcatctcaattggatgtcgacgctcaatggtctgttgcagatgaaagagtatgatcgcgtgctggcgatggtgcagggggagtctcaggcccagcaacagcttattgacagcctgcgtgaggcgtttgccgatcgccaggtggcggggctgctttttggtaaagtgcagcgcgcccgggaactggggctaaaaatgatcattgtccccggtagccagctttcgcaactgccgccaggactggatagcaccgagtttgcagccattgtgggcaatttacttgataacgccttcgaagccagcctgcgtagcgatgaaggaaacaagatcgttgaattattcctcagcgatgaaggcgatgatgtggtgattgaagtcgccgatcagggctgcggcgttccagagtctctacgagacaaaatatttgagcagggggtcagtacgcgtgctgacgagcccggtgaacatggcattgggttgtacttgattgccagctacgtaacgcgctgcggtggtgttatcactctcgaagataatgatccctgcggtaccttgttttcaatctatattccgaaagtgaaacctaatgacagctccattaaccctattgatcgttgaggacgaaacgccgctggcagagatgcatgcggaatatattcgtcacattcccggattcagtcagatattactggcgggaaacctggcgcaggcccgaatgatgatcgagcgttttaagccggggctaatcttgctcgataactatcttcctgacggcagagggattaatttattgcatgaactggtgcaggcgcattatcccggcgacgtggtgtttaccactgcagccagcgatatggaaacggtgtctgaagccgtacgttgtggtgtatttgattatctcattaagcccattgcctatgaacggctggggcaaacgctaacccgtttccgccagcgtaaacatatgctggaaagtattgatagcgccagccagaagcaaattgatgagatgtttaatgcctatgctcgcggtgaacctaaagacgaactgccgaccggcattgatcccttgacgctaaacgcggtgcgaaaactgtttaaagagcctggtgtgcaacatacggcagaaacggtggcgcaggcactgaccatcagtcgcaccactgccaggcgttatcttgaatattgcgccagccgccatctgattattgctgaaattgttcacggcaaagttggcagaccgcaacgcatataccacagtgggtgacatgataaagccggaggaaacttgcctccggcattactatttacttgcctgtgaccgctgctgccgttcctggcaccatcagctctgtagcaacgataacaatcaccaaaccaacaagcaccggtaccgaggtgcgttttacgacttcaaacggcgagatcttcgccatcccggcaaccgcaacgactacgccagaaacgggcgaaagggtacggcccaggtttgacgcctgcagcatcgggatagtcaaatacgccgggttaatgccggaagagtgcgccagtttcgggatcatctcaacaaacgcataaaacggcgcattgcctgaaccggtcgtgactgccgccagcatggtcagaatcaccaataccagcatcaggatgatactcgccgaaccaaacgaggtagcgatagaaatcagactttgaataaagccgatggtgctaagcccctgagcgaataccccagcggcaaccagcagcatcaccacgttagcaaacgcatctgccattccgcgataagccacttccagaccagagaaaactttctgggtattaaagctgcggaggaactccagaatggaggcaatcagcatacaaatcaccagaatagtgatgatgtgtaattgcggaccccatttaccgtcaaaaatcagtacaccgatgatcggcgtgaacggcaaaatggcataaaacgcaggagcagtggtggtgatttcactgacatctaacatttcatgagagatgtgctcttttttatccagataacgttgccagaagaagtgggcgatcgccatgccgataattgcagcaattgagataggcagcgtcgttttgaaggcgaagtcaatcagcgacatttcggaagcttgcgccgccagcaccacatcccctgaagtcggtgcgagaataatcgccgccggggaggcacaaatggcagcagctgcgccacgactgataccaacgtttaccatcaccggaaatagggttgccatcagcaaaacacccagaccggttgcggaagagacggccagagacatcagacaggcgacaaaataggcggcaatcatcagcaggtaaggggagttaatatactgcaatggttttgacgccagcttgaccaccatatcattcgcgccgatatgggtcatgtaagcggcaaatccacacagcatcataatcatcatgccgaggtcgccgccgcggctcattagtaatattttaacgtattcaacgatatccgtggcgctgtagcctgttgaagcctggctggacggtaacactttgtgccccataatggcactgataatcagcaataacaggccaccgacaaataacacaccagtggcggaataccctttaatgatgtagcgagctacacccacaataaccacaaccccaataaggagttcaatgaatgtcagcataatttttcctgtctccaggccccaaagtaaataataaaaaattcctaaagcttaaggaaaaaatatgcccaataaattggcgatgaatgctgattaaaatcaagaaaaactgccattaagacattgaagttgctgtttttatacatagataacaaaacgcatatttagcggttggcaattatcacataataatgtgtgtaaattgatggtggattgatgcaaatttgttaattgcaatggtgttagctgcggctgtgcgctcaaaaaataatctaacatgagcataggttgacgatttatattatatacttcgttaagatgattgttgtatctagttaaaaaataaaataatttttccttgattgcattttgtcatcaaaaaagacttggtttttcttttttgactattcccatcgcagaaaacgacgcatcatctttaatcgatgcgcggaaatatttaacttgaacaagcggaaataaatagagcagctattcagattattctttatgttgggtctattaaggttatgttaattgtagctttgctatgctagtagtagatttttgataaatgttttatggtcacaaatgaacgtgagtaaatatgtcgctatcttttcctttgtttttattcagttaatcagcgttggtaaagtttttgctaacgcagatgagtggatgacaacgtttagagaaaatattgcacaaacctggcaacagcctgaacattatgatttatatattcctgccatcacctggcatgcacgtttcgcttacgacaaagaaaaaaccgatcgctataacgagcgaccgtggggtggcggttttggcctgtcgcgttgggatgaaaaaggaaactggcatggtctgtatgccatggcatttaaggactcgtggaacaaatgggaaccgattgccggatacggatgggaaagtacctggcgaccgctggcggatgaaaattttcatttaggtctgggattcaccgctggcgtaacggcacgcgataactggaattacatccctctcccggttctactgccattggcctccgtgggttatggcccagtgacttttcagatgacctacattccgggtacctacaacaatggcaatgtgtactttgcctggatgcgctttcagttttgagacaaatgaagttttagtaacttctttaaaatcaatagctaaaataagtaacatcaaaaataacgcgacttttatcactttttagtaaagttgcactggacaaagcgtaccacaattggtgtactggtaaccgacacagcatttgtgtctatttttcatgtaaaggtaattttgatgtctaagattaaaggtaacgttaagtggtttaatgagtccaaaggattcggtttcattactccggaagacggcagcaaagacgtgttcgtacacttctctgcaatccagactaatggttttaaaactcttgctgaaggtcagcgcgtagagttcgaaatcactaacggtgccaaaggcccttctgctgcaaacgtaatcgctctgtaagatacgtcagcaagaattcaaaacccgcttaatcagcgggttttttttggtctttagtgtgcggttgaggccgaaaacagccagaaagccagtgctgtcatggcaaaagaccccagaaggttgacgaaaacgttcagtaacgcccagccaaagcggccctcttgtaacaaaaacaccacttctgccgaaaatgttgagaaggttgttagaccgccacaaaatccggtggtgattaatactttccacactggatcaatgttcgtcatcctgctgaaccaggcgaatcccattcctatgatgaatgccccaatcaggtttgctgccagcgtccccaacggaatcgcctgatgcagcgggttaaatcgcatacttaacagccatctcgccacgcttcccgtaccaccgccaataaaaactgctaaaagaagttgtaacactgcaaaatcctgctatttgatttgtatgagtgataagtgtaacgccgaataatcgtcgttggcgaattttacgactctgacaggaggtggcaatgctggttgccgcaggacagtttgctgttacatctgtgtgggaaaagaacgctgagatttgtgcctcgttgatggcgcaggcggcggaaaacgacgtatcgctgttcgtcctgccggaagcattgctggcgcgcgatgatcatgatgcagatctattggttaaatcagcacagctgctggaaggcgaattcctcggacgtttacggcgagaaagtaaacgtaacatgatgacgacaattctgacgattcatgttccttcaacgccggggcgcgcatggaatatgctggtggcgctacaggcaggaaacatcgtcgcccgttatgccaaattgcatctctatgatgcatttgccattcaggaatcacgccgtgttgatgctggtaatgaaatcgctccgttactcgaggtggaggggatgaaggtcggtctgatgatctgttatgacttacgctttccagagctggcgctggcacaggcattacagggagctgaaatcctggtacttcctgccgcctgggttcgcgggccgctcaaagagcatcattggtcaacgttgcttgccgctcgtgcgctggataccacctgttatatggtggcggcgggggagtgcgggaacaaaaatatcggtcaaagccggattatagatccctttggcgtcaccattgcggcagcgtcagaaatgcctgcactcattatggcggaagtgacgcccgaacgtgtgcgtcaggtgcgcgcgcaactgcccgtcttaaacaaccgtcgctttgcgccgccgcaattattatgatgtttttttactcggcgcttgattcaccttgttacagattgctattgtgtgcgcgcgtcgaatgaccgttaatattctctggtttttaaggcgcgttctgttgccggttatatgtcaagaaggtatctatgggtgagattagtattaccaaactgctagtagttgcggcgctggtcgttctgctgtttgggactaagaagttacgtacgctgggcggagaccttggagcggccattaaagggttcaagaaggcgatgaatgatgacgatgctgcggcgaaaaaaggcgcagacgttgatcttcaggctgaaaagctctctcataaagagtgacgtggcgagcaggacgctccctcaatatcttgttcgatacaaaaaacccgcttcaaaaagcgggttttttatcagacagatgtaagtaattattacaggattacttaacttccatccctttcgcctgcaaatcggcgtggtaagaagagcggacaaacggaccgcatgcagcatgggtaaagcccatcgccagcgcttcggctttcatttcgtcgaactcatccgggctaacgtaacgttgaaccggcaggtgatggcggcttggctgcaaatattgccccagcgttaacatcgtcacaccatgacggcgcaggtcgcgcattacctcaataatttcttcattggtttcacccagtcccaccatcagaccagacttggtcgggatttccggatgcgcttctttaaagcgttccagcagcttcagcgaccagttgtaatctgcaccaggccgtacctgacggtaaatacgcggtacgttttccaggttatggttgaacacatctggtggcgttgcagtcagaatatccagagcacgatccatacgaccacggaaatccggcaccagagtttcaattttgatttgcgggcttttttcccgaatggcagtaatgcaatccgcaaagtgctgggcaccgccatcgcgcaggtcatcacggtcaacggaggtgataaccacataacgcagcgccatatcggcaatggtctgcgccagtttcactggttcattggcatcaggagctaccgggcgaccgtgggcaacatcacagaacggacaacggcgggtacaaatagcgccgaggatcataaacgttgctgtgccgtggttgaagcattccgccaggttagggcaggaggcttcctcgcagacagaatgcaggccatttttgcgcattgcggctttgatgccctggatacgtgtagagtccgctggaagcttgattttcatccattccggcttgcgcagcagggcttcgcgctctgttgccacgtttttaaccgggataagggccatcttatcggcatcgcggtatttaacaccgcgttccatcacaatgggtttactcatagcgtgcgtgttccagttgcgaattacgaaggaaagcgtttcaattcaatagattgttgtaattatcaactatttttgaattaacgactggcagtatatcattgaaacggacctgaaagcagccaaagcggtcgcgaaaatgtaaaattgttgttggattgtgccattttatcgttctgcgctgtgatctggctgtaacaatactttttcaaaatgcattacggataacatctattactccgtgcaggatgggatcacgcaggctgaatttgttgtagtggatagagaaatctatttgctcctcatttaaggacggaaaaggcagtttttccagcggccagcagcggctaaacaggttataaaaacggctgggaataatcgctaacatgtcactgttggcaaccagtgcagcgattgtcaaaatgttgtagctggtgaaattgatttgccggtccggaaacatttcttgaactctctgccgcagaccgctgaaattttgctcttccggtaacagaagtacatgcgcagcgttgtcgatagtctctctgtcatcttctaaagagagtagtggatttccctcgcggcaaattaacaccatattgtcggtgaacagaacatgatgttgcaccgtacgattggtgcaaaacatgttatcgatgatgagatcggtttgaaactgactgagttggttttccgcgtcgctgatgggcgggttgcgcagtaaaagctgcggatagtgagttttaatcgcccgatagatgacaggaaggaccagggctccgaccgagggagtggtcgcaatagttatcgttcgttgcttatcatagcttccttcgatatccagcgcgccaagaatggactcaaggccctgactgatatactcatgtagatgcatcgcaaatgcggtaggagtgacaccctggcctttgcgaataaacaatgggtcagggaatataacgcgcagtttctgaatagactgactgattgccgagggggtcagattaagcactttcgctgcattaacgatccctttatgtacatatacagcttcaaaaatagtcagaaggttaagatcaatatttcgtaaggttgtaaatatttgtggtttaccttctgacgactttctgcttaaacagggttcaatttgattattactatccacgcacttactccaattttattcatggaaaaataatatttaaaaaattacaataatcttatgtctaattggaacggaacgcttttgctcaccataatcaactatttcaataggttaatcaatggggtgagttgcggagcaaggcgtggcaccgcatttctgcaagtgataaagaaaatatacaaacgcgaaggagatgtaaagcattagcaggtattatgagtaatgacccagtgtaaattgggccattgatgtatggaattaagcggtaatatattcgaagtccggattgtttagtagcgctaaaatattttccagtaaacgtggagcaatattattagtcgtcgcttcgggtttccattgtgatattttagccatttccattccggcatacccacaaggattaatacgtaaaaatggtgaaagatccatattgacgtttaatgccagaccgtggaatgaacaaccgcgtcgaattcgtaaacccagtgagcaaattttcttttccccgacatagacaccaggcgcgtcagcccgaggatgcgcttctatacccagttcagccagggtattcaccactgtttgctcaagcaaggtcaccagttcacgcacaccgagtttacggcgtttcaggttaagcaacacatacatcacctgttgtcccggcccgtgataagtcacctgcccaccgcgatcgctctggatcaccggaatatcacccggcattaaaatgtgctccgcttttcctgcctgaccttgggtgaataccggatagtgctcgaccagccagatttcatcaagggtactatcatcgcgggtatcggtgaattcatgcatagcctgggagattggctcgtaaggctgaagaccgagctggcggacaagaattttatcctgatacaaaacggcatctccgtggagaatgagtaaaagtgggggaaaagtatatcacagcgaggagaggggagttacccgaccaggagccgggtaacggagaagcgagttacagaaccatgcggacaatatcgattttgcccagttcttcatacagtgtttcaacctgctcgatatgagtggcgttgatagtgatagataccgagtggtagttgcctttgctgcttggttttaccgttggggtgtagtcacctggcgcatggcgctgtaccacttcaaccacctgatcaaccagctcaggtaacgcctgccccataactttgtaagtaaaaggagtagggaattcaagcagttcgttaagtttggttttcatgtcagctccggcgtaacgtaattaaatagcaactcccgccagaaggcgggagtttttttactgatgcttagtatatggggacggaaattacactttcaagtgttcaatttttaaccaaaccagtgatggaacattaatttaatgtaatcaatgattttgccgaagaagttaccttccgggatttcttgcaacacaaccagcgggcgttgctcgatcgttttgccatcaagctggaagttgatagttccgacgacctgattcttttgcagcggcgcatgcaattcactgctgttcagcacatagctggctttcagatctttcatgcgaccacgtggaatggtcaggtacacgtctttatcaacccctaacgaagcgcgatcagaatcaccaaaccaaaccggttcagaggcgaactctttacctactttcagtgggttaacggtttcgaagaaacggaagccccaggttagcagttttttactttcggcttcacggcctttaaaagtacgtccgcccatcaccgcagaaatcaagcgcatctggccttcagtcgcagaagcaacaaggttgtaacctgctttgtcagtgtgtccggttttgatgccgtcgacattcaggctgttatcccataacaggccgttacggttcagctggcgaataccgttaaacgtaaattctttttctttatagatcgagtattcattcggtacgtcacggatcaatgcctggccgatcagcgccatatctcgcgcggagctgtactgaccatcagcatccagaccatgtaccgtctggaagtgggtgtttttcaggcccagggcgttaacgtagctgttcatcaagccaacaaaagcgtcctggctaccagcggcaaaatcggccatggcgacgcaagcatcgttacccgattgcaggttaataccgcggatcagctgagaaaccggaacctgcatgcccggtttgaggaacatcagcgaagaacctttaaacaccgggttaccggtggcccatgcgtcgttgccgatagtgactaaatcagtttctttaaatttaccggctttcattgcctggccgataacgtaactggtcatcattttggtcaggctggcaggatcgcggcggacatctgcgttctgttcggcgagcactttgccggagttatagtcaatcaggatgtaggactccgcatcgatctgcggtacacccgggatcatagttttgatattcaggtcatcggcatgtgcagcagagataaaggctgtgcaaagagccgtggtgagcgccaggcgcttcatgatacgagcggaaaaaatggtattcatggtctgaactacgacatccgtgatggaattaaaaaaagtgccctactatagcaaatgcactaccggcaggcatctgactttccgcgtgactttgttaacgtcatttacagaaattgacacatcagatgcctgctttacgctactgcgcggtggtaataaatgactgtaattgggcttcggtttgcaaacgttgctgcaaggtactggcttcggctttactggcgaatgggccaagctggatacgccagaccgcgccattttgagttacgcgaccggggacgccgaacttctgtcccagttgctgttggtactgttgcgcacgagcctgatcgctaacggccccgacttgcaccataaagttgccgctggcgctttgcgaggcggcttgcggtgtcaccattgcaggcgaggttgcaggcgttgtcgacggagctgtaacaacgggctgtggtgcaggtgtcggttcgctgctttccagtacaccaggcgctaaggtcgttggagcgccgaggaaaccgctactggttaccggcgcgccggtcggatcttcgctttttagcgtcgagttactgaccggaagaatgtcaccctgcgggccagacactgaacttgcccccgcgccaccgcttaaatcgggaggtgcaggcagggcgtaagtctgtttggcgactgtggtacaagccataccaggaccagaaagcgaaccatcctgggcgacaataatcggatcgatacgaactttggtgttgtttgacgtgttaagacggtcagctgctgcgcgagaaagcgaaattacgcggtcgttgccgtaggggccgcgatcattaatgcgcaccacgatcattcgcccgttagccaggttagtgattctggcgtagctggggatcggaagcgttggatgggccgccgtcaactgtgtcggatcgaaagcttcgccagaggccgtcaggttactgcctggttcggcatcatagattgccgccagtcccgcctggctaaatcgagacggatcctgcacgattttgtagcttttaccgtcgcgctggtaatcctgatttgccgtcgcgttcagtggttcgaaacgcgggtccgccccgctaatttcaactatggggccgttacataccgcaggctgcggtacacttaccgtctgttgctgaccatcatcgcttgtacatgccgcgagcattcctgccgcgatgcagatcccgagccactgcttacgcattgcgcacctcttacacgcttttcgacaacattttcctgtgggtgtggattgacattacaatcccgaacccagccatcagcacaattagcgctgatcctccataactgaccagtgggagcggaacccctacaaccggcagaataccgcttaccataccaatatttacgaagacataaacgaataatatcagcattaagccgccagccatgacgcgaccaaaggtggtttgcgctctggcggctatccacagcccgcgcatgatcagcagaatgtagagagcgagcagaatcagaatgcccactaatcccagctcttccgccagtaccgcgaagataaagtcggtatggcgttcgggtagaaattcaagttgtgactgagtgccatgcagccagcctttgccgcgtaatccgccggagccaatagcaattttagactgaataatgtgatagcccgcgccgagtgggtctgattccgggtccaggagcatcattacgcgctggcgctggtaatcatgcatcaggaagaaccacagaataggaatgaacgccgccaccagcactactgcgacgccaatcagacgccagctaaggccagagaggaacagtacaaacagaccggaaagcgcaacgaggattgatgttcccaggtcaggctgtgcagccaccagcagcgtgggcataaatatcagcaccagcgcgatgccagtgttcttcaacgatggcgggcaaacgtcgcggttgataaagcgcgcaaccatcagtggtacggctattttggcaatttccgacggctgaaaacgaacaataccgaggtccagccagcgttgagcgcctttagagatggcaccgaaagcatctaccgccaccagcaaaataatacagatgatatagagatagggggcccagccttcataaacgcgtggaggaatttgcgccatcaccaccatgatgaccagacccatcgcgatttggcctattttacgctccatcatgccaatatcctgaccgctggcgctccagataaccagggcgctgtaaaccagcaatgccagtaagatcagcagcattgtgggatcgagatggactttatcccagaatgtttttttattcggattatccgtcatgattaatggtcctccgctgcggcaaccgcaggattttccgcaggcagatcggtattgttatcacccagcataatgtggtcgaggatctggcgcatcagcgtaccaaccgccggacccgcgccgccgttctccagaatcatggcgacagccacttgcggattgttgtatggcgcaaaggcggtcatcagtttgtggtcacgtaaacgctcggcaattttgtgcgcattataggtttcgttcgctttcagaccgaagacctgagcggtaccagatttcgccgcaattttgtacggtgcgctggcaaagtatttatgcgccgtaccgttagggcggttagcaacaccgtacataccgtctttcgccagctcccagtaaccggaatgaatatcgccgacgggcggttcatgcggttgtacccatggcacctgtttgccgtcttcggcggtgctcatcagcaaatgcggaaccttcacgataccgtcattaatcaggatcatcagtgccttactcatctggattggggtcgctgtccagtaaccctggccgataccaaccggaatggtgtcaccctgataccacggttttttaaagcgtttctgtttccattcgcgggtaggcatgttgccggaacgttcttccgccaggtcgataccggtgtaatgaccataaccgaatttacccatccattcggagaggcgatcgatccccatatcgtaggccacctgatagaagaaggtatccgcagattcttccagcgatcttgtgacattcagacgcccgtggccccattttttccagtcacgataacgtttttccgaccctggtagttgccaccagcctgggtcaaacagcgtcgtattgcgcgtgatcaccccggcgcttaatgccgaaaccgccacatagggtttaactgtagacgcaggaggataaaccccctgtgtggcgcggttcaccagcggtgtattcgggtcgttcagcaaggcggaataatctttgctggagataccgtcaacaaacaggtttgggtcataactaggcgtggaaaccagtgccagcaccccacctgtacgcggatcggtgactaccacagctgcgcggctacccgccagcagcgtttcaatatattgctggagtttgagatccagcgtcaggtaaatatcgtgtccggcttgcggtggtacttcttttaactggcggataacacgcccacggttgttaacttcaacctcttcataaccggtctgaccgtgcagcacgtcttcatagtaacgctcaatgcccagcttaccgatatcatgcgttgccgcatagttggccagtttgccgtcattattcaggcgttcgacgtctttatcgttgattttcgacacatagccgatgacgtgggtcaacgccgaaccgtaaggatagtaacgacgtttatagcctttaacttcgacacccggaaaacggtactgattgacggcaaagcgagctacttgtacttcggtcaggttagttttcacgggaatagaggtgaaacggtgtgaacgtgcgcgctcttttcggaatgcagcaatatcgtcatcggtcagatcaaccacgctgcgcaaagcgtccagcgtttgctgcacgttatcgactttctccggcatcatttctatctggtagatagtgcggttgagtgccagagggataccgttacggtcgtagataatgccgcggctgggcgcgataggcaccagcttaatgcggttttcattagagcgggtctggtaatcggtaaagcgaacaatttgcagattatacaggttggcgataagcacgccggtcagcagcaaaatccccaaaaaggcgaccagcgcccggcgcacaaacagcgcggactctgccgtatagtcgcgaaaagagttctgtagtttcatccgctgcgttttctactcaaagctcccttatcactcacggtgataaggatggttggtggtgatgctccacgcccggtacagactctctgcgaccagcacgcgaaccagcggatgggggagggtaagcgccgacagcgaccagctctgctccgccgccgctttacaggcaggcgacaacccttcaggcccgccaatcagtagactgacgtcgcgaccatccagcttccagcgttccagctcagcggctaactgcggcgtatcccagggcttgcctggaatatcgagggtgacaatgcggtttttgcctgcggccgccaacatctgctcaccctctttgtcgagtatgcgcttgatgtccgcattcttgccgcgttttccggccggaatttcaatcagctcgaagggcatatctttcggaaaacgacgcaggtactcggtaaaaccggtttgtacccagtccggcattttcgttcccacggcgacaagttgcagcttcacgcattaactccagagtttttccagttcatacaggcgacggctctcttcctgcatgacatggacaatcacatcgcccaaatccacgacaatccagtcggcgctgttttcaccttctacgccgagcggtaacaggcccgctgcgcgagactcctgcacaacgtggtcagcaatggacataacatgacggctggacgtacccgtacagatgatcatgcagtcggtgatgctggatttgccctgaacgtctaaggcgatgatgtcctgacctttgaggtcatcaattttgtcgataacaaaatcctggagtgctttaccctgcaagttttccccctgggtgaatcaaatagataaaaatggtctgtcagtatacctgaaccagaggcgatttcgggacaattgtcgccgaatcggctttcgaaagtgggctatcatcccaccccgcgccgcagattgcatcgccatttttgtaaaacaatttctacaaagtcgtgtctggcggaaaaagtctggctgcggagaatatcagcctgcccggggctgtcaatggtcgttgcggcttacccgtaaaaaaacagaaaagtcatgcattctcgaccccgatggcacggctattgaggacgcgtagcgtcgcgaatttttggttgatatcaatggcgctccaacacccctggtcaacgcgaaaatgccacatagattcggcaggcatgccaattagacgagcaattaacagactcagtacgccctgatggctgacgattaaaatattctgatagtgctgatattcactaagccttgcgataaatctttccacacgttgcgaaaatgcctgaaatccttcaccgttcgtggggatagcatgctgccagtcattgcaccacgcgctatagttttcggcatcttcttgcatgaggtcgcgatgatgtcgcatctcccagtcgccaaaaaacatttcgttgagttcagggatgatttgcacggggagctggcggtcactgagaacccgtcgcgcggtatgctgtgcccgttccagttcactgcataaaaccaggtcaaaggaaacatcatctagcagtgtatgcagattttgcgcttgctcaataccgcgcgcggtcaggggggtgggcgcatgaccgctgtaaagaccatcgatattcgcttgcgtttcaccatgacgaattaaccacagtcgcatcatgccctccgtaacgacaggtatcagcgatacaagccttgttggttaatgtaagtcagtaccggttccggcaataaatcctcacacgattcaccgttttgcaaacgttcgcggatgatggtcgccgagatgttaaaccacggcgtttcagccagataaattttaccggcaggctgaaggtgaagatcttccgggttatgtgtcaaatgatcttccagccattgctggtattgcggttgcgccatttcaagtgggtaacctggacgccgacagacgatcaaatgtgcattgtcgagtatcgtttcgtattcgtaccaggtcggaaaggtcagcaatgaatcctgaccaataataaacgccagcggcacgtccggcccttgttcctgccgccactctttcagtgtttgcgcagtgtaagagggggcattgcgctttagctcgcgttcatcaagagtaaataatggcttgtcggcaatcgccagttcaagcatgtgtttacgctgcacgctgttcgcttccggctggggacgatgcggaggaacattattagggatgattgtgacccgcgtcagaccaatcaaattcgccagcgtttccacgggtttaagatgaccatagtgcaccggatcaaaggtgccgccaaacagagcctgtaaagatttcatatcaaccgtcgataaatacgtccgccaggggtttatggcacaacagaagagataacccttccagctctgcccacactgactgaccgtaatcttgtttgagggtgagttccgttcgtgtcaggagttgcacggcctgacgtaactgcgtctgacttaagcgatttaacgcctcgcccatcatgccccggcggttctgccatacccgatgcttatcaaacaacgcacgcagtggcgtatgggcagactggcgtttcaggttaaccagtaacaacagttcacgttgtaatgtgcgcaacaaaataaccggttcgctgccttccagacgcagttgctgaagaatatgcaacgcgcgcttactttttcccatcaacaaagcatcaacccaatgaaaaggggtgaaatgcgcggcatcattcaccgcctgttcaacgcgcggtaatgtcaatttgccgtctggccagagcagcgataaacgctccagtgcctgagccagcgccagcaggttaccttcataacagtagcagagcacctgatttgcagcgtcatccagttctaagttgagctgttttgcgcgcgcagcaacccagcggggaagctgagcctgctccggtgtctgacaggtcacctgcacgctgcgattcgcaagagcagtaaaccaggcggcattttcttgcgctttgcttaatttattaccgcggacgatcaacagcaggtcgtcatgcagaagtccggtgagtgtgagaagttgttcattgatcgccgcattcggtccgttttctggtaacaacagcaatagcgtttgtcgactggcaaacagactcatagcctggcataacgaaaagatcgcattccagtcagtgttgggatcaatggaaaaagtgtggtgttcttcgaatccttgtgccgcagctacctgacgaacagcgtcctggctttcctgcaataacagaggatcgttaccaagtaaaagatacgccgcgcgcagcccttcattgagctgcgcgcggagttgttccgggtacaaccgaatcatcagttacccagcgtggtggagacgcgtgcaggcgttgccggagtatccgttgtggtcgacgtctgttcttcgtcggaacgaatatccgcagcacggatgcttggcagcttacgaatcagctgttcggcagcacggtcgtacatctcttttacgatcatgtcttgttcgttatctttcgctaacgccatttgcgggttatcaaagaacgaacggaagactttggcgctaatcgggtagatatcacggccggggatcaacacggtcgcattcaccgtcatgatcatctgatactctgctgtttgaccgttacggaataccgatgcggtatctttcgcgatgctcactttacccaaacgcagggatggaacgtccttacgcgtggtttctttatcaagcaactcgacaccattcagacgtaactggttacgcaccgcacggcttaatggcccgttcggatcgcctgagtccaggatcatgaccttcatagtggaaggaacctgcgtggtatcacgcagatgccagccacacccggcggtgattaacaccgccagagataacaacaatgttgccagatatcgcacgcttcctcccgcgcttagccaacgaccagattgaggagtttacctggtacgtaaatcactttacgcacggtaacgccatcaagatattttgctaccagatgttcctggccagcacgttcgcgaacctgttcttccgttgcgtccaccggaacggtgattttggcacggactttaccgttaacctgcaccacgaccagcgtggagtcttccaccatcgctttttcgtcagcaaccggccacggcgcgttgtcgatatcgccttcgcctttcagttcctgccacagcgtgaagcagatgtgcggggtgaacgggttaagcatacggacaacggccagcagcgcttcctgcatcagagcgcgatcctgctcgccatcggttggtgctttcgccagtttgttcatcagctccataatcgccgcaattgcggtgttgaaggtctgacgacggccgatatcatcggtcactttagcgatcgttttatgcacatcgcgacgcagcgctttctgatcttcagtcagcgcatcaacgttcagtgccgcaacatcaccttttgctgtgtgctcgtaaaccagtttccagacacgtttcaggaagcggttagccccttccacaccggattcctgccattcgagagtcatatcagccggagaagcaaacatcataaacagacgaacggtgtccgcgccgtaacgttcaaccatcacctgcgggtcgataccgttgttcttcgacttggacattttgctcatgccggtataaaccagttcatggcctgccgcatctttcgctttcacgatacggcctttctcgtcacgttcaacgatagcatcaaccggggaaacccagttacgttcgccgttttcgccaacatagtagaaggcatctgccagcaccataccctgacacagcaactgtttcgctggttcgtcagagttcaccatgcctgcatcacgcatcagtttgtggaagaagcggaagtagagcaggtgcataatggcgtgttcgataccaccaatgtagatatccaccggcagccagtagttagccgcttcggaatccagcataccttctttgtactctgggcaagtgtagcgcgcatagtaccaggaggactccataaaggtgtcgaaagtgtcggtttcacgcagcgctggcataccgttaacggtagtttttgcccactccggatctgctttaatcgggctggtaatgccgtccatcaccacatcttccggcaggatcaccggcagctggtcgtccggggtcggcattacggtaccgtcttccagcgtcaccatcggaatcggcgcgccccagtaacgctgacgagaaacaccccagtcgcgcaggcggtagttcactttacgctcgccaacgcccatcgcagtcagtttatcggcgatggcgttgaaggccgcttcatggtcaagaccgttgaattcgccagagttgaacagcacgcctttttcagtcagggcttgctgagaaagatctggctcagagccgtcagcagccaggataactggtttgatgttcaggccgtatttagaggcaaactcgtagtcgcgctggtcgtgacccggaaccgccataactgcgcccgtgccgtactccatcaatacgaagtttgctgcccaaacgggaatttcttcgcccgttaatgggtgaacagctttaaagccagtatcgacgccttttttctccatcgtcgccatttcagcttcggcaactttggtgttacggcattcgtcaataaaggccgccagttcaggattattttccgccgctttctgcgccagcggatgacccgcagctaccgccaggtaggtacaacccataaaggtgtccgggcgggtagtgtaaacggtcagcgtgttgtcatagtcgttaacgttgaaggtgatctccacgccttcggaacgaccgatccagttacgctgcatggttttaacggtgtctggccagtgatccagtttatccagatcgttgagcagctcgtcagcgtaagcagtgattttgataaaccactgcgggatctctttacgttcaactttggtatcgcagcgccagcagcagccgtcgataacttgttcgttcgccagtacggtctggtcgttcgggcaccagttgaccgcagaagtcttcttatataccaggccttttttatacagctcggtgaagaatttctgttcccaacggtagtattccggcgtacaggttgccagctcgcggctccagtcataaccaaagcccagcattttgagctggtttttcatatacgcgatgttgtcgtacgtccacggtgccggagcggtgttgtttttcaccgccgcgccttccgcaggcagaccaaacgcgtcccagccgatcggctgcaggacgtttttgcccagcatacgctggtagcgggcgatcacgtcaccgatggtgtagttacgtacgtggcccatgtgtagtcgaccagaaggatagggaagcatagacaggcagtaatacttctctttgctctcgtcttcggttacttcaaatgtgcgcttctcatcccaatgaagctgtactttggattctatctcttccgggcggtattgctcttgcatggcagccagtggtcctgttttcaatacggctacaaatgtagcgttgaggtggtttttcagatccgcatagcatagcccaaacgtccgcgtcaaaacagcctttcgcgcactcgacgttgaaatgatgcccggattattcatacattaatttacagagtttgtgggcgtattagcaaagcaaggaacaaagaacgtctattattatagtcagttaacgacccgggagatgaaacgatgaacaaggttgctcaatattaccgtgaactggtcgcgtcactgagcgaacgcctgcgcaatggcgaacgtgatatcgacgcactggtggaacaggcgcgcgagcgcgtaataaaaacaggggagttaacgcgaaccgaggtcgatgagctgacgcgagctgtaagacgtgacctggaagagttcgccatgagctatgaagagagcctgaaagaagaatctgacagcgtctttatgcgggtgattaaagaaagcttatggcaggagctggcagatatcaccgataaaacgcagcttgaatggcgcgaagttttccaggacctcaatcatcatggggtttatcacagcggagaagtggtcgggctgggaaatctggtctgcgagaaatgtcacttccatctcccgatctacacaccggaagtgctgacgctatgcccgaaatgtggtcatgaccagttccagagacgcccgtttgagccgtaatagtctgatttcgcacagcaataaagagaatatgggccgaatgaaattccccggcccttgtttttatctctacagtaaatcttcagtctcacgaatttcctgactgacatctctggttccggatgactgaactttacgatacaggtcgagagcctgtcggagatcgacaggtcttccttctccgtagtgatacataatggccaggttataccaggcagtggcgtcattgcattcagcggctttcgtaaaccattcaaaggcagcctgataatctttctcaacgccttgtccgtgtttatacatataaccgatgttgacgtaagcgccgacgctttcctgagcggcagccttcagataccagtacatcgcttgcttatagtcctggtccaccccttcgccagcgttataatcccatgcaatttgaaactgggcgtgccgattaccctgctgtgcgcttttcaaataccagaatgcggcgagtgtcttgttttgagcaacgccttttccgtcttcataaagatcggccagattgttttgcgcgtcactatggccttgtaatgcagcttgtttgtaccagaaaaatgccagcgcatagtcttttgcgactccgttgccatttctgtacatccacccaagattattttgcgcataagacattccgctctccgcggctatctgataccagacaaccgcttctttataattgggggcttctccacgatccagtgtccagccaagggcgttggaagcgaaagtatggccttgtagggcagcttttttcagccagaagatggcttgctcattatctttatgacggcttttatcctcggtatacttttgccctaaggaatactgtgcttcacaatgaccttgctcagcggccagcttcagccagtaaaaggctttttcgtcgtccggagaatcaattgcgctatcgcgattataataaaacccaacaatatattgagcctcgcaatcgcctttttcagcacgttcgataatctcatctattgataaattatcgcagcaacttgacgtgaaaatcattatcatttccttatggttgcagataaaacatattatatttttatgtgttccatttttgcgtaagccttattttatgcgtattatgtcgcgtcagaaaagtataaataaacgagcctcgcaatgcggctaatattcatttaatgaatatttaaggataaattatatggacatggagtcgcaaaaaatattgtttgcactttccactccgatggaaatacgcaatgaatgctgtttaccttcgcattcatcacccaaaatgtatttaggtacatgcttttttgacctttcttcctcctggggaattgatgcccgtgatgacctgctgcgcacaattcaccgaatgatcgataacggtcatgccgctcggttggcagggttttatcaccgctggtttcgttattcgccatgtgaatggcgtgactatcttgctgaactaaatgagcaaggtcaggcttatgcgcaatttgtcgccagcaccgccgtatgctgtggtgagggaggaattaaagcctgggattatgtccggatgggttttttaagccgaatgggcgtacttaataactggttgagcgaagaagaaagtctatggatccagtcgcgcattcatctacgggctctacgttattatcgtaactggcggcaatactttgccggttatacctttggtcggcaatattggcagtctcccgaagatgatcatctgcagttattacgcgaattcttagcgcgtaaagaatacgacgattccggcaatgatatgttttatcaattatttgccagtgatgatgcgtattaccctaccttgtcctggcaaccattggcttactattctgcatgcccggaaacgcttaaggatatgagcgacctatgaaaaattgctggaagattctcgaaatagaggaaacgactgacgtcgatattatccgccgcgcttatctggcgctgttaccgtcctttcatccagaaaccgatccgcagggttttaaacaacttcgtcaggcgtatgaggaggcgctacggattgcgcagtcgcctgctaaatctgtttggcaaccagaagaatatgaggtggcagaacatgaaattctgctcgcctttcgtgcgttacttgcctctgatagcgaacgttttctgccctccgcctggcagcgattcattcagcaattaaattattgctcgatggaagagattgatgaattacgctggtcgctgtgcacaatcgccatgaacactgcccatttatccttcgagtgcgtggtgttattagcagaaagattgcggtggttgcaggaggaaaacgtcggggaaatagacgaagaagaactggaatcctttttatatgccattgcgaaggggaatgtttttaacttccagaccattctgcatctgcccgttgccgtgcaaaatgacaccatcgatttttaccaaatgttcgctcggatttggtcatcgcatccagaatggctgacattgtatttagcgcaacatcgcgcagtgattatccccgatgatgcaaaactgcacagaaatttactccgctggtatagcgcaggtcgcctgggaattcccgaactcctggattacgcccggtcgtggcgggaagctgaatctgataatgaagatgcgcgttattatgaatacgcacaacgcgtctattgtggagaaggcgaaagcttgctggcagaactttgtgactactggcgcgagtatccctccacccaggcggatgctttaatattgcaatggtgccgtcagcatcgggtcgattattacccgttagtggtgatgatgattgaagctcgtgaactggttaacgatcagggaaaaccgctactttatatccccggcgacagcgcccgtacgcgttttcatttatacgaaatactcagcgatgaaaaactctctgctctggggcgttcactggtcgagatggttttgcacaaaggacgtaagccgcggatctcactcacgcgtgatacagaacatcccttatggccattatatttagttgccaaacaattagtgcaggcgaaccaaccaaccgaagaatcattaatgccgattgtgagccgccttgatgcagaagatcgttgtccactggaagcattaattattcgtcgattattaattcaggcggcgaattttaccgagaagcaaactgttgaaccggagccgcaaccgcagccaatgcccgttgacgatggtgggccaggctgtctgggcatcattaaaattattttctatatttttatctttgctggtttgatagggaaaatactccatctgttcggttgacagtcgacgttaatgtgcgggaagcccggcaagtaatctttccgcatttttgtaatgttgtttggcggccagttttaaccatttttgagattcataatggttaacattaatacctgagccatttctgtagatcaaacctaaagtatattgagcatgagcatacccttgttcagctgcttccttataccagagaattgctttacgggtgtcgggtttgacccccagacctttgaggtagatccaccccagtttgctttgtgcgcgcggattttcctgttctgctgattgctcataccagtatctcgcctgtgtataatccagtggtttaccgtcgctaccatgaagataaaattctccaaggcgatattgcgacgttgagtgaccatgaatcgcggaaagctccgtggccgccgtggtaaacggtagactgcccggtgagcttaaataatcaaaggcataattcaccatggctttatcacgcaacgttgttttcttgggttggctaatacaggtaattgctgcaactataaatattgcgaatatatacattaattttttattcatatgtgaatgcttcgattttctttttattttgaaagcgtcaagtttatactcatcaataataaaaagtagtcagttaatgcacttaagggattattaacaaatgaataaggaagaacaatatcttctttttgcgctttctgcgcccatggaaatacttaatcagggttgcaaacccgcgcatgactcgccaaaaatgtataccgggataaaagaattcgatctctcatcatcctggggaataaataatcgtgatgatttaattcagactatttatcagatgactgatgatggtcatgccaatgatttagctggcttatatctgacatggcatcgctcttcccctgaagagtggaaagcattaattgctggtggctcggagagagggttgatttatacccaattcgttgcccaaaccgctatgtgctgtggagaagggggaatcaaagcctgggattatgttcgaatggggtttctgtcacgggtcggtgtgctcaacaactggctgacggaagaagagagtttatggctgcaatcgtgcgtctatgtacgagctcaccattactatcacagctggatgcactatttttccgcctattcgttaggacgtctctactggcaatcttctcagtgcgaagacaacacttcgctacgcgaggcgctaaccctgtacaaatacgatagcgccgggagtcggatgttcgaagagctggcagcgggaagcgatcgtttctatgccacgcttccctggcagccattaactgtccagcctgaatgcccggtaacgcttaaggatgtgagcgacctatgaaaacatgttggcaaatcctcgaaattgaaagcacgacgcaaatagacattatccgccaggcttatcttgctcgcttaccgttatgtcatcccgaaaccgatccgcaggggtttaaagcattacgccaggcctatgaagaggcgctgcgactggcggtaaatcctgtcgaggaagcagatgatgaagaaaaagatgccgccgctgaacatgaaatactgcgtgcattcaggacattactggattcagaaagtgatcgttttcagccctccgcctggcagaaatttattcagcaattaaatacctggaacatggaggatgtcgatcaattacgctggccgctgtgtgcaatcgctatagaagcgcgatatctttcattaaattgtgcttctttgctggcagagcgtttgaactggcattcgtttaatgacagcgaaggaatggatgaggaagaaagggaggcttttcttgaggccattcaggctggtgattgtttcgatttccttagccttctggaatatcccgttgcgttgcagaaccagactgttgagtattacttcgcgctggaacgttgctgccgttaccatcctgactacgtcactgcgtttttggcgatggaaggtccgtggttcattcctgatgatgcaaagttacatcgcaaactgttgcgctggtacagctcggtgcaaacaggtatggcggaactcattcctgtagccaaacagtggcaaatggaagaaccagaaagcgaagatgcccgatattacttgtgtgctcaaaggttgtactgcggcgagggggaaagcctgcttgccgatctctgcgcgtaccgggaaagttacccatctacacaagctgataatttgttgttgcagtggagcaagcgtcattgcccggattatttcgcgttattagtgatggttatcgaagcgcggagcatggtagatgcgcaaggtcaaccgctgaaatatgttcctggtgagagcgcccggacgcggctgttatgggcggaaattttacatagcggaaaattatcgccgttaggtcaatcgtttattgagtcgttattcttcaaacgcaaagcatgggcgtggtggaaatcgagagtcggtagcgagacagaagaagattcaccgttactggatttgtatcgggtagcggaacaggtagtacttgaagcgtttccgaaacaagagatgctggcccgtcttaatacaaggctggaaggcggagatgctcatccattagaggccattatcacccggatgctgttgacgaaagtaaaactcgagccggaggatgaagatgtcgatgagccaacacctgaaaaccatgaagaaaaaaatgatgagggtgaaaaaccacagagcattaccagcattatcaaaatcagtttaacggtgctggttataggttatgctctcggcaaaatcgcgatgttgtttagctgacgatgtgttttttgcgccgatgccggatgcagcgtttacgccgcatccggcagccgtgtttatgggatctcaatggctaaataatcgctcgcccgccgccgaacttcatccacgcgggccatatcgtttgactgcaacgccgcatcaaaatcggtgatcacccggccgatctcttctcgctcgtcacccagcgcccgcgcccacaactcttccagtttggctttaaaggtgcgattgatgagcatatcgcgcggataaattttcaatgcggataaccgcgtccgactctcttcaatctgctgcgcgctcaatgttaccgggctatgattaatgactctggacttaacgctgccatcttccagaagcacgtcaacttcaagcaagccgttgatatcataactaaagcgaatatcaatcgactgataagccccggttttcttcaacggcacatcgaaggattccaccagaatgttatttttaactttgtggttttctccctgatagacgttaaccgtaatagaatcctgttccgggtgcatggtcgagtaagtttctacacgcgacaccggtactgtggtgtttcgttcaataatcggcgagaaaatgccggaaacgccctggcggttaacttcaacgcccaacgagtaagggcaaatatcagtgaggatcacttcttcaatatcttcactgcgtaagcggcaggcggcctggattgctgcgcccagcgcgacaatggtgctcggatcgtaactttgatacggtaatttgccaaacagacgcacggcgattcgctgcaccagcggcatttgtgacgcgccgccaaccagcaccagactgtcgatttgactcggcttcagacgcgcatcgcgcaacgcctgttcaatcggcactcgcaagcgattgagcagcggcaaccacaaatcttccagttcattctcataaaattcgcattcccgtgcttcatcctggtactgccagcgaatgtgtaatggcgattgattgctacattttgccgcttccacacaggcatacaaggctgccagttcactctcgttaagcgtggtcctggtgacatccgcgcgctttaaaacgtcatcgaccaacatatgggtaaaatcttcgccaccgaggaagttgtcgccagcggaggcgtgaacttcaatcaccggcgtggcgtactcaagcaccgtaacgtcaaacgtgccgccaccgagatcaaacaccagcgaacgggtattttgttgggtatgcaggccatacgccatcgcagctgctgtgggttcattaattaagcgtaccgcatttaacccggctaactccgctgctaaacgggtatgcttgcgttgttcatcgctgaaataagccggaacggagatcaccacatctttaatcggacgttgcagaaattcttcggcatcttcttttaatgagcgtaataccaaagaggacagttctggcgcgttaaatgtgtcgctgcctaaccgccagttggtattactgcccattgcacgtttaaataacgctgccgttttatccggatgcgaagtactgagagatcccctcataatttccccaaagcgtaaccatgtgtgaataaattttgagctagtagggttgcagccacgagtaagtcttcccttgttattgtgtagccagaatgccgcaaaacttccatgcctaagcgaactgttgagagtacgtttcgatttctgactgtgttagcctggaagtgcttgtcccaaccttgtttctgagc

SEQ ID NO: 34 - DNA, 79703 bp, Escherichia coli
  source 1..79703: mol_type = genomic DNA
gctcagaaacaaggttgggacaagcacttccaggctaacacagtcagaaatcgaaacgtactctcaacagttcgcttaggcatggaagttttgcggcattctggctacacaataacaagggaagacttactcgtggctgcaaccctactagctcaaaatttattcacacatggttacgctttggggaaattatgaggggatctctcagtgctacgcatggaacttttaattaaataagcacaagaatgttaaatttaataaacaaaaggttatttctctgtatgataaaaatcacccgttatgacttattagtgaaattcgtttttcgagtgttagaaatttatatctaaatagcgttgattaatgagcaaagccagactcctgtaacgctcacaagactcatctgcctgcgacgggtattctggtcagtagtagatgtttaaggcgtggcagagacatttcatccttacgctacggcattggcccgcatacaaatcgtggttgtgacactcacttatcatcagtgagcgaacagagaatagttcagtgatttgagtaattaacctgattaaatgaagaggcatgataaatgataatactctggctttatcgttaattacttaattccacatgtaagcaatttgcccgcttggcatagcaggcattttttccaggtacttttgaatgagtactgatggataaatacattgcagtggcgtgccacgtaccaaaacaccagccctcattcgaaaccacccaccgcacttcttccttgaaatggcgttagtcatgaaatatagaccgccatcgagtaccccttgtacccttaactcttcctgatacgtaaataatgatttggtggcccttgctggacttgaaccagcgaccaagcgattatgagtcgcctgctctaaccactgagctaaagggccttgagtgtgcaataacaatacttataaaccacgcaataaacatgatgatcatatgatgtaaataacagatttttatgcgttctcattcatccttgctcgtcattacactcgacataaaacccgacaccgcttccattcgcaaagtcgatactcgcagtcaacaagcaaatgttaataattagcactatctatagttatcatcgattcaatgatagtttgtaatgattttgtatctaataatataactttattacattagctgaagagttttcgcatcattatgatatctgttacttttcactccataaaaataaacttcatatagcaatatattctttcatagatcttattctgctaatcattagtttcgtatgagcgatttttgacagttgcctctccagaccacatcgataattaataaaacagatttaagcattatccttttccatataaatattggataaaagtaggacatctgtttgcaattactttcacaacaattaaacatttttatgtttccgtatacatcatattactctaccattagaggaactttattatgttttctataaaaccaggacccagaaatttacctatcgacaaccccacattgttatcatggaacattactgacggggatctaaattccaaattaaatacattagaatatctaaactgtataacaaatattattaattcttgtggagtttaccctcaaggattaaaagacagagaaattatatcaacttttcacgcagaaaaagttattaatgatctgttaaaaaacgattataaaatttccctttctccagatacaacttatcgagagttgaataaagcagcacagcgtagcattacagcgccagacaggataggagaaggaaaatcatgggtttatcaacgagatacaatgattgaaagaggtgataacagcggtgttcatcagtatggtcctgctgaacatttcacccacattatatctgacaaaccgtccccaaaagatgagtatattgcatatgctattaacattcctgactatgagctggcagccgatgtatataatattaacgtgacgtcaccttccgaacagcaagaaacatttaaaatactaatcaatccagaacatctacggcaaacacttgagcgtaaatctcttactgctgttcagaaatcacaatgtgaaatcatcacccctaaaaaacctggcgaagcgattcttcatgcttttaatgccacctaccagcaaatcagggaaaatatgtctgagtttgcacgttgccattatgggtatatacaaatccctccagtgacaactttccgcgccgacggaccagaaactcccgaagaagaaaagggttactggtttcatgcttatcaacccgaagatctttgtaccatccataatccaatgggagatttgcaggattttattgcattggttaaagatgctaaaaaatttggtatcgatatcattcctgattatacctttaactttatgggaattgggggtagtggtaaaaatgacctggattatccctctgctgatatacgagcgaagatcagtaaagatatagaaggtggtatccctggctattggcaaggtcaggttttgattccattcattaaagatccagtaacaaaagaacgtaaacaaatccatccagaagatatacatctcactgcaaaagacttcgaagcaagtaaagataacatctctaaggatgaatgggaaaacctccatgcattaaaagaaaagcgtttaaatggaatgcctaaaacaacacccaaaagtgaccaggttattatgttgcaaaatcaatacgttcgtgaaatgcgaaaatatggcgtacgaggtttacgttatgatgcggcaaaacactcaaaacatgaacaaatagaaagatcaataaccccaccgcttaaaaattataatgagcggttacacaatactaacttatttaacccaaaatatcataaaaaagccgttatgaattacatggaatatctggtaacttgtcagttggatgaacaacaaatgtcatcactgctttatgaaagagatgatttaagcgccattgatttttcattgctcatgaaaacgataaaagccttttcatttggtggagatcttcaaacccttgcatcaaaaccgggttccacaatctcaagtatcccatcagaaagacggatattgattaacattaaccacgattttcctaacaatggtaatcttttcaatgactttctatttaaccatcaacaagatgaacaattagcaatggcatatatagccgctctgccgttcagcaggcctttagtttactgggatggccaagtattaaaatcaacgactgaaattaaaaattatgatgggtccacgcgtgtcggcggtgaggcgtagcttaataaaggttgctctacctatcagcagctctacaatgaattccacgcattatatatagataaagcaggaatatggagcgcatttgagggtgtatctgcaactaaaaacgttctggcctttagtcgtggggattctgtgaacattaatcactctcctcatgatggactagttataataaataaaggaaacgaagaagttgaaggtacctggcctaacaaattgcaacctggaatatacaaaaacatggggagtaatagcgttaacattattattaataatacccgaaaaattatcccccctggtaaagtatttacgcttagaggcggaactctaaatatcaatattcctgggcgtagcgctcttcttttagggaaaacaggagaaccgccgaactatctctatttataatttaatgttatatctgccccgataaaacggggcagataatatgtttagtttactaacggtcattttgcagtgaagccatttactgttttttatcgaccagataatctgttctctaatgttaactccccctaacctgttgctttagttattcatttcctgtctcactttgccttaataccctacgttaaatgttactaatttgttgcttttgatcacaataagaaaacaatatgtcgcttttgtgcgcatttttcagaaatgtagatatttttagattatggctacgaaatgagcatcgccatgtcaccctacatctcataagaggatcgcttctgatgaatgcactgaccgccgtacacaataacgctgtcgattcaggccaggactatagcggattcacactcatcccgtcggcgcaatccccgcgtctgctggaactcaccttcaccgaacagacgaccaaacagtttctcgaacaggttgccgaatggcccgtgcaggcgctggagtacaaatcgtttctgcgttttcgggtaggcaaaattcttgacgatctgtgtgcgaatcagctgcaaccattgctgttgaagaccctgctaaaccgtgctgaaggtgcgctgttgatcaatgcggtgggtatcgatgatgtggcgcaggcagatgagatggtgaagctggcaacggcggtagcgcatctgattggtcgctcaaatttcgatgcgatgagcggtcagtattacgcgcgtttcgtggtgaaaaatgtcgataactcagacagctatctgcgtcagccgcaccgcgtgatggaactgcacaacgacggcacgtatgtcgaagagatcaccgattacgtgctgatgatgaaaatcgatgagcaaaacatgcagggtggaaattcgttgctgctgcatctcgatgactgggaacatctggaccactatttccgccacccgctggcgcgtcgcccaatgcgctttgccgcgccgccgagtaaaaacgtcagcaaagatgttttccatccggtgttcgacgttgatcaacagggtcgcccggtgatgcgttatatcgaccagttcgtccagccaaaagacttcgaagaaggcgtgtggttgagcgagctttcgggcgccattgaaaccagcaaaggcattctttctgtgcccgttcccgttggcaaattcctgttgattaacaacctgttctggctgcacggtcgcgaccgctttactccgcacccggatctgcgccgtgaactgatgcgtcagcgtggctatttcgcttacgccactcaccactaccagacgcatcagtagcgcaaaggaattgagcggatgtatgattttgtgattattggcggtggcatcatcggcatgtcgaccgccatgcaactgattgatgtctacccggacgcccgcattgcgttgctggaaaaagagtccggcccggcctgtcaccagacgggccacaacagcggcgtgatccatgccggggtttattacacgcccggtagcctgaaggcacagttttgcctggcgggaaaccgcgccactaaagccttttgcgatcaaaacggcattcgctatgacaactgcggcaagatgctggtcgccacctctgaactcgaaatggaacggatgcgcgcgttgtgggaacgcacggcggcaaacggtatcgagcgcgagtggttaaacgccgtggaactgcgcgagcgcgaaccgaatatcaccgggcttggcggcatttttgtgccgtccagcggcattgtcagctaccgcgaagtcacagcggcgatggcaaaaattttccaggccagaggcggtgagattatttataacgccgaagtcagcgccctcagtgagcataaaaacggcgtggtcgtccgaacccgtcagggcggcgaatatgaagcatcgacgctgattagctgttccgggctgatggctgaccggctggtgaaaatgctcggcctcgaaccgggttttattatctgcccgttccgtggcgagtatttccgccttgcgccggagcataaccagattgttaaccatctgatttaccccattcccgacccggcaatgccgtttttgggcgttcatctcacccgcatgatcgacggcagcgtgaccgtcgggccaaacgcggtgctggctttcaaacgcgaaggctatcgcaagcgcgacttctcatttagcgacacgctggagattttgggctcgtcggggattcgccgggtgctgcaaaaccatctacgctcaggactgggcgagatgaaaaactcgctgtgcaaaagcggctatctgcggctggtgcaaaagtattgtccccggctttcgttaagcgatctccagccctggcccgccggtgtgcgggcgcaggcggtatcgccggacggcaagctgattgacgattttctgtttgtcaccaccccgcgcacgatccacacctgcaatgcgccctccccggcagcgacatcagcaattcctattggtgcgcatattgtcagcaaggtacaaacgctgttggcaagccagagtaaccccggacgcacgctgcgagcggcacgtagtgtggatgccttacacgccgcatttaatcaataacctttgaaaacaggatgtagcgatgaaacttaacgacagtaacttattccgccagcaggcgttgattaacggggaatggttggacgccaacgatggtgaagtcatcgacgtcaccaatccggcgaacggcgacaagctgggtagcgtacccaaaatgggcgcggatgaaacccgcgccgctatcgacgccgccaaccgcgctctgcccgcctggcgtgcactcaccgccaaagaacgcgccaacattctgcgcaactggttcaatttgatgatggagcatcaggacgatttagcgcgcctgatgaccctcgaacagggcaaaccgctggctgaagcgaaaagcgaaattagctacgccgcctcctttattgagtggtttgctgaagaaggtaaacgcatttatggcgacaccattcctggtcatcaggccgataagcgcctgattgttatcaagcagccgattggcgttaccgcagctatcacgccgtggaacttcccggcggcgatgattacccgtaaagccggcccggcgctggcggcaggctgcaccatggtgctgaagcccgccagtcagacgccgttctctgcgctggcgctggcggagctggcgattcgcgcgggcattccggctggcgtatttaacgtggtcaccggttcggcgggcgcggtgggtaacgaactgaccagcaacccgctggtgcgcaagctgtcgtttaccggttcgaccgaaattggccgccagttaatggaacagtgcgcgaaagacatcaaaaaagtgtcgctggagctcggcggcaacgcgccgtttatcgtctttgacgatgccgacctcgataaagccgtggaaggcgcactggcctcgaaattccgcaacgccgggcaaacctgcgtctgcgccaaccgtttatacgtgcaggacggcgtgtatgaccgctttgccgaaaaattacagcaggcggtgagcaaactgcacatcggcgacgggctggagaaaggcgtcaccatcgggccgctgatcgatgaaaaagcggtagcaaaagtggaagagcatattgccgatgccctggagaaaggtgcgcgtgtggtttgcggcggtaaagcacacgaacgcggcggcaacttcttccagccgaccattctggtggacgttccggccaacgctaaagtgtcgaaagaagagacgttcggccccctcgccccgctgttccgttttaaagatgaagccgatgtgattgcacaagccaatgacaccgagtttggtcttgccgcctatttctacgcccgtgatttaagccgcgtcttccgcgtgggcgaagcgctggagtacggcatcgtcggcatcaataccgggattatttccaatgaagtggccccgttcggcggcattaaagcctcgggtctgggtcgtgaaggttcgaagtatggcatcgaagattacttagaaatcaaatatatgtgcatcggtctttaactggagaacgcgaatgagcagcaataaagagttaatgcagcgccgcagtcaggcgattccccgtggcgttgggcaaattcacccgattttcgctgaccgcgcggaaaactgccgggtgtgggacgttgaaggccgtgagtatcttgatttcgcgggcgggattgcggtgctcaataccgggcacctgcatccgaaagtggttgccgcggtggaagcgcagttgaaaaaactgtcgcacacctgcttccaggtgctggcctacgagccgtatctggagctgtgcgagattatgaatcagaaggtgccgggcgattttgccaagaaaacgctgctggttacgaccggttccgaagcggtggaaaacgcggtaaaaatcgcccgtgccgccaccaaacgtagcggtaccatcgcctttagcggcgcgtatcacgggcgcacgcattacacgctggcgctgaccggcaaggtgaatccgtactctgcgggcatggggctgatgcctgggcacgtttatcgcgcgctttatccttgcccgctgcacggcatcagtgaagatgacgctatcgccagcatccatcgaatcttcaaaaatgacgccgcgccggaagatatcgccggcatcgtgattgaaccggttcagggcgaaggcggtttctacgccactacgcctgcttttatgcagcgtttacgcgcgctgtgtgacgagcacgggatcatgctgattgccgatgaagtgcagagcggcgcggggcgtaccggcacgctgtttgcgatggagcagatgggcgttgcgccggatctcaccacctttgcgaaatcgatcgcgggcggcttcccgctggcgggcgtcaccgggcgcgcggaagtgatggatgccgtcgctccaggcggtctgggcggcacctatgcgggtaacccgattgcctgcgtggccgcgctggaagtgttgaaggtgttcgagcaggaaaatctgctgcaaaaagccaacgatctggggcagaagttgaaagacggattgctggcaatagccgaaaaacacccggagatcggcgacgtacgcgggctgggggcgatgatcgccattgagctgtttgaagacggcgatcacaacaagccggacgccaaactcaccgccgagatcgtggctcgcgcccgcgataaaggcctgattcttctctcctgcggcccgtattacaacgtgctgcgcatccttgtaccgctcaccattgaagacgctcagatccgtcagggtctggagatcatcagccagtgttttgatgaggcgaagcagtagcgccgctcctatgccggaggcgacgctgcgcgtcttgtccggcctacggggatccaggtcggataaggcgtttacgccgcatccgacaatctgtacgtgaacaggaagaaatctatgttggccgggtaaggcggagccgctctccggcaaaaagaatcaataacaattatacgcgtgacccgacgcgggaaatgtcggggcgctctcccaagtgacacactttcgagaggattcaggatggggcaatcatcgcaaccacatgagttaggcggcgggctgaagtcacgccacgtcaccatgttgtctattgccggtgttatcggcgcaagtctgtttgtcggttccagcgtcgccatcgccgaagcgggcccggcggtattactggcctatctgttcgccggattactggtggttatgattatgcgaatgctggcggaaatggcggttgccacgcccgataccggttcgttttccacctatgccgataaagccattggccgctgggcgggttataccatcggctggctgtactggtggttttgggtactggttatcccgctggaagccaacatcgccgctatgatcctgcactcgtgggttccaggcattcccatctggttattttccctcgtcattaccctcgccttaactggcagtaatttattaagcgttaaaaactacggcgaatttgagttctggctggcgctgtgcaaagtcatcgctatcctggcctttattttccttggtgcagtcgcaattagcggtttttacccttatgccgaagtgagcgggatctcaagattgtgggatagcggcggctttatgcccaacggcttcggtgcggtattaagcgcgatgttgatcaccatgttctcgtttatgggcgcagaaattgtcaccattgccgccgcggaatccgacacgccggaaaaacatattgtccgcgctaccaactcggttatctggcgtatttctatcttctatttgtgctctatttttgtcgtagtggcgttaataccgtggaatatgccggggctgaaagccgttggttcttatcgctcggttctggaattgctcaatattccccatgcgaaattaatcatggactgcgtgatattactttccgtaaccagctgtctgaactcggcgctgtataccgcgtcaaggatgctctactccttaagccgtcgcggtgatgcgcccgcgctaatgggcaaaatcaaccgcagtaaaaccccgtatgtggcggtgttactctccaccggagcggcatttttaacggtggtggtgaactattacgcacctgcgaaagtgtttaaattcctgatagacagctccggcgctatcgccctgctggtttatttagtcatcgccgtttcacagttgcggatgcgcaaaattctgcgagcagaaggaagcgaaattcgcttgcgcatgtggctttatccctggctcacctggctggtcatcggctttattacctttgtgttggtagtgatgctattccgtccggcgcaacagttagaagtgatctccaccggcttattagcgatagggattatctgtaccgtgccaattatggctcgctggaaaaagctggtattgtggcaaaaaacacccgttcataatacgcgctgataatgatcaggagtcacaccatgaccattacgtctctggatggctatcgctggctgaagaacgatattattcgcggtaattttcaaccggatgaaaaattacggatgagtttgctgacatcgcgttatgcacttggcgttgggccgttgcgggaagcactttctcaactggtggcggaacggctggtcacggtggtgaatcaaaaagggtatcgggtggcgtctatgtcagagcaggagctgctcgatattttcgacgcccgcgccaatatggaagcgatgctggtcagtctggcgattgcccgcggtggcgatgaatgggaggcagacgttctcgcaaaagcgcatctgctcagtaagctggaagcctgtgacgccagcgagaaaatgcttgatgagtgggatctgcgtcatcaggcgtttcatacagcaattgtggcgggctgtggttctcactatttgctgcaaatgcgtgaacggttgtttgatctggcggcgcgctatcgatttatctggctgcggcgaacggtgctttcggtagaaatgctggaggataaacacgatcagcaccagaccctgactgcggcggtactggcgcgagataccgcgcgcgccagtgagttaatgcgccagcatttactgacgccaattcccattatccagcaggcgatggctggcaattaactactcttccggaatacgcaacacttgccccggataaattttatccgggctttttagcatcggtttattcgcttcgaagattttattgtacagattagcgttaccgtagacctgtttggaaatggcactcagagtgtcgccagacttaacggtataaaactggctggcagtggctggtgtcgccgttttcacctgatcatcgacactggcaataccggaaatattcccaaccgcaacaaggattttctccttcgcctcctgactcaggccgtcaccagtgaccgtcgctttgccgtcggcaatttgaatgttcactttatcggcatcaggtataccggttttgctcagatgctcctgcaccttcttcgcctgatcgtctttatcgtgctgacctgtaaccgcgtcccagagtttttctccggcatctttcacaaaattgaacagacccatagctacctcattcgttaacggaaacactcagaaagtgtagcagaggaacgcggcgcgttaacgccgcgggggtgagcacaggtttaatcgcgggtttgcacccagaacgcgtgaatcaaaccggggatatacccaagcagtgtcagcagaatattaataatgaacgcccaaccgaaccctttaccgagcagcacgccgagcggcggcagaatgatggtgatgacgattctccagaaacccatatgtactccctataagaaaattactcattgtttaaaaagagattttatctcttaagcgtagtaattttagcggagcctgccagtttcagcttacgcttttactctcatttacgctgctgaggctggtatatattgcatttttagtttagagtttacttaatttagaaaatacttaaataaatatgactgaactcgcgcaattacaggccagtgccgaacaggcagcggccttattgaaagcaatgagccatcctaaacgattgctgattctgtgcatgcttagcggttcccccggcaccagcgcgggagagctgacgcgcattaccggactgagtgcctctgcgacatcacagcatctcgctcgtatgcgggacgaagggcttatcgacagccaacgggatgcccaacgcattctatattccattaaaaatgaggcggtaaatgccattatcgccaccctgaaaaatgtctattgtccgtaaggagtcactatggctttgacaaccatttcgccgcatgatgcacaagaattaatcgcacgcggcgcaaagttaatcgatattcgtgacgctgatgaatatcttcgtgaacatattcctgaagcagatctggctccattatccgtgctggaacagtcaggtcttccacctaaattacgtcgcgagcaaattatattccactgccaggcaggtaaacgcaccagtaataacgccgataaattagcagcgattgccgcccccgcagaaatatttttactcgaagatgggattgatggctggaaaagagctggattgccagtagcggtaaataaatctcaacccttgccgttaatgcgccaggtgcagatcgctgcgggtggtttaatattaatcggcgttgtactgggttataccgtaaatagcggtttcttcttattaagtggctttgttggtgccgggttactgtttgcaggaatcagcggtttttgtggaatggcaaggttgttagataagatgccgtggaaccaacgaacttgagaagcgacgccggacgcgccctagcagcgacatccggcctcagtaattagatcaggaaatcgtcgagagatttaccttctgccagcgcctgagcaattggcttcggtgtacggccctgaccggtccaggttttagtttcaccgttaacatcagtgaatttatatttcgccggacgcggctggcgttttttaccagcacgtggtgcagcagcagagctattacccaataactcttccgggttaattccgtcagctttcatcagctccagccaggtgctaattttttcctgacgctcagccagttcacgctgctgctgttcttcttcttcacgtctttctttagtgacaaccctgaatttttcgagcatttcttcaagaacgtcaatggagaattcgcgagccatcgcacggagggtgcgaatgttatttaaactttgtaacattacggacataataaagaaaaccttttaacgccaaaacaaaaaagtatttcgtcgcgtagtgtaagcgatcacttattatatttccacaaaatttaatctatttacagtcctgcgcgagattatttcagctgttattttctgaaactctcagaataatttcaagattatatattagccattttgatgagtaatttagattattggtgaacagagtggcgctctctgctcgctaattccgcaagcctgacaaaaccgaagtgaataaaaatgcaatataatagaataaaagaaaacacccctcactggtgctttctgctgttaatgtacattttctggcataaaaaatgctgtaaatgacacggtcacgacatacaccgaattctctacgcttatagcgttacctcacccccaaactttcattagtgaaattaaaggcaaggtcatatctaattgatttaattgaaaataaattatatcggcatgtaaaaatccacaatgtacaaaaaacgagccgttacggaatattttatctacaaaaactgactaaataaaaatttttcactaattgaatagtcatagccagcgatatacgctatgcgaaaatgcagatggcaatgagatccactgctttcatctccattaacatcccattacgcttttattaaggagcattagcatgttctcaccgcagtcacgcttgcgtcatgcagttgcagatacgttcgcgatggttgtttactgttctgtcgtgaacatgtgtattgaagttttcctctccggaatgagcttcgaacagtctttttattccagattggtagcgattccggtgaacatcttaattgcatggccatacggtatgtaccgcgatctgtttatgcgcgcggcacgcaaagttagcccgtcgggctggataaaaaatctggctgatatcctggcttatgtgacgttccagtcaccggtgtatgtggcgatcttgttagtggtgggcgcagactggcatcagattatggcggcggtcagttcaaacatcgttgtttcgatgttgatgggggcggtttatggctacttcctcgattattgccgccgactgtttaaagtcagccgttaccagcaggtaaaagcctgactcttcttttcgcgactggcatcgccagtcgcgtctttaactggcttcgccaaataaaccattcaaataacgttcaagcgcaacacgcgaactgaagccatgcgggataccgtaatgctcgtgtcgctcgcctgctaaatagagcggaaattgctggtaatgatcgcaagttttaatatcggaagcgggttcagccagtgttgaactgcgttcttttaatgttggatgaattaccagagcggtacgtcccattcgcgcttcgcgattaacatagacataattttccccacggcggtaaccatacgctttctgggttaccacatcgacagtaaaaccgactttttcaagtacgcgcgccacctcgtctggtcgtaaatacatatttgatcctcgttattatcaaccgcgggcctaccttacctgattgcgcattcacaacgctttcagaaaagtccataaagccgcgatgaacctcagttaagaaaattatggtctacactgaaaattacatcgaattctaatgggggatcatatgtttaaccgaccgaaccgcaacgacgttgatgatggcgtgcaggatatccagaatgatgtcaatcaattagctgacagcctcgaatctgtattaaagtcctggggcagcgacgccaaaggggaagctgaagccgcacgcagtaaagctcaggcattgctgaaagaaaccagggcgcgaatgcatggtcgtactcgcgtccagcaagccgcacgcgatgccgttggctgcgcggattcttttgttcgtgaaagaccctggtgtagcgtgggtacagcagctgcggtaggtatttttatcggcgcactgttaagcatgcgcaaatcgtagtgcaaaaatgataataaatacgcgtctttgaccccgaagcctgtcttcggggtttctttttgcctggtgaatcacaaaaattcccctaccccgtcacgctcatatccagggtaatttcgaccactatttgctatatattgtgtggttgaatcttttttcaactacatctagtatctctgtatcaacagtgagacaacccgacgcgtatcatcgcgccgtatcttcattttaaacggaaatacgaatcatgcgcattactatttacactcgtaacgattgcgttcagtgccacgccaccaaacgggcgatggaaaaccggggctttgattttgaaatgattaatgtcgatcgcgttcctgaagcggcagaagcgttgcgtgctcagggctttcgtcagttgccggtagtgattgctggcgatcttagctggtctggtttccgtccggacatgattaaccgtctgcatccagcgccacacgcggccagtgcatgagccagctcgtctacttctccagcagctccgaaaatacgcagcgttttatcgaacgtttaggactgcccgcggtgcgcatcccgctcaatgagcgggaacggattcaggtagacgagccttacatcctgatcgtgccctcttacggcggcggcggtacggctggcgcggtgccacgacaggtaattcgctttttaaacgacgagcacaaccgggcgttgcttcgcggcgttattgcttcgggtaatcgcaactttggtgaggcgtatggccgtgccggagatgtgattgctcagaaatgcggcgtgccgtggctgtaccgttttgaactcatgggtacgcaaagcgatatcgaaaacgttcgtaaaggagtaaccgaattttggcaacgacaaccgcagaatgcctgacgcaggaaacgatggattaccacgcgctgaatgcgatgcttaacctctacgatagcgcaggtcgcattcagttcgataaagaccgccaggccgttgacgcctttattgcgacgcatgtgcgtccgaacagtgtgaccttcagtagccagcagcagcgcctgaactggctggtcaacgaaggttactatgatgaaagcgttcttaatcgctactctcgcgactttgtcattacgctgtttgcccacgcacacaccagcggttttcgtttccagacattcctcggggcatggaagttttacaccagctatacgttgaagacattcgacggtaaacgttatctggaagattttgccgatcgagtcacgatggtggcgctgacgctggcacaaggcgatgcgacgctggcgttgcaactgaccgatgaaatgctgtcaggacgctttcagccagccacgccaacattcctcaactgcggtaagcagcagcgcggcgaactggtttcctgttttctgctgcgtattgaagacaatatggagtcgattggccgggcggtaaattccgcactgcaactgtcgaaacgcggcggcggcgtggcatttttgctgtcgaatctgcgggaagcgggcgcgccaattaaacgtattgaaaatcaatcttctggcgtgattccggtgatgaaaatgctggaagacgcattttcctatgccaaccagctcggcgctcgtcagggggctggtgcagtctatttacatgcccatcatcccgatattctgcgttttctcgatacgaaacgggaaaatgccgacgagaaaatccgcattaaaacactgtcgctgggcgtggtgatcccggatatcactttccatctggcaaaagagaatgcgcagatggcgctgttttcgccttatgacgtagagcgagtttatggcaagccgtttgccgatgtggccatcagccaacactatgacgaactggttgccgatgaacgcattcgcaaaaaatacctcaacgcccgtgatttcttccagcgactggcagaaatccagtttgagtccggctatccctacatcatgtatgaagacacggtaaaccgtgctaaccctatcgccgggcgcataaatatgagtaatctctgctcagaaattttgcaggttaacagcgcctcagagtatgacgagaatctcgactatgcccgtacaggccatgatatttcctgcaatttaggttcgttgaatattgcccacaccatggattcccccaactttgcccgcacggtagagactgccgtacgcggtttaacggcggtgtcagatatgagtcatatccgcagcgtgccgtccatcgaagccggaaatgccgcctcacacgccatcgggctggggcagatgaatttacacggttatctggcgcgagaaggcatcgcttatggttcgccggaagcactggatttcaccaatctctatttctataccatcacctggcacgcactgcgtacctcgatgttgctggcacgcgaacgcggtgaaaccttcgccgggttcaaacagtcacgttatgccagtggtgaatatttcagccaatatctgcaaggtaactggcagccgaaaacggcgaaagttggcgaactgtttgcccgcagcggtattacgttacctacccgtgagatgtgggcgcaactgcgcgacgacgtgatgcgctacggcatttataaccagaatcttcaggcggtgccgccaaccggttctatctcttatatcaaccatgctacgtcgagtattcatccgattgtggcgaaagtagagatacgcaaagagggcaaaacaggacgcgtttactaccctgccccgtttatgactaacgagaatctggcgctgtatcaggatgcttacgaaatcggcgcagaaaagatcatcgacacctacgcggaagcgactcgccatgtcgatcagggtttgtcgctgacgctgtttttccccgataccgccaccactcgcgatatcaacaaagcgcagatttacgcctggcgcaaaggtatcaaaacgctctattacattcgcctgcgtcagatggcgctggaaggcactgaaattgaaggctgcgtctcctgtgcactttaaggaatatctatgaaactctcacgtatcagcgccatcaactggaacaagatatctgacgataaagatctggaggtgtggaatcgcctgaccagcaatttctggctaccagaaaaggtgccgctgtcgaacgatattcctgcctggcagacattaactgtcgtagaacaacaactgacgatgcgcgtttttactggcctgacgctgctcgacacgctgcaaaatgttatcggcgcgccttcgctgatgcccgatgcactcacgcctcatgaagaagcggtattatcgaatatcagctttatggaagcggttcatgcccgctcttacagttcgattttctcgacgctgtgtcagaccaaagatgtcgatgccgcctacgcctggagtgaagaaaacgcaccgttgcagcgaaaagctcagattattcagcaacattatcgcggtgatgatccgctgaaaaagaaaatcgccagtgtgtttcttgaatcttttttgttctattccggtttctggctgccgatgtatttttccagccgcggaaagctgaccaataccgcagatctgatccgtctgattatccgcgatgaagcagtccacggttactacataggctataaatatcagaaaaacatggaaaagatatctctgggacaacgtgaagagttgaagagtttcgccttcgatttattgctggaactctacgacaacgagttgcaatacaccgatgagctgtacgccgaaactccgtgggctgacgatgtgaaagcgtttctctgttacaacgccaataaggctttgatgaatctgggctacgaaccgttatttcccgcagaaatggcggaagtgaatccggcaatcctcgccgcgctttcgccgaatgccgatgaaaatcacgatttcttttccggttcaggctcctcttatgtgatggggaaagcggttgaaacagaagatgaagactggaatttctgagggtgttattttcaaaaatatcactacccgcagcagggaaataattcccgccaaatagctttttatcacgcaaatattctgtagtgatctacactgatactctgttgcattattcgcctgaaactacaatattcaggcgttttttcgctatctatgacaaaaaatatcaacttttctcgatttgctctcagcccttatatcacgggaaattccggcgatttgctcgcatcaatattcatgccacatttgccctcaggggttgcctcagattctcagtatgttagggtagaaaaaagtgactatttccattgggtaatatatcgacataaacaaataaaggaatctttctattgcatggcaattaaattagaaattaaaaatctttataaaatatttggtgagcatccacagcgagcgttcaaatatatcgaacaaggactttcgaaagaacaaattctggaaaaaactgggctatcgcttggcgtaaaagacgccagtctggccattgaagaaggcgagatatttgtcatcatgggattatccggctcgggtaaatccacaatggtacgccttctcaatcgcctgattgaacccacccgcgggcaagtgctgattgatggtgtggatattgccaaaatatccgatgccgaactccgtgaggtgcgcagaaaaaagattgcgatggtcttccagtcctttgccttaatgccgcatatgaccgtgctggacaatactgcgttcggtatggaattggccggaattaatgccgaagaacgccgggaaaaagcccttgatgcactgcgtcaggtcgggctggaaaattatgcccacagctacccggatgaactctctggcgggatgcgtcaacgtgtgggattagcccgcgcgttagcgattaatccggatatattattaatggacgaagccttctcggcgctcgatccattaattcgcaccgagatgcaggatgagctggtaaaattacaggcgaaacatcagcgcaccattgtctttatttcccacgatctcgatgaagctatgcgtattggcgaccgaattgccattatgcaaaatggtgaagtggtacaggtcggcacaccggatgaaattctcaataatccggcgaatgattatgtccgtaccttcttccgtggcgttgatattagtcaggtattcagtgcgaaagatattgcccgccggacaccgaatggcttaattcgtaaaacccctggcttcggcccacgttcggcactgaaattattgcaggatgaagatcgcgaatatggctacgttatcgaacgcggtaataagtttgtcggcgcagtctccatcgattcgcttaaaaccgcgttaacgcagcagcaaggtcttgatgcggcgctgattgatgcgccgttagcagtcgatgcacaaacgcctcttagcgagttgctctctcatgtcggacaggcaccctgtgcggtgcccgtggtcgacgaggaccaacagtatgtcggcatcatttcgaaaggaatgctgctgcgcgctttagatcgtgagggggtaaataatggctgatcaaaataatccgtgggataccacgccagcggcggacagtgccgcgcaatccgcagacgcctggggtacaccggcgactgcaccgactgacggcggtggtgctgactggctgaccagtacgcctgcgccaaacgtcgagcattttaatattctcgatccgttccataaaacgctgatcccgctcgacagttgggtcactgaagggatcgactgggttgttacccatttccgtcccgtcttccagggcgtgcgcgttccggttgattatatcctcaacggtttccagcagttgctgctgggtatgcccgcaccggtggcgattatcgttttcgctctcatcgcctggcagatttccggggtcggaatgggcgtggcgacgctggtttcgctgattgccatcggcgcaatcggtgcctggtcgcaggcaatggttactctggcgctggtgttaaccgccctgctgttctgtatcgtcatcggtttgccgttggggatctggctggcgagaagtccgcgagcggcgaaaattattcgtccactgcttgatgccatgcagaccacgccagcgtttgtttatctggtgccaatcgtcatgctatttggtatcggtaacgtgccgggcgtggtggtgacgatcatctttgctctgccgccgattatccgtctgaccattctggggattaaccaggttccggcggatctgattgaagcctcgcgctcattcggtgccagcccgcgccagatgctgttcaaagttcagttaccgctggcgatgccgaccattatggcgggcgttaaccagacgctgatgctggccctttctatggtggtcattgcctcgatgattgccgtcggcgggctgggtcagatggtacttcgcggtatcggtcgtctggatatggggcttgccaccgttggcggcgtcgggattgtgatcctcgccattatcctcgatcgcctgacgcaggccgttgggcgcgactcacgcagtcgcggcaaccgtcgctggtacaccactggccctgttggtctgctgacccgcccattcattaagtaactctgcacttgcccggtgacgccgggcattatcaccctgccaaaaaaaggaataacaatgcgacatagcgtactttttgcgacagcgtttgccacgcttatctctacacaaacttttgctgccgatctgccgggcaaaggtattactgttaatccagttcaaagcaccatcaccgaagaaaccttccagacgctgctggtcagccgtgcgctggagaaattaggctataccgtcaacaaacccagcgaagtagattacaacgttggctacacctcgcttgcttccggcgatgcaaccttcaccgccgtgaactggacgccactgcatgacaacatgtacgaagctgccggtggcgataagaaattttatcgtgaaggggtatttgttaacggcgcggcacagggttacctgatcgataagaaaaccgccgaccagtataaaatcaccaacatcgcacaactgaaagatccgaagatcgccaaactgttcgataccaacggcgacggtaaagcggatttaaccgggtgtaaccctggctggggctgcgaaggtgccatcaaccaccagcttgccgcgtatgaactgaccaacaccgtgacgcataatcaggggaactacgcagcgatgatggccgacaccatcagtcgctacaaagagggcaaaccggtgttttattatacctggacgccgtactgggtgagtaatgagctgaagccagggaaagatgtggtctggttgcaggtgccgttctccgcactgccgggcgataaaaatgccgataccaaactgccgaatggtgcgaattatggcttcccggtcagcaccatgcatatcgttgccaacaaagcctgggccgagaaaaacccggcagcagcgaaactgtttgccattatgcagttgccagtggcagatattaacgcccagaacgccattatgcatgacggcaaagcctcagaaggcgatattcagggccatgttgatggctggatcaaagcccaccagcagcagttcgatggctgggtgaatgaggcgctggcagcgcagaagtaatttttattcgggcggataaggcgtttttgcctcatccgccgctctgtacacaatgcctgatgcgacgctgacgcgtcttatcatgcctacaaaccacatcgcacatttcaacaagctatctttcatcccatattcatcaacatccgctattattgatttccagcttaatcatcacctgatgaacaaaaataatgactaaacctaatcatgagcttagcccggcgctgatcgtgctgatgtctatcgccaccggtctggcggtcgccagtaactattacgcccagccgctactcgacaccatcgcgcgtaacttttccctttccgccagttcggtaggctttattgttaccgccgcgcaattgggctatgcagcaggtctgctgtttcttgttcccctcggtgatatgtttgaacgccgccgcctgattgtctcgatgaccttactggcagcgggcggtatgttgattaccgccagcagtcagtcgctggcgatgatgctcctcggtacggcattaaccggtttattctctgtcgtggcacaaattctggttccgctggcagcgacgctggcttcaccggataaacgcggcaaagtggttggcaccattatgagcggtctgctgttggggatattgctggcacgaaccgttgccgggttactggcaaacctcggcggctggcgcaccgtcttttgggttgcctcggtgttaatggctctgatggcgctagcattatggcgtggtctgccacaaatgaaatcagaaacccacctcaactacccacagttgttgggttccgttttcagcatgtttatcaacgataagatcctgcgcacccgcgcattgcttggctgcctgacctttgccaacttcagcattctctggacctcaatggcctttttgcttgccgctccaccttttaactacagcgatggtgtcattggtctgtttggacttgcgggagctgccggcgcgttgggcgctcgtccggcgggcggttttgccgataagggtaaatcgcaccacaccacaactttcggtctgctgctgctattactttcatggctggcgatctggtttggtcacacttccgtactggcgttgattatcggaatcctggtgctggatctcaccgtacagggcgtgcatatcactaaccagacggtaatttatcgaatacaccctgatgcgcgtaatcgcctgaccgcaggttacatgaccagctactttattggcggtgccgccggttcgctaatttcagcctcagcctggcaacatggcggttgggctggcgtttgtctggctggcgcgacgattgccctggttaacttactggtctggtggcgaggttttcatcgtcaggaagccgcaaattaagcaatcagcaaccgttttcgtggctttacacttataagggtgttaagaagcccatcagtctgataaggttaagatattcattcagtctatttataatattaacaatcgttaagcgtacactctatggaaagccctactccacagcctgctcctggttcggcgaccttcatggaaggatgcaaagacagtttaccgattgttattagttatattccggtggcctttgcgttcggtctgaatgcgacccgtctgggattctctcctctcgaaagcgtttttttctcctgcatcatttatgcaggcgcgagccagttcgtcattaccgcgatgctggcagccgggagtagtttgtgggttgctgcactgaccgtcatggcaatggatgttcgccatgtgttgtatggcccgtcactgcgtagccgtattattcagcgtctgcaaaaatcgaaaaccgccctgtgggcgtttggcctgacggatgaggtttttgccgccgcaaccgcaaaactggtacgcaataatcgccgctggagcgagaactggatgatcggcattgccttcagttcatggtcatcgtgggtatttggtacggtaataggggcattctccggcagcggcttgctgcaaggttatcccgccgttgaagctgcattaggttttatgcttccggcactctttatgagtttcctgctcgcctctttccagcgcaaacaatctctttgcgttaccgcagcgttagttggtgcccttgcaggcgtaacgctattttctattcccgtcgccattctggcaggcattgtctgtggctgcctcactgcgttaatccaggcattctggcaaggagcgcccgatgagctatgaggttctactgcttgggttactggttggcgcggcgaattattgcttccgctatttgccgctgcgcctgcgtgtgggtaatgcccgcccaaccaaacgtggcgcggtaggtattttgctcgacaccattggcatcgcctcgatatgcgctctgctggttgtctctaccgcaccagaagtaatgcacgatacacgccgtttcgtgcccacgctggtcggcttcgcggtactgggtgccagtttctataaaacacgcagcattatcatcccaacactgcttagtgcgctggcctatgggctcgcctggaaagtgatggcgattatataacccacaagaatcatttttctaaaacaatacatttactttatttgtcactgtcgttactatatcggctgaaattaatgaggtcatacccaaatggatagttcgtttacgcccattgaacaaatgctaaaatttcgcgccagccgccacgaagattttccttatcaggagatccttctgactcgtctttgcatgcacatgcaaagcaagctgctggagaaccgcaataaaatgctgaaggctcaggggattaacgagacgttgtttatggcgttgattacgctggagtctcaggaaaaccacagtattcagccttctgaattaagttgtgctcttgggtcatcccgtaccaacgcgacgcgtattgccgatgaactggaaaaacgcggttggatcgaacgtcgtgaaagcgataacgatcgccgctgcctgcatctgcaattaacggaaaaaggtcacgagtttttgcgcgaggttttaccaccgcagcataactgcctgcatctactctggtccgcgctcagcacaacagaaaaagatcagctcgagcaaatcacccgcaaattgctctcccgtctcgaccagatggaacaagacggtgtggttctcgaagcgatgagctaacgcgtcatctcgctcaaaaatccagacttataaaagaaaaaatgactggccagcatcgcaacatgctggcctttttggcaagcaggtcggctcagccgatgagttaagaagatcgtggagaacaatatgagcgcaaatgcggagactcaaaccccgcagcaaccggtaaagaagagcggcaaacgtaagcgtctgctcctccttctcaccttgctctttataattattgccgtagcgatagggatttattggtttttggtactgcgtcatttcgaagaaaccgatgacgcatacgtggcagggaatcaaattcaaattatgtctcaggtgtctggcagcgtgacgaaagtctgggccgataacaccgattttgtaaaagaaggcgacgtgctggtcactctcgacccgacagatgctcgccaggcgtttgaaaaagccaaaactgcactggcttccagcgttcgccaaacccaccagctgatgattaacagcaaacagttgcaggcgaatattgaggtgcagaaaatcgccctcgcaaaagcacaaagcgactacaaccgccgtgtgccgctgggcaatgccaacctgattggtcgcgaagagctgcaacacgcccgcgacgccgtcaccagtgcccaggcgcaactggacgtcgctattcaacaatacaatgccaatcaggcgatgattctggggactaaactggaagatcagcctgccgtgcaacaggctgccaccgaagtacgtaacgcctggctggcgctggagcgtacccgtattgtcagtccgatgaccggttatgtctcccgccgcgcggtacagcctggggcgcaaattagcccaacgacgccgctgatggcggtcgttccagccaccaatatgtgggtggatgccaactttaaagagacgcagattgccaatatgcgtatcggtcagccggtcactatcaccacggatatttacggcgatgatgtgaaatacaccggtaaagtggttggtctggatatgggcacaggtagcgcattctcactgcttccggcgcaaaatgcgaccggtaactggatcaaagtcgttcagcgtctacctgtgcgtatcgaactggaccagaaacagctggagcaatacccgctgcgcattggtttgtccacgctggtgagcgtcaataccactaaccgtgacggtcaggtactggcaaataaagtacgttcaacaccggtcgcggtaagtaccgcgcgtgaaatcagcctggcacctgtcaataaactgatcgacgatatcgtaaaagctaacgctggctaatccagaggtgcgtgtgatgcaacagcaaaaaccgctggaaggcgcgcaactggtcattatgacgattgcgctgtcactggcgacattcatgcaggtgctggactccaccattgctaacgtggcgatccccactatcgccgggaatctgggctcatcgctcagccagggaacgtgggtaatcacttctttcggggtggcgaatgccatctcgatcccgcttaccggctggctggcaaagcgcgtcggggaagtgaaactgttcctttggtccaccatcgcctttgctattgcgtcgtgggcgtgtggtgtctccagcagcctgaatatgctgatcttcttccgcgtgattcaggggattgtcgccgggccgttgatcccgctttcgcaaagtctattgctgaataactacccgccagccaaacgctcgatcgcgctggcgttgtggtcgatgacggtgattgtcgcgccaatttgcggcccgatcctcggcggttatatcagcgataattaccactggggctggatattcttcatcaacgtgccgattggcgtggcggtggtgttgatgacactgcaaactctgcgcggacgtgaaacccgcaccgaacggcggcggattgatgccgtggggctggcactgctggttattggtatcggcagcctgcagattatgctcgaccgcggtaaagagctggactggttttcatcacaggaaattatcatccttaccgtggtggcggtggtggctatctgcttcctgattgtttgggagctgaccgacgataacccgatagtcgatctgtcgttgtttaagtcgcgcaacttcaccatcggctgcttgtgtatcagcctcgcgtatatgctctacttcggcgctattgttctgctgccgcagttgttgcaggaggtctacggttacacggcgacctgggcaggtttggcctctgcgccggtagggattattccggtgatcctgtcgccgattatcggccgcttcgcgcataaactggatatgcggcggctggtaaccttcagctttattatgtatgccgtctgcttctactggcgtgcctatacctttgaaccaggtatggattttggcgcgtcggcctggccgcagtttatccaggggtttgcggtggcctgcttctttatgccgctgaccaccattacgctgtctggtttgccaccggaacgactggcggcggcatcgagcctctctaactttacgcgaacgctggcggggtctatcggcacgtcgataaccacgaccatgtggaccaaccgcgagtcgatgcaccatgcgcagttgactgagtcggtaaacccgttcaacccgaatgcccaggcgatgtacagtcaactggaagggcttgggatgacgcaacagcaggcatcaggctggattgcccagcagatcaccaatcaggggctgattatttccgccaatgagatcttctggatgtcagccgggatattcctcgtcctgctggggcttgtgtggtttgctaaaccgccatttggcgcaggtggcggcggaggcggtgcgcactaagtacaactaagccagttcatttgaactggcttttttcaattaattgtgaagatagtttactgactagatgtgcagttcctgcaacttctctttcggcagtgccagttcttcgttgctgttgatgcgtacgtcacgttccagaatgctacgcgcaatatcctgcgcttcctgcaacgagtgcatctggtaagtgccacactggtagacattcagttccgggatctgattctgatcctgcactttcagcacgtcttccattgccgctttccaggcatcagcaacacgctgctcatctggcgtaccaatcagactcatataaaaaccggtgcggcagcccattggcgagatatcgataatctctacaccattaccgttaagatggttacgcataaaaccagcaaacaggtgctccagggtatggatccctctttctggcatcacttctttgttcggcacgcagaagcgcagatcgaacacggtgattgcgtcgccatgcggggtgttcattgttttcgccacccgaactgcaggcgcttccatccgggtatgatcgactgtgaagctatctaacaacggcatttagccacctccggtaattttttttaaaattttctgaactctttcttcccaggcgagtctgagtatatgaaagacgcgcatttgttatcatcatccctgaattcagagatgaaattttggccactcacgagtggcctttttcttttctgtcaggcgtgtttttccagccacaccgcaaacggttcggtatcagcggtttccatttcctgctgacggcgttcagatgcctcgcgctcggctacaaaatcctcttcgcgcagaatttccagcggctcttcacgcagcagattacggtaggcttctgcaaacgctttgcctgttccgccaataccagtatcaatcatagaccttaagatacgggcagagaaagtcagatcgggattatcgaagcaggcaaccagttcatcacacactttctgatacgcttcgccgccgttaatgctatccagcgtttgcgcgacgcgtttcagatcgcggaacagatctttacccacctgcagtaacgggaactgcgcggtttcgcagccgatacccagcgtcaggcccggtttgcgaccttcaaggatcacccggttccagttaacgcgcgtacaggcaagttcgctactgctcatttccggtgcatcagccagcgcacaccagaccataaacaggtcgaggaatcgcacctgctgttcatctacaccaatcggcgagaacgggttgatgtccagcgaacgcacttcaatatattcaatgccgccacgtaacagcgcatcagaaggtgactcgccgctgcgggtaacgcgttttggacgaatcggcgcatacagttcgttttcaatctgcagcacgttgctattgatttgcagcctcttaccgtctttctcaataccaatcttcgcgtactcttccgatggcgttttgattgcctgtttaaggcccgctacgtactcgtaaagatcgttgaaggtaataccaagattgctttgcgatttattggtatagccgagatcgctcaaacgaagagaggtcgcatacggcaggtaatacataccgcactcggttttctcaaacggcagcgacgttggttttccttgcaggaaagaagaacaaatcgccggagatgcaccaaacagataaggaatgacccaaccgaaacgatagtaattgcggataacgcggaaatagcccgcagaaattttctctttggcatcagcgcccgagatatcaccgcacttcgcttgccagaatgccattggcaaagagaaattgtagtgcacgccggaaatggtttgcatcagcgcgccgtagcgatttttcagcccttcacgatacagcgttttaaagcgtccggtgttagaagtgccgtactgtgccagttcgatgtcctgaccttctgcgatgtagcatggcatacttaacggccacatccgctcatcacccatattgcgcgccgtataacgatgcagatcgcgcataaaggtcagcatatgttcaatatcaccatccactggtgtaatgaattccagcaatgcttccgcaaaatcggtagtaatccatttgtgcgtcagtgcggaacctaatgcttcaggatgacctgttgttgccagtgtgccatcagcattaacacgcaaagtttcgcgctccagcccacgctgtatcccctttaacgcctgaggatgtttttccagccaggccagcgcctgtgatacgtccgggatcaaattgacctcccgcctgtcaaaatcgttttaattagcataactgtaatggtgaccatatgtgcaggcctacaattagtgccaccacatcatgccctgaacggtcgctgctgcaactgcaacatagcgtaacgctttaccaaggcacaaaaaaaagattactggcccccaggagatgcgcatccatcccgctaacagacacagtaaatcgccaaccacgggcatccagcttaataatagcgtgactgcaccatagcgtttcagccagccggtagctttctcttgccagcgcgatgttttacgcaatggaaagaaacgcccaaggataacgttagttaaccctccaaggctattacccattgttgctgttaaaactaaaacccagggataactgatcccggaaagcaacattgccaccagcacgacttcggagttgccgggtaatagtgtagcgctgagaaaactactggcaaacaacgagaaaagcgataacgcttcactcacagcaagcgaacatccacggcgtccatgcctgctgcacgggccgcctgaataccgaaatcggcatcttcaaagaccacacactgcgtcggttgcacgcccatacgctgcgtgcacaacaaaaatgtgtctggcgcgggtttatggtgtttgacgtgatcagcagcgacgacggcgtcaaaataacggcgtaatcccaggtgcgccagcaatgcctcagcgatggcgctttcactccccgttcctacagccattgggcgacgaccatgccaacttttcaccacttcaacaagaggaagcggctcgacactatccagcagcatacttcttactgcttctgttttttcacgcgctaacgcatgcgggtcgagatcggcctgattcagctcaataattgcctgagcaatacgccaggtgggcgatccattaagcgcaatcattgcctgaacatcgtactgaagaccgtagtgccctaatacttcgcgccacgctttacggtgcgtaggctccgtatccaggattgtgccatccatatcaaaaattaaacctgcataacgctcgtacatggtcttctcgcaagtcgaaaaatatgacgctactttagcgtaattgcttgattttgtcgctgatggcgaaggagaagaaaattcaggaaatggataaagtagttatttagaaatgagatatttttgaaggaaatttttgggagaagatggtgcatccgggaggattactcactggcgttcgcccttcgggccgttgctgacgcaacgttatcctccctggtgcctgcggttaataccgctatctcttcgataccttcattgctgaaggttacggagaatatggtgcatccgggaggattcgaacctccgaccgctcggttcgtagccgagtactctatccagctgagctacggatgcatcgggaaaatttattttactgctgatattgatatcgctactaaagccatatcaagtaagagatggtgcatccgggaggattactcgccttgcggctcgcccttcgggccgttgctaaagcaacgttatcatccctggtgcctgcggttaattccgctacctcttcgataccttcattgctgaagatttcggagaatatggtgcatccgggaggattcgaacctccgaccgctcggttcgtagccgagtactctatccagctgagctacggatgcatcgggaaaatttattttactgctgatattgataccgctactaaagccatatcaagtaagagatggtgcatccgggaggattcgaacctccgaccgctcggttcgtagccgagtactctatccagctgagctacggatgcaaatggcggtgaggcggggattcgaaccccggatgcagcttttgaccgcatactcccttagcaggggagcgccttcagcctctcggccacctcaccacacgcctcttacgagtgcttcgaagaacttgtttatcgctcatcgtcgctgcgtggcgcacatattactttctgagacttataagtcaaacaatttttcctacacttttatcgtttgcacacttcacgttcaattagtctgtaaaaacgtcaaaaagagtgttttatcaacagaaaaatggaggtctgacagatagtagtaatgcaaaaaaatggagacttaagttgaatgaacgggagtaaagcgaaaagactatagagtgaaggagaaattttgagggtgcgtctcaccgataaagatgagacgcggaaagattagtaactggactgctgggatttttcagcctggatacgctggtagatctcttcacggtgaacagaaacttccttcggggcatttacgccaatacgtacctggttgccctttacccctaaaactgtcacggtgacctcatccccaatcatgagggtctcaccaactcgacgagtcagaatcagcattctttgctccttgaaagattaaaagagtcgggtctctctgtatcccggcattatccatcatataacgccaaaaagtaagcaatgacaaacacattacatgtaagcagtcatggcattacattctgttaaacctaagtttagccgatatacacaacttcaacctgactttatcgttgtcgatagcgttaatgcgaatgccgtgaagcgagtccacggcattgcctgacgcttatattattgcaatttcgcgctgacccagcctttcacactggctaacgctgcaggtaaggccgcagcatccgtaccaccggcttgcgccatgtcaggacgtccaccacccttgccgcccacctgctgagcgaccataccaatcagttcccctgctttcacacgatctgtgacgtccttagatacgcctgcaatcagagaaaccttaccttcggctaccgttgccagcacgataattgtcgaccccagctgattttttaaatcgtcaaccatggtacgcaacattttcggctcaacaccgctaagctcgctaaccaacagcttaacaccattaacatcaattgccttactggaaagatttgcgctctcctgtgcggcagcttgttctttaagctgttgtagttctttttctaactgacgcgtacgttccagtactgagcgcactttatccgccagattattgctatcgcctttcagcagatgcgcgacttcgcttaagcgatcgctgtctgcatgaacggtggtgatagcgccttctccggttaccgcttcgatacgacgaacgcctgcagcagtacccgattcagagatgatgcggaacagaccaatatcaccagtgcggctggcgtgagtaccgccacacagctcggtggagaaatcgcccatgctcagcacgcgtacacgctcatcatacttctcgccgaacagcgccatcgcacctttcgctttcgccgcttcgagatccatgatgttggtttcgatcggcaaattgcgacgaatctgtgcgttcaccaggtcttcgaccgcacgaatctcttccggtttcatcgcttcgttgtgtgagaagtcgaagcgcagcaccttgtcgttaaccagtgaacctttctgcgatacatgagtccccagaacctggcgcagcgcagcgtgcatcaggtgcgttgcggagtgattcagacgaatacgggcgcgacgagcctcatcaacatcagcctgcacagcgtcgcccactttcagagaacccgcagcaagtttaccgatgtgaccaatcgcctggccgtatttctgcgtatcttccaccgcgaaggagaagttagcgcctttcagttcgcctttatcaccaacctgaccgccggattccgcatagaatggtgtttgatccagcacgaccacagcttcctggcctgcattgatggcatcaaccgctttaccatcaacaaacagcgcggtcactttgccgttcagttccagatggtcatagcctttaaattcagatgcactatcaacacggatcattgcgttgtaatcggcaccaaagccgctggcttcgcgcgcgcgacgacgctgctcttccattgctgcttcaaaaccagcttcgtcaactttgatgttgcgctcacgacaaacatcagccgtcaggtcaaccgggaagccataggtgtcgtacagacggaaagccgtttcaccatccagcgtatcaccagaaagttttgccagctcttcatccagcaacgccagaccgcgctccagagtacgggcaaactgctcttcttcagtcttcagcacctgctcaacctgcgcctgctggcgtttcaggtcttcacccgcagagcccataacgtcgatcagcggaccaaccagtttgtagaagaaggtttctttcgcgccgagcatattgccgtgacgcactgcgcgacgaatgatacgacgcagtacataaccacggttttcattggacggcattacgccatccgcgatcaggaacgcacaagaacgaatgtggtcagcgattacgcgcagcgatttattgctcagatcggtcgcgccagtgactttcgctaccgcctggatcaacgtgcggaacaggtcgatgtcatagttagagttaacgtgttgcagcaccgcagcaatacgctccagacccataccggtatctacagacggcttcggcagcggttccatcgtgccatctgcctggcggttgaactgcatgaagacgatgttccagatctcaatgtagcggtcgccgtcttcttccggacttcccggagggccaccccaaatgtggtcgccgtgatcgtagaagatttcggtgcacgggccgcacggaccagtgtcacccatctgccagaagttgtcagatgcgtatggcgcacctttgttatcgccgatgcgaataatacgttcgcgcgggatcccgacttctttttcccagatttcgtaggcttcgtcgtcgctttcatagacggtaacccacagacgctctttcggcagggcaaaccatttttcgctggtcagcagttcccatgcaaactgaatggcatcgtgtttgaaatagtcgccgaagctgaagttgcccagcatttcgaagaaggtatggtgacgcgcggtgtaaccgacgttttccaggtcgttgtgtttaccacccgcacgcacgcagcgttgggaagtggtagcgcgggaataattacgcttgtcgagcccaaggaacacatccttgaactggttcatcccggcgttggtaaacaacaaagttgggtcgttatggggtaccagggagctgctggcaactacctgatgtcccttactatggaaaaagtcgagaaacgcctgacggatctcagcggtgctcttgctcataattatcctgaaatcaagctaacgaaatatcgccaccagctccagcgtgtcttaaccgccgggctggtaactgaaaagtgggaataagataagttttcttgactgggaagtaaaataccgtatgcgttcagtcggcaaaatttcgccaaatatcctggatatcttccatcagatagccacgatagagcagaaaacgctggatcttaactttttctgaaaagacagttggcaaaggttcaccatattttcgcgtcgcctgatcgcgcgccagtgcgcaccagtcgatgtcacattcacgcatcgctttttctgtcgcttcgcgggaaatacctttctgattcagttcctgacgaatacgtgcaggtccataacctttgcggctacggctggcgataaagcgcgcaacaaatcggctgtcatcgagatagccatgttcatggcaccaggcaataacgcgctcgtaatcttctgccgtagcatcaatctcttctgggccatttttgcccataatcggtgccacgagtttacgtcgcagttcttgctcactgtgatcgcgcaccgccagaatgcgtaccgcacgatccaacaggcgagcatatgccgggcgacgggacgttgattctgtcatggcatatccttacaacttaaaaaagcaaaagggccgcagatgcgacccaggttttgctgataaacagatttaatagtcaatgagtgtgcagaatgttcccgcaggcccaattcgttagaggatcgaggtgagagtaatttttcacgccagtgctggcctgttcccctcaccctaaccctctccccaaaggggcgaggggaccgtccgtgcacacattatctattatcatcaataacgaacgattaaaaatcttcgttagtttctgctacgccttcgctgtcatctacagagaaatccggcgttgagttcgggttgctcagcagcaactcacgtactttcttctcgatctctttcgcggtttccgggttatctttcagccaggcagttgcattcgctttaccctgaccgatcttctcacctttgtagctgtaccacgcgcctgctttctcgatcagcttctcttttacgcccaggtcaaccagttcgccgtagaagttgataccttcgccgtagaggatctgaaattcagcctgtttaaacggtgcagcgattttgttcttcaccactttcacgcgggtttcgctacccaccacgttttcgccctctttcaccgcgccgatacgacggatgtcgagacgaacagaggcgtagaatttcagcgcgttaccaccggtagtggtttccgggttaccgaacatcacaccaattttcatacggatctggttgatgaagatcagcagcgtgttggactgcttcaggttacccgccagcttacgcatcgcctggctcatcatacgtgccgcaaggcccatgtgagagtcgccgatttcgccttcgatttccgctttcggcgtcagtgccgccacggagtcaacgacgataacgtctactgcgccagaacgcgccagggcgtcacagatttccagtgcctgctcgccggtgtccggctgggagcacagcaggttatcgatatcgacgcccagtttacgtgcgtagattgggtccagcgcgtgttcagcatcgataaacgcacaggttttaccttcacgctgcgctgcggcgatcacctgcagcgtcagcgtggttttaccggaagattccggtccgtagatttcgacgatacggcccatcggcagaccacctgccccaagcgcgatatccagtgaaagcgaaccggtagagatggtttccacatccatggaacggtcttcacccaggcgcatgatggagcctttaccaaattgtttctcaatctggcccagtgctgccgccaacgctttctgtttgttttcgtcgatagccatttttactcctgtcatgccgggtaataccggatagtcaatatgttctgttgaagcaattatactgtatgctcatacagtatcaagtgttttgtagaaattgttgccacaaggtctgcaatgcatacgcagtagcctgacgacgcaccgcatcacggtcaccgctgaagcattcccgccgggtaatgccttcaccgcgggcagtggcaaaagcaaaccagacggtgccgacaggcttctcttcactgccgccatccggcccggcgataccactaatagacacggcataatcagcacgagccgctttcagtgcacctatcgccatttccaccacgacgggttcactcaccgcgccatgctgcgccagcgtctcttcgcgtacgccgatcatctgcgctttggcttcgttactgtaggtgacaaatccgcgttcaaaccaggcggagctaccggcaatatcggtaatcactttcgctacccaaccaccggtacaagactcggcagttgttacggttgcgccacgggctttcagcgcctgcccaacctgttcacttaactgcatcagttcactgtcagtcatcacaacctctgtcagtcaaaaatttatgccggacaagatagcactttcgtcaggaagatggtgttggcgttgcaattttacgaggaggattcagaaaaaagctgattagccagagggaagctcacgcccccctcttgcaaatagttactgcacgcgcgccagcgccacggcttgtcctaactgccagaccgccattgcgtaatgggtgctgtggttataacgggtaatggtgtagaagttcggcagaccgtaccagtactggtaaccggtaccgacatccagacgcagcaggctggcttgttgatggttgcccagcggctgctgtggcgttaaacctgccgtggcaagctgcgaaatgctgtacctggttttgaagccatttggcaagcctggagcctgaccgtttgccattaccgcgacctgatcgcctttcacccagccgtgcgctttgaaatagttcgccacgctaccgatcgcatcaaccggatcccacaggttgatatgcccgtcgccgctgaaatctaccgcatattgtttgtaagacgacggcataaactgtccgtagcccatcgccccggcaaaggaacctttcagattgagcggatcgtcctgctcgtcgcgcgccatcaacaggaaggtttccagctcgccagagaaatactccgcgcggcgtgggtagttaaatgacagcgttgccagcgcatcgaggatgcgagttttccccatcacgcgcccccagcgggtttcaacgccgataatcccgacgataatttccggcggtacgccatacacctgccacgcgcgattcaacgcatcttcatactgattccagaaaaccacaccgttctgcacgttgtccggcgtaataaattttttgcgataacggagccatgcgccgttcggacctgatggcggtttcaccgatgtggttggtgcctggttatccatcagccgcagtaccgaatccagacgcttcgcctgggagagaatttcctgcaactgctgacgatcgaaaccgtgtttgttcaccattttgtcgatgaactgctgggcattcgggttattagcgaaatcgccgcccatctgcatcacattgtgctgcggctcaagcaggaagccgccagacggcgttccggtggtcgtttcagtctcagtaggttttggcttgctgctacaggcggcaagcaacacaaaaaggggaagcaatgttacataacgacgcttgaacatgaggggtccatttaacagattcaaccaggggcaagtatggtaaagcatcacgccccacacaaggaagcggtagtcactgcccgatacggactttacataactcaactcattcccctcgctatccttttactcaaactttcaaattaaaatatttatctttcattttgagatcaaaataacacttttaaatctttcaatctgattagattaggttgccgtttggtaataaaacaataaatcctgaaggagagaacaatgatagaaaccattactcatggtgcagagtggtttatcgggctgttccaaaagggcggagaggtgtttaccgggatggtgaccggcattcttccgctgttgattagcctgctggttatcatgaacgcactgattaattttatcggtcagcatcgtattgaacgttttgctcaacgttgcgccggtaaccctgtttcccgttacctactgttaccgtgcattggcacgtttgtcttttgcaatccgatgaccttaagcctgggtcgctttatgccggaaaagtacaaacccagctactacgcggcggcctcttatagctgccactcaatgaatggcctcttcccccatatcaaccctggcgaactgtttgtttatcttggcattgccagcggtctgacaacgctgaacctgccacttggcccactggcggtgagttatctgctggttggtctggtcaccaatttcttccgcggctgggtgaccgatctgaccaccgccgtttttgagaaaaagatgggcattcaacttgaacaaaaagttcacctggcaggagcaacatcatgacgcgtattcggatcgaaaaaggaacgggtggctggggcggcccgcttgagctggaagccacgccgggcaaaaaaatcgtctatatcaccgccggtacccggcctgcgattgttgacaaactggcacaacttactggctggcaggctattgacggatttaaagaaggtgaacccgcggaggcggaaattggtgtcgcggtaatcgactgtggcggcacattacgctgcggcatctatccgaaacggcgtattcccaccattaatatccactcgacgggcaagtccggtccactggcgcagtacattgtggaagatatttatgtctctggcgtaaaagaagaaaacatcactgtagtgggtgatgcgacaccacaaccctcttccgtgggccgtgactatgacaccagcaagaaaatcaccgaacaaagcgatggtttactggcgaaggtgggaatggggatgggttctgccgttgccgtgttgtttcaatctggtcgtgacaccatcgacactgtattaaaaaccattctgccgtttatggcattcgtctcggcgctcattggcatcattatggcttctggccttggtgactggattgcccacggtcttgctccgctggcgagccatccactgggtctggtcatgctggcgctcatctgctccttcccactgctttcacctttcctcggcccaggcgcagttatcgcacaggttatcggcgtattgattggcgtgcagattggtctcggcaatattccgccgcatctggctttacctgcactgtttgccatcaacgcgcaggcggcctgcgacttcatcccggtcggtttgtcgctggcggaagctcgtcaggacacggttcgcgtcggtgtcccttctgtactggtgagccgctttttaaccggcgcgccgactgtactgatcgcctggtttgtctccggttttatctatcaatagaggctgaaacatgaccgttatttatcagaccaccatcacccgtatcggcgcgagtgccactgacgccctcagcgaccagatgctcatcacctttcgtgaaggcgcgccagcggacctcgaagagtattgcttcattcattgccacggcgagttgaaaggtgcactccatcccggtttgcaatttacgctcgggcagcatcgctatccggtgaccgctgttggcagcgtggcggaagacaaccttcgcgaactgggtcatgtcaccctgcgcttcgatggtttaaacgaagcggaatttccgggcactgtccatgtggcaggccctgtacccgacgatatcgcgccgggatcggttttgaagtttgaatctgttaaggagtgaaaaaatgaatcaggttgccgttgtcatcggtggtgggcaaaccttaggcgcgttcctgtgccacggtctggctgccgaggggtatcgcgtcgcggttgtcgatattcagagcgacaaagccgcaaatgtggcacaagaaattaacgccgaatatggtgaaagtatggcgtacggttttggtgctgacgccactagcgagcaaagcgttctggcgctctctcgtggggtagatgaaatctttggtcgcgtggatttgctggtctatagcgccggaatagcaaaagcagcctttatcagcgacttccagctcggcgattttgaccgttcgctacaagtgaatctggtgggttatttcctgtgtgcccgtgaattttcgcgtttgatgatccgcgacgggattcagggtcgcattattcagatcaactcgaaatccggcaaagtgggcagcaaacacaactctggctacagcgcagcgaaatttggtggcgtcgggctgactcaatcactggcgctggatctggcggagtacggcattacggtgcattcactgatgctcggtaacctgctgaaatcgccgatgttccagtcactgttgccacaatacgcgaccaagctgggtatcaaaccggatcaagtcgagcagtattacatcgacaaagtaccgctcaaacgcggctgcgattatcaagatgtgctgaatatgctgctgttctacgccagtcctaaggcgtcgtactgcaccggacagtcgatcaatgtcaccggcggtcaggtgatgttctgatcaacagcggagatccattaaggatctccgtgagactatagaatgcctgatgcgctacgctcatcaggcatacaggacttccgccactacattaaggaaaagttatggtatccgcactcatcaccgtcgccgttatcgcctggtgtgcgcaactggccttaggcggctggcaaatttctcgttttaaccgtgccttcgacacactatgccagcaagggcgggttggcgtgggccgttccagcgggcgctttaaaccgcgggtcgtggtcgccatcgcgctggacgatcagcagcgcatcgtcgacaccttgtttatgaaaggactgaccgtcttcgcccgaccgcaaaaaattcccgcaattaccggtatgcatgcgggtgatttacagcccgatgtgatctttccccatgatccactatcacagaatgctctatcattggcgcttaaactgaaacgtggataatttcgttgtgaatgttacttgcttgcgaagttatcattttgaaacctaaatcaggtaatcacgcccatgaaacctcgtcagcgtcaggccgccattctggagtatctgcaaaagcagggtaaatgctcggttgaagaattggcgcaatactttgacaccacaggcacaaccattcgcaaagatctggtcattctggaacatgccggaaccgtcattcgtacttatggcggagtagtgttgaataaagaggaatccgatccgcctatcgatcataaaacactcatcaacacccacaagaaagagctgattgcagaagctgccgttagttttatccatgatggcgattcgatcattcttgatgctggcagtaccgttttgcagatggttcccctgctctcgcgctttaataacatcacggtgatgaccaacagcctgcatatcgtcaatgcgctatccgaactggataacgaacaaactatcctgatgccaggcggaacgtttcgtaaaaaatcggcctcatttcacggacagctggcagagaatgccttcgaacatttcagtttcgataaattgtttatgggcaccgacggcatcgatctcaatgcgggcgtaaccaccttcaacgaggtctataccgtcagtaaggcaatgtgcaatgccgcgcgcgaagtgattttaatggcggactcatcaaagtttggccgtaaaagccccaacgtagtttgcagtcttgaaagcgtcgataagctgattaccgacgcaggtatcgatccggcgtttcgtcaggcgctggaagagaaagggatcgatgtgatcataaccggagagagcaatgagtgaagcactactgaacgcgggacgtcagacgttaatgctggagttgcaggaagcaagccgtttaccggaacgtctgggcgatgattttgttcgcgccgccaatatcatcctgcactgcgaaggcaaagtggtggtttcgggaattggcaaatcgggccacattggtaagaaaatcgccgcaacacttgccagtaccggcacaccggctttttttgtccatccggcagaagcactgcacggcgatctggggatgattgaaagccgcgatgtgatgctgtttatctcttactccggtggcgcgaaggaactggatctgattattccgcgtctggaagataaatctatcgcgctgctggcgatgaccggcaaaccgacgtcaccgctgggcctggcggcaaaagcggtgctggatatctccgtagaacgcgaagcctgcccgatgcaccttgcgccgacctccagcaccgtcaataccctgatgatgggtgacgcgctggcgatggcggtcatgcaggcgcgcggttttaatgaagaagattttgcccgctcccacccagctggggcactgggcgctcgcttgctgaataaagtgcatcatctgatgcgccgtgatgacgctatcccgcaggtagcgttagccgccagcgtgatggatgcgatgctggagctcagccgcaccggtctggggctggtggcggtatgtgacgctcaacaacaggtacaaggcgtctttaccgacggcgatttacgtcgctggctggttggcggcggcgcactcaccacgccagttaatgaagcgatgacgacaggcggcaccacattacaggcgcaaagccgtgccatcgacgccaaagagatcctgatgaagcgcaaaatcactgccgcaccggtggtagatgaaaacggcaaactcaccggcgcaattaacttgcaggatttctatcaggccgggattatttaatccttcaatcccagacgtttcgccagccgatgcaggttggcgacgtcagtttccagcattcgcgcgcaggcagcccagttgtgatgattttgtgccagtgcctggcgaatggtttcacgctggaacgcttctgtcgcttcacgcagattttgcttaacaacgggcaccgctgccgcttctggcggcggcaacgtcacctcaggaaaagcaaaatgttgcgcctcaagaatcacttcatcgccgctgcgagtggctctcgacagtactaccgcccgatgaatagcatgttccagttcgcgcacgttccccggaaaactgtagtgttgcagtaaatttcgcgccccggcacttaataccacgcgggagagccccagccgcaaacgacactgctcgcagaaataccccgccagcagaatgacatcatcgccccgctcacgcagcggcggcaccgaaagtggaaacacgctcaggcgatgaaacaagtcagcgcgaaatcgccctgccagcacctcttcgcgtaagtcgcggttagtcgccgccagcacgcgcacatcgacccgcaaactgcggtcatcgccaacgcgctgaatatcgccatactgcaacaccctcagcagcttggcctgcaatgccaacgacaactcgccgatctcatccagaaacagagtgccgttatccgccatttcaaacttcccgctgcggttactgatagcgccagtaaacgctcctttcacatgcccgaacaactcactttccgccacactttccggcagtgcggcacagttgagatagaccagcggattcaccgcccgtggcgaggcttcatgaatcgctttcgccaccagctccttaccggttcccgtctcaccgctgatcaggacgttgagatcggacgccgccacaatctcaatctcttttttcagttgcgtcatgccaagggacaagccaatcatctgcgtctgtttcaccgcttcaaacggcgtggcatcgcctggcatcatattctggctttccagttgttcaatcagcaacgcattgcttaacgctcccgccgccagcgcagcaatcagccgtagctcttcgtcgctgaaaacatcgaactgatcgggctgcatcccgtcgagcgtcagtgcgccgatcaggttttgcccggcaaacaatggcagaccaacgcaggcgtgaaccttcagactctcctgcccaggaatcaaaccgtcatagggatcgggcaattcgctgtctgcaggaaagcgcaccacatccccggcgcgggcaatcgcttccagccgtggatgcccttccagcgcaaagcgtctaccgagtacatcctttgccagaccgtcgatggcaagcggaataaactgccgcgaatcgtaacgtagcaacgcagacgcatcgcactccagcacctgacgtagcgtggtgatcaggcgctgaaaacgatcctgatgaccaatcccacgctgcaattcgatggcgatattcgccagcacatcaacggaaaaactcatctttgcctcactgtcaatttgactatagatattgtcatattgaccatttgattgatagtcattttgactactcattaatgagcataattttatttatagagtaaaaacaatcagataaaaaactggcacgcaatctgcaattagcaagacatctttttagaacacgctgaataaattgaggttgctatgtctattgtggtgaaaaataacattcattgggtgggtcaacgtgactgggaagtgcgtgattttcacggcacggaatataaaacgctgcgcggcagcagctacaacagctacctcatccgcgaagaaaaaaacgtgctgatcgacaccgtcgaccataaattcagccgcgaatttgtgcagaacctgcgtaatgaaatcgatctggcggatatcgattacatcgtgattaaccatgcagaagaggaccacgccggggcgctgaccgaactgatggcgcaaattcccgatacgccgatttactgtactgccaacgctatcgactcgataaatggtcatcaccatcatccggagtggaattttaatgtggtgaaaactggtgacacgctggatatcggcaacggcaaacagctcatttttgtcgaaacgccaatgctgcactggccggacagcatgatgacttacctgacaggcgacgcggtgctgttcagtaacgatgctttcggtcagcactactgcgacgagcatctgttcaacgatgaagtggatcagacggagcttttcgagcagtgccagcgttactacgccaatatcctgacgccgttcagccgcctggtaacgccgaaaattaccgagatcctgggctttaacttaccagtcgatatgatagcgacctcccacggcgtggtctggcgcgataacccgacgcaaattgtcgagctgtacctgaagtgggccgctgattatcaggaagacagaatcaccattttctacgacaccatgtcgaataacacccgcatgatggctgacgctatcgcccagggaattgcggaaaccgacccacgcgtggcggtgaaaattttcaacgtcgcccgaagcgataaaaacgaaatcctgaccaatgtcttccgctcaaaaggcgtgctggtcggcacttcgacgatgaataacgtgatgatgccgaaaatcgccgggctggtggaggagatgactggtttacgcttccgtaacaaacgcgccagtgctttcggctctcacggctggagcggcggtgcggtggatcgtctttccacgcgcctgcaggatgcgggtttcgaaatgtcgcttagcctgaaagccaaatggcgaccagaccaggacgctctggagttatgtcgtgaacacggtcgcgaaatcgcccgtcagtgggcgctcgcgccgctgccgcagagcacggtgaatacggtggttaaagaagaaacctctgccaccacgacggctgacctcggcccacggatgcagtgcagcgtctgccagtggatttacgatccggcaaaaggcgagccaatgcaggacgttgcgccaggaacgccgtggagtgaagttccggataacttcctctgcccggaatgctccctcggcaaagacgtctttgaagaactggcatcggaggcaaaatgagtaacggcattgtgatcattggttcgggcttcgccgcccgccaactggtgaaaaatattcgcaaacaggacgccactattccattaaccctgattgccgccgacagcatggatgagtacaacaaacctgacctcagccatgttatcagtcaggggcaacgtgccgacgaccttacccgccagacggcgggtgaatttgccgagcagtttaatctgcgcctgtttccgcacacctgggtgacggatatcgatgccgaagcccgtgtggtgaaaagccagaataatcagtggcaatacggcaagctagtgctggcaaccggtgccagcgcctttgtcccgccagtgcctgggcgtgagttaatgctgacgttaaatagtcagcaagagtatcgcgcctgtgaaacgcaactgcgggatgcccgacgcgtgttgattgttggcggtggtttgattggtagcgaactggcgatggatttttgtcgtgcaggcaaagcggtcacgctaatcgacaacgctgccagtattctggcgtcgttaatgccaccggaagtaagcagccgcttgcagcatcggttgacggagatgggcgttcatctgctgttgaaatctcagttacaggggctggaaaaaacggattctggcattctggcaacgctggaccgccagcgtagcatcgaagtggatgcggtaattgccgccaccggactgcgcccggaaaccgccctggcacgacgcgccgggctgacgattaatcgcggcgtttgcgtcgatagttatctgcaaaccagtaatgacgatatttatgcgctgggcgattgcgcggaaatcaacggtcaggtactgccattcctgcagccgattcaacttagcgcgatggtgctggcaaaaaatcttctcggcaataacacgccgctgaaactaccggcgatgctggtgaaaatcaaaacgccggaattaccgctgcatctggcaggcgaaacccagcgtcaggatttacgctggcaaattaataccgaacgccagggaatggtggctcgcggtgttgacgatgctgaccagcttcgcgcctttgtggtcagtgaggatcggatgaaagaggcatttggattgttgaaaacattgccgatgtaggtgggctactgtgcctaaaatgtcggatgcgacgctggcgcgtcttatccgacctacggggacgcatgtgtaggccggataaggcgtttacgccgcatccggcaatggtgtccaaatgcaacacgttttatccgttctggacttcacccgctaaccaacgcgccgcagcaataaccccctgccccagagacaaaccgccatcacccgccggtaaactctgtggaaagagcaatgtgaaatcagcgagataatgcgccagacgtgcacgcagcaaacggttatgaataaccccgccgctaaataccagcgtagtgataccacgcatcgtggcctgctcacgcatcaacgcggcaaaaccctgcgccagcgcatcatgaaacgcccacgcgcgttgattaaccggtgcctgccagttcagccactgctgccagaaagtggcgagatccagttgattgtccaccagcggcatcgtcaccggatgcgtcactccgtggcatgaggctgcgagcgcctccagagcacaagccgcttcaccttcataacttaacgtggctggcgcacagcccagtgccgccgccactgcatcgaacaaccgcccacacgatgacgccagcggcgcgttaattccacgctcaatggcccgcgccagcacgctccagttttgctgttgcacacttgctgtttcagggtaattctgccactccggcacaaagcgcaggcactgcgccagcaggtttcgccacggctgcttcgctgccaaatcgccacccggaagcgccactgcaggcaagccgcccaggtgctcacattcgcgatagttcacccgcaggcactcgccgccccacaaagcgccgttctcccccataccgataccgtcgagcgtcaaagcaatgacatcaccgccatccagcggccactgatgctctgccagacacgccgctgcatgggcatgatgatgcagtaccgtttgcgtcggcagattcatttcacgcgcccactggctggagacatagcccggatgcgcgtcatgcacaacgtattgcggggtaaaatcgtagatgttttgcatcaggcgtaacgcttcgcgccactgcatctggatgccatcgtcacttaaatcgcccagatgctgactcaacaccgcttgttcaccgcgcaccaggcagaaggtatttttcagatccgcgccgagacacagcacaggcggaacatttttaaagcccggaggcaaagccagcgcatccggcacatacccccgcgaacggcgcagcatttcgccgctttcgcgcaccaccgaatcatccatccgctgcacgatgtcgcggttatgtatcaagaatccgtcggcaatgccctgcaaatccgccagcgcctgttcgttgctgatagctggtggtttaccgctcaggttgccggaggtcatcaccagcgggcattgcagttcctgtaacagcaaatgctggagcgggttcgcaggcaacattaccccgacttcgttaaggtcaggggcgatatcatcacaaagctcaggaacgtattttttatccaccagcacaatcggcgcggcgggcgtggtaagcaactggcgcgcagcgtctggtaaaccgtcagccactggcaacatgaccgccagcggtttcgccgggcgatgtttgcgcgcccgaagtgtcgccaccgcgttactgttacgtgcatcgcaggcaagatgaaatccgccaatccctttgatggcgacaatgttgcccatttttaactgtgcgatagccgcctgtaatgccgcctcttgttctgcatgttcaccatgacttacccattcaagatgcgggccacactccgggcaggccaccggctgggcgtggaagcgacgatcgagcgggtcgcggtactctttgtcacaagccggacacaacggaaacgccgccatcacggtaaacgggcggtcgtaaggcatggcgcgaataatggtgaaacgcgggccgcagtgggtacagttgataaacggataacgataacgccgttcgcctggggtattcatttcggcaaggcaagcagggcaagtagcggcatccgggacaatttgcgtattcatggcacctcccgcgctctggcggatggtgaactcagtgggcagttgtgaccagatgtacggctcacgctcgacgctatcaatccgcgccagcggcgggcagtgctgatgcaattgaacaagaaacgtttccgggtcttcccgcagccggacttctacgccatcgccgtcattacagacatcgccgtgaagatttaattgctgtgccagctgccagacaaacggacgaaaaccgacgccctgcactttgcctcgaatacgcagttggacaccgcaagatgtgttttttgccattgagttattcccgccatcatgaattgcgtaacccgccctgccggacacgactgcgtcgtatccggcagtctcaggtcggcgataccgccagctccgtattctacgaatatttccgggaattcctttgatgccagaacagttctataagatttttagaacatcagcgccgtacggcgacgtttttctgcgctcagttgttcaagtttattacgatcgacacaaatcagcgcatgggtcgggcaagccgccatacacgccgggccgtcttcgcgatggttgcacaggtcgcatttattggcttcagctttgtcagcccgtacattcagccccgcgccgctgttgcggatcaccggacgtaccaccacttccatcgcgccatacgggcaagccaccacgcaggttttgcaaccaatgcaacgttcctgcatcacatgaacaaaccctttatcacggctgatagcaccattcgggcagacgttagcgcacggtgcatcttcacactgacggcagactgtcgccgtggaaatgttcacacctttaatgacatggattcgcggtaaaaaggtttccggggtcagcgatgcacagtcctgattttcctgatgagaaaccacgcacgccacttcacaggtacggcaaccaatacatttactcgcgtcagcaatgatgaaacggttcatcaaattctccagcaatgacagttaatgcgccgatacattcacaaatcatgccagtttttaatttgctgttatttaaggaaattaatttctgtaatgcaggaaaaaagatgtcatcgacactagtgacgatgacatgtgatgacaatgtttatcgcgaaagggcaatgagtgagtcgcggcggatcagttttccgctgaaggttttcggcggtgagaaatccccgccatcgagcataaaaatcagccgtccaataatttcctgaatcatctctgttaccggaatttttacgctggagagcgccggaacggtgtagggggcaattgcgatatcatcgaatccgataaccgacacctgctctggcaccgctacgccgcgctcgtgcaacgctttgatcgcacctatcgccatatcgtcgttactggcaactaacgcgctaaatttagccccacgttcgagcaacgtttctaccccttcggccccgctggcgggcgtccatttaccgttagcgataagtttttcattgagcgcaataccatgctgcgacagcgcgtctttatacccggcaagacgttcaacgctggtgggggaatccatcgagccggtaaggaaagcaatctcctgatgtccggcgtttatcaactctgccacggcattaaagctggtctgtttatgatcgcaccagacgctatggctgctgtttttgcgcaggcggcgattaagcaccattatcggctgactgtgcgcgtcaatgatgtcatcaatctcatccacgcttaaaaaacgcgggtaaatcataatggcgtcgcagcgcaaatccagcagatactgaatcgcctggcgctcttcttcggcgctgtgtttaccatctgccaatagcaactgccgccctttctcttccgccattcgcgcggcatgaaacagtaattcactaaaataaatgccgtgataaagcgtgttggtcactaccagccccagcgtctgagtactcttcgccgacagattgcgggccagcaaatttgggcggtaaccgctctcttctaccgcctgaaacacgcgatctttagtctcctggctgacgtagccattacctgaaagcacgcgggaaacggtcgcttttgaaaccccggcgcgcttcgccacttccagcatcgtcgtcatcattttcatccctttacacgcaatcaacgcagtgtactgcaccgtttgccgattgtccttgcgcaatcggcgggaaaaatattcaggtgaccggtttcacaaatataaaaaatgaacaattaactctcttgcttatttagtgacaactattcatgattttgtgaaaccggtttcctaattccgtttcagcatcggcatttttccgttacgtcgactgataacaactacatctaccctactgataacaggataaaatccgatggccaaaaattatgcggcgctggcacgctcggtgatagcggcactgggcggcgttgataacatctcggcagtcacgcactgtatgacgcgtttgcgctttgttatcaaagatgaccagcttatcgacagcccgacgttaaaaaccatccccggcgtgctcggcgtggtacgtagtgacaaccagtgtcaggtgattatcggcaataccgtttcacaagcctttcaggaagtcgtcagcctgctgccgggagatatgcagcccgtacagcccgtgggtaaacccaaactcacgctgcgtcgcattggtgcggggatcctcgatgcgctgatcagcaccatgtcaccgctgatcccggcgattatcggcggatcgatggtcaaactgctggcgatgatcctcgagatgagcggcgtgttgacaaaaggatcgccgaccttaaccattctgaatgtgattggtgacggtgctttcttcttcctgccgctaatggtcgcggcatctgccgccatcaaatttaaaaccaatatgtcgctggcgattgccatcgcaggtgtgctggtacatccgagctttattgaactgatggcgaaagcggcccagggtgaacatgtcgaatttgccctgattccggtcaccgcggtgaaatatacctacacggtgatcccggcgctggtgatgacctggtgcctgtcatatatcgaacgctgggtggatcgcattacaccggctgtgaccaaaaacttcctcaagccaatgctgattgtgttgattgccgcaccgctggcaatcctgctgattggcccgattggtatctggatcggtagcgccatttcggcgctggtttacaccattcatggttatctgggctggctttcagtcgccattatgggcgcgctgtggcctctgctggtaatgaccgggatgcaccgcgtctttacgccaaccatcattcagaccattgccgaaaccggcaaagaagggatggtcatgccgtcagagatcggcgctaacctgtcgctgggcggttcatcactggcggtggcgtggaaaacgaaaaacccggaactgcgccagacggcgctggctgcggcggcatcagccattatggcggggatttccgaaccggcgttatacggcgtggcgatccgcctgaaacgtccgcttatcgccagtcttatcagcggttttatttgcggcgcggttgccggtatggcggggcttgccagccactcaatggcagcgccggggttatttaccagcgtgcaattcttcgatccggcgaatccaatgagcatcgtctgggtgttcgcggtcatggcgctggcggtggtgctgtcgtttatcctcacactattgctcggctttgaggatattcctgttgaggaagcggctgccgaggcgcgaaagcatcagagcgcacaaccgaccgtcgccaaagaagtaagtcttaattgaggatgaaaatgtcagtatttccagaaggttttttatggggcggcgcgcttgccgccaaccagtctgaaggtgcgttccgtgaaggtggcaaaggactgaccacggtcgatatgatcccgcacggcgagcatcgaatggcggtgaaactggggctggaaaaacgttttcagttgcgcgatgacgagttttatcccagccatgaggcgacggatttttatcatcgttataaagaagatatcgccctgatggcagagatgggattcaaggttttccgtacctcaattgcctggagccgcctctttccgcagggcgatgaaatcacgcccaatcagcagggcattgctttttaccgttctgtctttgaagagtgtaaaaagtacggtatcgaaccgctggtcacgttgtgccacttcgatgtgccgatgcatctggtcaccgaatatggctcctggcgtaaccgcaagctggtggagtttttcagccgctacgccagaacctgctttgaagcatttgatggtctggtgaaatactggctaaccttcaatgaaatcaacattatgttgcatagcccgttctccggcgcgggtctggtgtttgaagaaggtgaaaatcaggatcaggtgaaatatcaggccgcgcatcaccagctggttgccagtgcgctagccaccaaaatcgcccatgaggttaacccgcaaaatcaggtgggctgtatgctggcgggcggtaacttctacccttacagctgcaaaccggaagatgtctgggcggcgctggagaaagatcgggaaaacctgttttttatcgatgtgcaggcgcgcggcgcgtatccggcttactctgcccgcgtatttcgcgaaaaaggggtaaccatcaacaaagcaccgggcgatgatgaaatcctgaaaaacaccgtcgattttgtctctttcagctattacgcctcgcgctgcgcctcggcggagatgaacgccaacaacagcagtgcggcgaacgtggtgaaatcgctgcgtaatccgtatctacaggtgagcgactggggctggggaattgatccactcggtctgcgtatcaccatgaatatgatgtacgatcgttatcagaagccgctgtttctggtggaaaacggcctcggcgcaaaagatgaacttgctgccaatggcgagattaacgatgactatcgcatcagctatttacgcgaacatatccgcgcaatgggcgaagcgattgcagatggcattccgctgatgggctacaccacctggggctgtattgatttagtttccgcctctacgggtgaaatgagcaaacgctacggttttgtctacgtagaccgtgacgacgcaggcaacggcacgctgacgcgcacgcgtaagaaatcgttctggtggtataaaaaagtaattgccagtaatggggaagatttagagtaagtaaccgtgccggatgcggcgtgaacgccttatccggcctacatagttcgtgcgacatgtaggcccgataagcgcagcgcatcgggcaatctggggtttggcatcagtcaaaatcaaagaaaccattccggcttaacgccaaatcgggctgaaagtgccttaatgtgggatattgtcagggatcgttgtccagacaaaatctgactgaccagggatttagagccgatttcgttcttcaaatccgcataggtcagattatgttgatcaatcaacgtgcgaagtaacgccacgccaaccggcattgccgcaacggctttgtcgaactctgcaaacttttcgttgttgttttcatactctgcaatgtggctcgccagaaagtcgataagtggattggtgtcatcttcttcaatcaaatattcgaccagttccagtgcttcacgataatcatcttctgagtcactgcctcccagaaaggggactgcattgaccagttctcttgttgctttaacagcgcgtgcagcattagcagtcattctttgttctctctgtagtaacgtgacgtctgtctgcacgtaatccccctcatagccactctgcaaaaagtcagttctggttcaccccataaagcacatccccctttatcaagcaacgctgcgtctgcgccagatcttccgtttgcgggtcgcgcccggcgatgggtttgaggacgagtttacggttgggggtataagtaaaacgcgtgagcgcgggatagcttaacttgccaaaccagccgtgaacacgctgccatttggcgtcttttacctgatacagactggttatccagtaaccggaatcaaactgcatatccagcaattgcgtgtggccattgccttgcaaatccagcaaatcatctacgccagttttgcttgcggtgtagaatcccctgggttcaaagacacagggacggccttcgcgcgtgaacgtcataagaattaaatgtgcataaggagccagaccattaccggtacttggtaaccagataaccagatcctgaatgccgttacgatcaagatcggcgcgatagagttgccctttgcccgctatgtttgccagcatacccacaggcacagtccaggatttaccggcgcggtctttagcggttaattgccagtaatcttcttcatttggcatcttttcaagcgtcacgccagcaacgccgacttttctaaaatgccagttttgctcggcatcataaggcatggtcaggagaggtttcagcgcccgcttttgcgcgtattcgctgtcactcatcggcagataatcggtaaagctggtggcctgtgcaggcagcactaagctcaataaaaaagcgcacatccctgttctgatgttcaattccctgaattccttaatgaaaaactactctacttccaccgctaactgcgcaaatccaccatttccttcccagccttccagtcgttgataaacggtttcaaccgcatctttaatcggctgggtcatcgggtagtaaaagccgacgatatccggctggatgccgaggaaaatcacttcgccaatatcttctttcaactggtcgataaggtagttcaacggcatgttatgggtagtcatcataaacatctcggcgatatcatccgggtcgatgatgcggatttcgccggggtttagccccatatccgtggcgtcgacaatcagcagtcgtgtcgggcgcagttcacggatggcgacgatgtcgttttccggtgcactaccgccgtcaatcaccacccagttacctttcggcgcggcggcgcacttttccgccagcagcgggccagcgccatcatcgcccatcatgctattgccaacacagagtaaaacgtcagtcacgcagtctcctcaccatcaaatagatggcgttttcctgatgaatatcatgcagcatacttagcagcattgtactccattcctgctgctgcgaagtttgcgctgcccgggctttatcgaatgcgttggccagcatcggcacatggttaatgtcgatgacgatctcaccatatttcggcacgccttccattttgcggcgggcttcgctgcccgcctccagagtggcaatccatgccagatattcatcccacgggcaggtgagcgccgcttccaggcaatcgataaccccaaggtggtgaccaatcgccaggctgtaatagaccacctgctgcgcctcggcgggcgtggcatcgttctcatcaataaatttacggctcagttgactgaacaccaccttttcactcatcggatacgcgcctcttctacaacatgattcagatggctgacaatctcgttcagacgcggatcgttttccgcttccagccagcgtgcaacctgttcttcgccctgccctaactgtgtcaggaagtcatcggcaatctgacgaccgtaacgataacctgccaggcggcgtgcttcgcgatccactttcacacgcagcggctgcaccatatcgccatgcaggatttccgccggttgttcatcctgctcacccgggccacgggcgtgaattttctgctccagcaggccgagcgccattgcaaagccgtacagcgtggcggcaggcgttggcgggcaaccagggatgtagacatctaccgggacgattttatccgtaccgccccacacgcagtagagatcgtggaagatcccgccactgttaccgcaggcaccgtaggagatacagattttcgggtccggcgcggactgccacgcacgcagcgcaggggatcgcattgcacgggtgaccgcgccggtaaacagtaaaatatccgcatgacgcggtgaaggaacgactttaatgccgaagcgttctgcatcaaacagcggcgaaagcgtggcgaaaatttcgatttcgcagccgttgcagccgccgcagtccacgcggtaaacgtaggcagaacgtttgatttttttcagtaacgacgccttcatgctggcgatggattcatccaccgtcatcgggaccggaatgccgttggcgtcacgggggcctaataaattgctcatcagatggcctctttcatatggcgagtcagttcaatacggtcggacggcaccaggcatttctggcgcttacattccgggcaagtctcaaagctttcgcggtggttttccgcgcggctgtcaccattgtgcttaagcagcgcaatggcgtagtcgatctctttctggacggcgaaaggacgattgcagacgcgacagctgcacagcacaaaacgggactgttgcaggaaatcttctttcttccacaccgccagttcgtactcttgcgacagtttgatcgccgccgtcgggcaaacttcttcgcagcgtccacagaagatgcagcgcccgagattaaactcccacgcaagctctcctgtggcgaggtcggtttcaaccgttaaagcgtttgacgggcaggcattgacgcaggccgcgcagccgatgcactgctgcgggttctgctctggcttaccacggaagtttttatcaaccgcaatcggctccagcggataagacgaggtcgccgtgccggttttgatgacttttttgataaaggtaaacatggcgattccttatttcagcggcgagtttttacgctcaatgctgtaacgctcgagttctttgtacggcaccactttgctcttcttcttacgtacatcgaccaccgtcatgcggtcggtacaggagtagcaagggtccaggctaccgataatcagcggcgcatcagaaacggtgttgccacgcagcatgtagcgcagggtcggccagttcgcgtaggtcgcggcacggcagcgccagcggtacagcttctggttgtcgccggtcatgctccagtggatatcgtcgccgcgcggcgcttcggcaaagcccagcgcgaaacggtgcggaatgtaggtaaagccttccaccatcaacggaccgcccggcaggttatccagaccgtagtcgatcatgttcagcgcggtatagacttcgttgatacgcactttcagacgggaaataacgtcgcagccctgctcgctgtggacttccattggcagcaggccataaccaacaaacgggtgatcggcgcgggtatcgcgagcgtgtccgctggcgcggaccatcgggccaacgttactgaaatcgcgggcgatttccgggtccagacgaccaatgccgacagtgcgctgttccatgttcggcgtactcagcagcacatccaccagctcctgcacttcacgacgcatttgttgcgccagctggcgggtctggatcatgtcatctttcagcagatcgcgacgaatcccgccgatcaggttcaggccgtaggttttacgcgcaccggtaaggatctctgccattttcatggaggtttcacgcacgcggaagaactgcataaagccggagtcgaagccagtaaagtgacaggccaggccgaggttgagcagatgcgagtgcaggcgttccacctccagcagaatggcgcggatcatctgcgcacgttctggcacctgaatacccatcgcgttttccaccgacgtggtgtaggcggtgctgtgagcaaagccgcagatgccgcacacacggtcagagaggaaggtcacttcgttgtaccccatacgggtttccgccagtttttccatgccgcgatggacgtagaacaggcggtagtcggcgtcgataatattttcgccatcgacgaacagacggaagtgacccggttcgtcggaagtgacgtgcaacggaccaatcggcacgacgttgtttttcttgtcacccagttcattgatgaactcgtaggtttcagcatcggtggtcggcgccggacgctgacgataatccatgctgtctttacgcagcggataaagttcatccggccagtcatccggcagcaccagacgacgttcatccggcagaccaaccggaatcaaaccgtacatatcgcgcacttcgcgctcgccccacacagccgccggaacgcgcggcgtcacggacggatactccggtttgttggcgtcaacttcgacgcgaaccgttacccaacacttagtgcccttctccatcgacagcacgtaataaacggcgtaatgaccattcagtttgcgttcgtcgttaccaaacagcaccgacagccagccaccctgtttgtagtaaagaaactccaccacttccggcaggtagttcacctttacggtgacagtcagctgatctttggtctgccaggcgtggtccagcacgacgcccggaaatgcctcattcagcgcggcgagataatgttgacctaatttttcttcagacatgctcaaactctctttaatcacgccgccagcaaggagacgaacgctaaaaatgcaaagccaaacccagcccaggtaatgcgcggagtaatatcaagacgcagacgggccatgctgttttcgaacagcgcgataaccaggacgccgaccaccagtttgacgatggcaatcaccagcgccagcagcagtccaccggcggtgaaggtttccatttgtccccacggaataaacaccccgacgaacatctgcaacaccaccagctgtttcaggctgataccccatttcatgacgccaaagccgctaccgctgtattcggagagcggaccttcctgcaactcctgctcggcttccgccaggtcgaacggcagtttgcccatttcgataaaagtggcgaacgcacaggcacaaagcgccagcaccagcgggatgctctggctcagcggccagtgataaacggtgtcggtgatgttgctgatgttggtggaaccggcaacctgtgcggcaacccacagaccaagcagcagcatcggttcgaccagcacgccaagcatcgcttcacggctcgcgccgatagcagtaaacgggctaccggtatccagaccggaaatagcaaagaagaaacgcgcgatggcaaagagatacagtaaggtgatcaaatcgcccagttgcggcagcggagaaccaacggtcaccaccggcagcgcagtagcgatagtcagcatgacgcccaccatcacatacggcgtcaggcggaacacccagccggaggcatccgggccaacgctctggcggcccagcagtttgataatgtcacgatactcctgcaacacacccggcccacgacggttatgtaagcgggctcgcgccacgcgggtaataccggagagcagcggcgcaacggcaaatagcaccagcgcctgaattaacggatataaaacactcattctcaggctcctcgtgaaacaataatcaccaccagcaccgccagttcaaccagcgccatccggcggaacagcaacgcactcccctcgcactgccagcccggcaccagagacaccggattcagccatttgcgtagtttcagcaccggcgcaaacgcctgtttcaccggcatggcaaaaccgtgagcggtaatcaccattgatttttcgtggtcgtagccgcacacccaggccgcaccgcgggaacgcgacggcaaacgatcgcctttgcaaatcgccataatgatgaatggcagcagcgggcaggcaatcagcagcaacgtgatcatcggttgagaaacggtggtgttagcaggctccagcggcagaggtacagcagcagagagcatcggcagcagccacggcgcagcaacaccgccaattacgcagcaaatcgccagtgccactacgcttacgctcatcaggagcggcgcacaggtggcgttttcggcttctttggtacgcggcgcgccgaggaacgtgacgccatagactttcgccatacacatcaccgccagcgcaccggtaattgccagacccacagcgagcagcggccccagcagacgggcaacaaacgcgccactattgctcagtttgaaaaaggattgatagataacccattccccggcaaacccgttcagcggcggcagcgcagccattgccatcaacccgactaacatggcgatggagataaccggcattttcttgccaataccaccgagtttttcgatatcgcgatgaccggtacggaaccagacgctccccgccccgaggaacagtacgcttttgaacaggctatggttaagcagatggtacagaccaccgaccagaccaagggcaatcagcgccggttgttcgagcgcgatacccgttacgccagcgcccagccccagcaggataatgccgatattttccagggtgtggtaagccagcaggcgctggatgttgtgttccatcaacgcatacagaccaccgacgaacgcggtgatcatgccgagcaccagcagcgcgatcccccaccacagcggcgcgttaccacccagcagtgacagggttaaaatgcccagcaggccaattttcatgactaccgtagaaaacaacgcggcagctggcgcagaggcgttagcatgtgcctgcggcacccagccgtgcagcggaataatcccggccagcaggccaaagccaatcacaccgagcagccagatatcggaaccgagcggcagctgttgcatacgcatatccagcaggcgcagatccagcgtgccataacgctgccacagcagccagcaagcaatcgccagcagcagagtgccaagacgccccagcgcaaaccacagtttgccctctttgctgttgctggtgaggaacaccgcacacaaggccatgacttcggccattaccacgaacatgccgaggttgctggcaatgacggcgcagacggcggcagccatcaacatattgatctgcaagccgttgcacttcacctgcgcgtggcgatgccagtcaatgttatagaggctgacaaacagaccgcaaaggccgagggtaatcagccaaatcgcgttaagcggggagatttgcacatcgtagcttaccagcgacagcgcaccgctcacgccaaccgcgccagtcagcacagtgaagcccgcggctgccgtatacaggctaccaaccgcgccgccaattccggctatccagccacttagcgtcttttgaaaagaaaagagaaatgccagaacagcggcggcaataaaccacgccacgccgctattgatcagggaaattgcgctcatttagcctctccactttgagcctgctgaaacaaggtgagatcgccaaagtccgtattaaaagtcagctcacgcttacgtttgctgacgcgggcgatatcggtgttatccaccagatgcagggctttggtcgggcacatccgcacgcaggccggaccttgttcatcaaaactgcaaaggtcacatttgacggcgatcgcgcgaatacccggcacccagtcaagcagcgtactgatacgcgccggagcaggcggtgccggtggcgctttcggggtattggcatttgcaggaatatccagcggacggctgccggaaaattcaattgcgccaaacgggcaggcgatgccgcacagcttgcagcttacgcacaggctttcattcaactgcacggccccatcaacgcgggtgatggcgttaaccgggcagaccaccgcgcagggtgcatcttcacagtggtgacagagctgcggcgcagattctttttcatttagcatcactctcaggcgcggcattgattgcaggccgtgctggcgatgcgtctctgaacaggcggcctcacaagtgtggcagccgatacagagcgtggagtcagcaattacaaaacgattcaccaggcattcctcaggtgattgtcatttttgacgaaaacatgccgatgaaatgtcattttcgacactcatcgacacgcccatccccaaacaggcgtaacgcctgcaaaacgggcaaagcctcagctcatgctgccgggctttgtccctttaccagttggcttaaattcaccggcacattgttttcaatggcggtgtataagctgtcgtaaacgccagcgattttttcgagatagtgttccagaacctgttcgcgatcgcggatgttgaccttgccatcaatcatgccgtcaatgctcagttgcgcctgcgcaatccgctgtttgtcttcgccatcttttgtttcgacgtaatactcgatggtgtggctgttaaagccatccgccagggtgacgtaaatacgaaaatgttcaaaaaggacgaaacagagttctttgtccggcgcgcagctcatggcgtgatgcaggcgcgctttcgataacgtgatcccctgaaccagcgaattgcagtagatgtgccactggtcctgtaggcgacgatgccgctgtgcgatgtaatcggctttctcgcttatttcccaaatagtcattgtcaggttacccgtttaacagagatgccagctttaagcattttttgtgccaacttttaatttattgttattaaagagatttttaagctaaagatgaatttcgtcgccgtgtcgacgtgtcatttcgacatcatcgacattattcaccgcagggataatcaacactggcacaattattgcttgtagctggcaatagttaatgggaggcgatatgcacgaaataaccctctgccaacgggcactggaattgatcgaacagcaggccgcaaaacacggcgcaaaacgcgtaactggggtctggctcaaaattggcgcattttcttgtgtcgaaaccagctctcttgccttttgttttgatctggtttgccgcggcagcgtggcggaaggttgtaaactgcacctcgaagaacaagaggccgaatgctggtgtgaaacatgccaacagtatgtgacgctactgacccagcgcgtccgccgctgtccacagtgtcatggtgacatgctacagattgtggcagacgacggtttacagattcggcggatagaaatagaccaggagtgagcgatgtgtacaacatgcggttgcggtgaaggcaacctgtatatcgagggtgatgaacataaccctcattccgcgtttcgtagcgcgccatttgccccggcggcacgcccgaagatgaaaatcaccggcattaaagcgcctgaatttacccccagccagactgaagaaggcgacctgcattacggtcatggcgaagcgggcactcacgcaccgggcatgagccagcgtcggatgctggaagtcgaaattgacgtgctggacaaaaataaccgtctggctgaacgcaaccgcgcgcgctttgctgcccgcaagcaactggtgctcaacctggtttccagccctggttccggtaaaaccaccctgctgacggaaaccctaatgcgcctgaaagacagcgttccgtgcgcggttattgaaggcgaccagcaaaccgtgaacgatgccgcacgcattcgcgctaccggtacaccagcgattcaggtgaacaccggtaaaggctgccatcttgacgcacagatgattgccgacgccgcaccgcgtctgccaatggacgataacggtattctgtttatcgaaaacgttggcaacctcgtatgcccggccagcttcgatctcggtgaaaaacacaaagtggcggtgctttccgttaccgaaggtgaagacaaaccgctgaaatatccgcatatgtttgccgccgcctcgctgatgctgctcaacaaagttgacctgttgccgtatctcaactttgacgttgagaagtgcctcgcctgcgcccgcgaagtcaatccagaaattgaaatcatccttatttccgccaccagcggtgaagggatggaccagtggctgaactggctggagacacagcgatgtgcataggcgttcccggccagatccgcaccattgacggcaaccaggcgaaagtcgacgtctgcggcattcagcgcgatgtcgatttaacgttagtcggcagctgcgatgaaaacggtcagccgcgcgtgggccagtgggtactggtacacgttggctttgccatgagcgtaattaatgaagccgaagcacgcgacactctcgacgccttacaaaacatgtttgacgttgagccggatgtcggcgcgctgttgtatggcgaggaaaaataatgcgttttgttgatgaatatcgcgcgccggaacaggtgatgcagttaattgagcatctgcgcgaacgtgcttcacatctctcttacaccgccgaacgccctctgcggattatggaagtgtgtggcggtcatacccacgctatctttaaattcggcctcgaccagttactgccggaaaacgttgagtttatccacggtccggggtgcccggtgtgcgtactgccgatgggtagaatcgacacctgcgtggagattgccagccatccggaagtcatcttctgtacctttggcgacgccatgcgcgtaccagggaaacagggttcgctgttgcaggcaaaagcacgcggtgccgatgtgcgcatcgtttactcgccgatggatgcgttgaaactggcgcaggagaatccaacccgcaaagtggtgttcttcggcttaggttttgaaaccaccatgccgaccaccgccatcactctgcaacaggcgaaagcgcgtgatgtgcagaatttttacttcttctgccagcatattacgcttatcccgacgcttcgcagtttgctggaacagccggataacggtatcgacgcgttcctcgcgccgggccacgttagtatggttatcggcactgatgcctataattttatcgccagcgattttcatcgtccgctggtggtggctggtttcgaaccgcttgatctactgcaaggcgtggtcatgctggtggagcagaaaatagcggcccacagcaaggtagagaatcagtatcgtcgggtggtaccggatgccggtaacctgctggcgcaacaggcgattgccgatgtgttctgtgtcaacggcgacagcgaatggcgcggcttaggcgtgattgaatcttctggtgtacacctgacgccagattatcaacgattcgatgccgaagcgcatttccgcccggcaccgcagcaggtctgcgatgacccgcgcgcacgttgtggtgaagtattaacgggcaaatgtaagccgcatcaatgcccgctgtttggtaacacctgtaatcctcaaaccgcatttggtgcactgatggtctcctccgaaggagcgtgcgccgcgtggtatcagtatcgtcagcaggagagtgaagcgtgaataatatccaactcgcccacggcagcggcggccaggcgatgcagcaattaatcaacagcctgtttatggaagcctttgccaacccgtggctggcagaacaggaagatcaggcacgtcttgatctggcgcagctggtagcggaaggcgaccgtctggcgttctccaccgacagttacgttattgacccgctgttcttccctggcggtaatatcggcaagctggcgatttgcggcactgcgaatgacgttgcggtcagtggcgctattccgcgctatctctcctgtggctttatcctcgaagaaggattgccgatggagacactgaaagccgtagtgaccagcatggcagaaaccgcgcgcgcggcaggcattgccatcgtcactggcgatactaaagtggtgcagcgcggcgcggcagataaactgtttatcaacaccgctggcatgggcgcaattccggcgaatattcactggggcgcacagacgctaaccgcaggcgatgtattactggttagcggcacgctcggggaccacggggcgactatccttaacctgcgtgagcagctggggctggatggcgaactggtcagcgactgcgcggtactgacgccgcttattcagacgctgcgtgacattcccggcgtgaaagcgctgcgtgatgccacccgtggtggtgtgaacgcggtagttcatgagttcgcggcagcctgcggttgtggtattgaaatttcagaagcggcactgccggttaaacctgctgtgcgcggcgtttgtgaactactgggactggacgcccttaactttgccaacgaaggcaaactggtgatcgccgttgaacgcaacgcggcagagcaagtgctggcagcgttacattcccatccactggggaaagacgcggcgctgattggtgaagtggtggaacgtaaaggtgttcgtcttgccggtctgtatggcgtgaaacgaaccctcgatttaccacacgccgaaccgcttccgcgtatatgctaataaaattctaaatctcctatagttagtcaatgaccttttgcaccgctttgcggtgctttcctggaagaacaaaatgtcatatacaccgatgagtgatctcggacagcaagggttgttcgacatcactcggacactattgcagcagcccgatctggcctcgctgtgtgaggctctttcgcaactggtaaagcgttctgcgctcgccgacaacgcggctattgtgttgtggcaagcgcagactcaacgtgcgtcttattacgcgtcgcgtgaaaaagacacccccattaaatatgaagacgaaactgttctggcacacggtccggtacgcagcattttgtcgcaccctgatacgctgcattgcagttacgaagaattttgtgaaacctggccgcagctggccgcaggtgggctatacccaaaatttggtcactattgcctgatgccactggcggcggaagggcatatttttggtggctgtgaatttattcgttatgacgatcgcccctggagcgaaaaagagttcaatcgtctgcaaacatttacgcagatcgtttctgtcgtcaccgaacaaatccagagccgcgtcgttaacaatgtcgactatgagttgttatgccgggaacgcgataacttccgcatcctggtcgccatcaccaacgcggtgctttcccgcctggatatggacgaactggtcagcgaagtcgccaaagaaatccattactatttcgacattgacgatatcagtatcgtcttacgcagccaccgtaaaaacaaactcaacatctactccactcactatcttgataaacaacatcccgcccacgaacagagcgaagtcgatgaagccggaaccctcaccgaacgcgtgttcaaaagtaaagagatgctgctgatcaatctccacgagcgggacgatttagccccctatgaacgcatgttgttcgacacctggggcaaccagattcaaaccttgtgcctgttaccgctgatgtctggcgacaccatgctgggcgtgctgaaactggcgcaatgcgaagagaaagtgtttaccactaccaatctgaatttgctgcgccagattgccgaacgtgtggcaatcgctgtcgataacgccctcgcctatcaggaaatccatcgtctgaaagaacggctggttgatgaaaacctcgccctgaccgagcagctcaacaatgttgatagtgaatttggcgagattattggccgcagcgaagccatgtacagcgtgcttaaacaagttgaaatggtggcgcaaagtgacagtaccgtgctgatcctcggtgaaactggcacgggtaaagagctgattgcccgcgcgatccataatctcagtgggcgtaataatcgccgcatggtcaaaatgaactgcgcggcgatgcctgccggattgctggaaagcgatctgtttggtcatgagcgtggggcttttaccggtgccagcgcccagcgcattggtcgttttgaactggcggataaaagctctctgttcctcgacgaagtgggcgatatgccactggagttacagccgaagttgctgcgtgtattgcaggaacaggagtttgaacgtctcggcagcaacaaaatcattcagacggacgtacgtttaattgccgcgactaaccgcgatctgaaaaaaatggtcgccgaccgagagttccgtagcgatctctattaccgcctgaacgtattcccgattcacctgccgccactacgcgagcgtccggaagatattccgctgctggcgaaagcctttaccttcaaaattgcccgtcgtctggggcgcaatatcgacagcattcctgccgagacgctgcgcaccttgagcaacatggagtggccgggtaacgtacgcgaactggaaaacgtcattgagcgcgcggtattgctaacacgcggtaacgtgctacagctgtcattgccagatattgttttaccggaacctgaaacgccgcctgccgcaacggttgtcgcccaggagggcgaagatgaatatcagttgattgtgcgcgtgctgaaagaaaccaacggcgtggttgccgggcctaaaggcgctgcgcaacgtctggggctgaaacgcacgaccctgctgtcacggatgaagcggctgggaattgataaatcggcattgatttaactgcaaattgccgggcagatctgcctgtccggcatactattcatgaggttttttcggacgatatttttccggcagttctggcaccggacgcttgtcatcgatgagatgacgcacggttaagatcggatgacgccacagcattctcggcccggcccaacgcataatctgtttcatctcttcacgctttgcaggctggtaacagtgcaccggacactgcttacaggctggtttctcttcgccgaacacacatttatccagccgcttttgcgcgtaaacaaacaacgcctcgtaatgctccggctccgctgacgcctgcgggcatttcgcttgataaagatcgatcatttttttaatcgtcagtttttcacgagagatacgcttgccggacatgctgcctccacctcattaagatgcatttatattacatcttaatttgaaaggggactatggctctgaaggaggaggtttattcaaccgatacaattttgcgtacttgcttcataagcatcacgcaaaagctgcaaaacagcatctttcccggaaccagcatcaagaactcgccgttcgcttcttcccctgaaatgattaactccggtatcatgtgcgccttatgtgattacaacgaaaataaaaaccatcacaccccatttaatatcagggaaccggacataaccccatgagtgcaatagaaaatttcgacgcccatacgcccatgatgcagcagtactcaactaagatgattaatgtcatgatttaaaatgataaaaatatctttataagaaaataggttactattgagctacatttaggaaaaataaaaggactgtttgatagatgcggagcagctgatccaaggtttggaaaaactacgttggttaattggctgtttggagtatttttatttgctgtgtacgagcactaatatcgcaactattatgaagactggaatagccatttacaatcatatagactcattaattcaatactgattacgcaattaatcactgatatatttatcgattcaaaaccaaaagtagttctcttatgggatatagttattcaaacaacaaccatatccaaaaaaaaaaataacctcttacatatcacaactataaactaaaaataccgcctttttccataatactatatatctgtttatctacaaaggttttgaattcatcattactacttatgttagtaataatatcatcaatagatacatctgttctaataagacgctcaaccactatttttttatccaatccaaagtcatattctaaactttgacttttataaaaatcaaaactatagttggtctggaatggatttttaaaataataatcaaacttaagagcagcctcatgcaaatcactgtataggttgatatttacatatggtttcccatcaagatgcaacatatcgaggttccccgacgaaaaataactaattaaaatatcagcatcgatgacaggaacggaatcgacttgcacaccattaaatgagaggttgctgacaagcacatatggatatatttcacacttatgtactggttttatcttcaaatgtttcagtatatttgcttcattatttttaagaaactcagcttttctaataacttggttggctccgtgttttatcttacataaagagttccattcagaaacaggcgaatcaatagatgaaatacactttatatcaatcagaataattttattttctatgcgtatcagaagatcaatttcttccctaccaccatcacatgttaactcaactggaccaaaaacatcaacattcttagataatatttcatttttattcagatgttcttttaataactcaattatttttgtttcataatgcttacctttggaggtttcatttaatcccatacctttaatccaaaattcacctactcgttgaggcataggagcaatagacgcaggaacaattactgcaatacaattatcatcaatttttattaacggaaatgcccaaagatctttgctctttccttcattaaaagtaagaaaatcaacaatgcttgataccttgcgataatcaatactggttgcatgagacaaggtttgacaaaaatcaattcttttgaatgaagaggaatgaaaattaatatccatgttaaaaggagctgctttagaatcgaaatgtgcttcagcaaataaagaaatggatgcaaaaacctctataagttcttttttgttaaaattataatcttgaaacacattgtctatatctttgttatcaaattgcccaaaaaccctatttaatgtaagaacaataaagtaatatagagttttttgttcaaagttagcaatacgccttttgaaaaatttttttttcccctcctttttaaattcaaagctatatatatcaggaaagaaatttactgaggatttgttttcttgaatttcagaatatatatcttttaattttctatattgagcttctctattggcaatattaaaatagttattatcctctttgaaataatgatagctatcttcttcaaagtaactaaaagagccatataagaaagcccaaaaaaagccttcaaagaaggaatacgcacttgataagcttatcaattccgatatgaactgatccttattctgtggttttttaccagctttaagtttggttcctttgtttattgaatatgaacaataatctatagcactttgtaatgaatcaaccactgaatgtgcaatttcatcattagtttctaaatttggatgttgtatacctgttataaaattaacattattttcagtaattgtagacaatttatgcaattggtgaattatatgatggcgattagcgaaggcaattaataggacaagaacctgactatacgtgattttttctggagcatgattttcgaaatgaaatgagatatcatctctgactttttttaatgacctccatgtaaaatcaacagctttatataatttttcatcctcagttccttctccatttctctcccactgtactctccactcgttaatatcaaagcctctttgagtaggtttttttgaacttttactttgtgcccaagatctaaattcactcatttttttctctcaacatttgtaatataaatataaattatagaaatttaaaatctaaagcaagggctaacttatcgaagctacgcttcactaagttgccttgcttttcttcccttcggttgaaaagaaaaacaaatttgttctttggatgattacatagccacgtcccagcttcacttctgaaacgagggcagaaggacactgacttcatgaagaaagtcagccacacgttgtaaaccccaacataagtgtgatactgatcacatttccaataattatagctaaatcctattgatattataataataaaatatccacagaaagtcatttccccttcgcaaggagtcattagtgggtgaagaacgcaagaacatcaatcataatacgcatatagttttatatgatgaggtaagtggtctttgcccaaaatgctttaaacctttaatggttcagaatggcaaacgaaaaataaagctctatgaagtagcacacatatatcctttttcccctcgtgaagaggaaaaggaattacttaaagatgagcaacgtctttgcgatgatgttgatagcgaagataatttaattgccttgtgcagagactgtcataagttgttcgacaacccaagaacaattgagggttatcgggaaatgtacgctatcaaaaagcagttgagacaagcagcacaaatcaaaaacagccaatttaattttaagattgaagaagagatcaaagagataattgatatactatcaacgcttgaaccaagtgaagattctcaattatcgtacaaggctatgagaattgatgataaaattctttccgactctggccctgcattcaagataaaggtcaaagctcaagttgcttacttttacactgaaataaaaaaattattccaacaactcgaccaacgagttccaaatacatcagaaataatattcaacgaagttaaaacatactatttgattttaaaaagagagaatttatctcaatccgaaatatataaccatttgattaactggataaaaacaagcacaaaggaaactaatagtgtagccgcagaagttttggtgtgtttttttatccaaaattgcgaggtttactcatgattacaccaagtaaatctatctcaatccaagattcaatattatacaagatgacaatcatcttagaaactgagtttaacgacattaagattactgatttatacgaaaaaacatcaagcaatttttcatctctggacgaatttgtttactcactcgattttttgtttattttagagaaaatcatactaaacccagctaatgggacggtaataaaatgctaaagaacatatactgtgaaaaattaattagaaaagaattgattttcaaaaatggtttgaatgccatattgggacctaaaaatggtgccaactctatcggtaaatcatcagttctaatgttaattgattatgtttttggtggtgatgattttatcaccctatgtaaagacgttatttctcaagttggtcatctaaacatcgaatttacttttgaatttgatggaaaatcctattactttacaagaaataccgaaaccaataattgtgtgatttttagaaacaacgaagaaaatttagagtggtcaattgaagattttagaatcttcttggctcagaaatatggtttttcatcaaacgatccttcattaagaaatttagtctccagattcacgagaatttggggaaaagataattacaatccaaacaaacctcttcaacgctataccggggaaggatatgcttctataaaagaatttctcattaaatccttcggctattataatttaattgaagaaattgaaaaaaagaaagccgagaacgaagtaaaaagaaagaatattgatatagcgttcaagcagggtttcgtcaaaaaagtaaatttaaaagaatataggcaagcaaaacaagatttaaatgttatcgacaataaaattgacactataaaaaaagatctagatctttttgcagccaacataaaagctatccttgacgaaaaaagtctaagtttagccatcgaaaaagataaatatctcaaacaaaaaacttctctcgaaagtaagttatttagaattgaagaaaatatttctgatacaaagcctattccaaaaagatatttcagcaaagttgtcgatttcttcccaactgttaacattgataaactaaatgaagtcgagggtttccatttatcaatttcaaaaatcttgagtgatgagttaaaaaaagaaaaagaacgccttatattccaattaaatgagattgatgctgaaattagtataattgatctcaaaatcaaagaaatagcagcatcagtcgatagaccagatgagattattgatgaagttttgtcattatctataaagaaaaaagaagttgaagatacagttaattatcgagagcgccaagatgatcttaaacaagcatcaagcactataaaggtagaattgaaagaaaagacagaagaaatcctgtcaaaaatatctaaattattaaacgagaacctcaaattatacaacacaaaattctatggctccgacagaataccaccacagatcattttcagtgatacaaattatattttcgaacatcactctgactctgggacaggtaaatcttatgcgaatatgctggcgttggatgtgagctttttacatacaacaaaattacccatagctattgaagattcaattgttttcaaaaacgttgaagtcgcagctatagaaaagatagttagtacattaaacactattgataaacaagtttttatatcactcgatcaattaaatatttatagtgaaaagacaagatcaactttgagaaaggcaagctttatgcgtataagcagaaaataccctgcattcaaagtttcatggaatattcaatccaacaataaataattatttataatggcttccatgtactaacatggtggccattattatatttattacaaaataacatcatcacattgacatccctcttgaatcaaatataagtaaataagaacataaggaatatgtttctgatagaaaacacgaaaggagttcgtatgaaaaatacttttaataaaatatataaaaaagaatcacctgaaagcttgttaagaacacattgcatcagtgttcgactgaaccatgaagaactacagcttctcaatgctaaacgtggagagaaaagcaagggggaatggctcagattagcttctcttgataagcttcccatagtagttccttcaatcaacatagaagcttggaaatccctcagcgaaatatcacagaagctgaacaagctacttattcatctcgaaagtaaaagcactggtggtgagcttacaaagacagagatcttcgcagtgaagcgccaaatttctgagcttcgcttctgtcttacatcctccaagagatctatgagttagctttaatgaaagggatgcaaaaaatcaaaagaggaaaaacctttaatggccttatttcttatttattaaaacctgcttcgcaccataagtcagatccgtatgtagtcggtggcaatgtcatagaaagcttcgcagaagcactaagtgcagagttcaacgctacgaagctcctacgctccgatgtgtgtaaacctgtttggcacaattctctgcgtctgcctgctggtgagtgtctacctatacaacgatggaagctgtttgatcttacccagcaatagtggacacgcagctaagtgagtaaactctcagtcagaggtgactcacatgacaaaaacagtatcaaccagtaaaaaaccccgtaaacagcattcgtctgaatttcgcagtgaagccctgaagcttgctgaacgcatcggtgttactgccgcagcccgtgaactcagcctgtatgaatcacagctctacaactggcgcagtaaacagcaaaatcagcagacgtc

SEQ ID NO: 35 - DNA, 79639 bp, Escherichia coli
  source 1..79639: mol_type = genomic DNA
aaggcagtccgctgcataaatctacgcaacaggttagaacccaaggcccgatacggcatgcggactgcaggcagagaaaactggccgattttctctgcactggagggataatacaaggcctgataagcgtagcgcatcaggcaatgttgcgtttgtcatcagtctcagcccgcttttcagcgggcttcattgtttttaatgcttacagcactgccacaatcgcttcgcacagcggagccatgttatctggtgtcatcccggccacatttacgcgaccagaagcaaccgcatatacgccaaactcttcgcgcagacgcagcacttgttcttttgtcaggccactgaaggagaacatgccgttctgtttgatgataaagctgaagtcgcggtttgcgcctttttcctgcagcgtattgacgaacaactgacgcatacgctgaatacgctggcgcatatcagtcagctcttgttcccaaatcgcacgtaacgcatcgttgctcaggatggtggcaacaacagaagcgccgtgtgctggtgggttagagtagttagcgcgaatcgccgctttcatttggctgaatgcgcgatcaacggtttcactgtcggcagcaaccagagtacaagcgccaacacgctcgttgtacaggccaaagtttttagagtaggaactggcaacaatcagctctttatgcatagccgcgaaagcgcgcagtccttcagcatcttcttccagaccacgggcaaaaccctggtaagcgaagtcaaacagcggtaaccagcctttctcaactgagagttgtgccagtgtctgccattgttccagcgtagggtcgataccggttgggttatggcagcagccatggaacagcactacgtcgccagcctgagcttcattcaggctgttaatcagtgcatcgaagtcaagagtgtgattttccgcatcataataagcgtattcacgaacttccagacctgcagagttaaagacgctcttatggttcggccagcttgggttgctcacccacactcgcttaacgctggtattttttgccaggaaatcggcagctacgcgtagtgcgccagtgccccccggagtctgtgccgtgcgagcacgtttgtcattgatcagggcgctacctttaccaaacagcagttcctgagtgcagcgaccaaattcagggatgccgtcaatgccgaggtaatttttggtggtttcattttcgagcagatactgttcagcctttttcacgctggtcagtaccggggttttgcccgtctcatctttatagacaccaatcccgaggttaattttgccgggacgttcatcggcacgaaacagatcggccaggcccagaatcgggtcggcaggagcggcggtaatgttctcaaacatgacgaggttccattatggttacagaagggaagtccgctatcagggtaacgggagatttacaaaattccaactattactgatgaaaacgcaggctgtttttgcaagacgtgagattgctctggaaggtataaaaaaaacaggaccaaagtcctgttttttcggcatttaacaaagaggtatgctattagaactggtaaacgatacccacagcaacggtgtcgtctgaacctacgcccagtttgttgtcagaatcgatctggttgatgatgtagtcaacataggtggacatgtttttgttgaagtagtaggttgcgcccacttcaaagtagttcaccagatcaacatcaccgataccttctacgtctttcgctttagatttggtgtaagcgatggacggacgcagaccgaaatcgaactggtattgcgcaactaacagaacgtcttgcgttttgttggcgaagccgctggtgtttgtaaatttattagtgatcggcgtagcgttacgggtttcaccgtagttcgctgccaggtagatgttgttcgcgtcgtacttcagaccagtagcccactgttcagcttttttaccgttgccaagaggttgagcttcttgcaggttggtacggtcagctgcaccataagcaccaacgataccaaagccttcgtattcgtagctgatagaaccgccaacaccgtcgccgttagaacggcgtgcagtgtcacgctcgtttttacccaggtactgaacagcgaagttcaggccatcaaccagaccaaagaagttggagttacgataggtagcaacgccgccaacacgaccaacgaagaagtcatcgctgtatgcagtatcaccaccaaattctggcagcatatcggtgtaacccagtgcatcataaaccacaccgtagttacggccgtaatcgaaagaaccaacgtcagcgtatttaagacccgcgaatgccagacgcgttttgttaccagtttgagcgtcagcgccttcagagttgttaccctggaagttatattcccactgaccataaccggtcagatcggaattgatttgagtttcccctttaaaaccaagacgggcataggtcatgtcgccattgccaccgtaactgttttcaccgttacccttggaaaaataatgcagaccaacagctttaccgtacagatctactttgttgccatctttgttatagatttctgcagcgtttgcagtacctgctactaacagagcagggacgatcactgccagaatattgcgcttcatcattatttattaccctcatggttttttttatgacacctgccactgccgtcaataagttctgtcaataaaaatttacggaactattgatgagagtttggtgtctttatgtgtctgcaggcatctttccattcaaactaacgtttcgctaccgtgaaagtgctacaaagataaagatttagtttcaaaaagaaaaaatatgtaaccaaaagtaaaaattaaggaactttgtgaacaccgtcatatttccatagaaacgtgatgatatttacagcaatttttatctatttatatgatttacttatatttaaattaactaaacggaaattttgtttctgatggaaactttatcgacctggcacaaaatcctctttcagacatccagaatgccaaaaaatagtatgaaaattgtgctatcagctaagaaaaaactaatccgcaataagaatgcgggttattttttgtgcgtaaatgttgcaatgtaatattccgtaacaggatgatcgttatggcggggttgcaaatagattgcttgacttaacaaacagataacttgacagaaaggataaaaaagagccagcaggcgctggctctttgaggaagaaaatcagaagctggcgttgcgcggagtacgtgggaacggaatcacatcacgcacgttttgcacgccagttacgtaagcaatcaggcgttcaaaaccaagaccgaaacctgaatgcggaacagtaccgtagcgacgcagatcgcgataccaccagtaatcttctttattcaggcccatttccagcatacgctcgtccagaacgtccagacgttcttcacgctgggagccaccaatgatctcaccgatgcccggagccagaacgtccatagccgcaacggttttaccgtcttcgttgaggcgcatatagaacgctttaatatctttcggatagtttttaaccactaccggtgctttaaagtgttcttccgccagataacgctcatgctcagaagagagatcgacgccccagtaaaccgggttttcaaacttcctgccgcagttttcgagaatggtcactgcgtcggtgtaatccacctgcgcgaaatcggcctcaatgaagcgttccagacgtgaaacggcatctttatctacgcgttcagcgaagaatttcatgtcgtctgcgcgttcttcgagaaccgctttgaagacatatttcagcatggcttcagccagacccgcgatatcgttcaggttagcaaacgccacttccggctccagcatccagaattccgccaggtgacggctggtgttggagttttcagcacggaaagtcgggccgaaggtataaattttggataatgcgcaagcgtaggtttcgccgttcaactggccagatacggtcaggaaagactctttaccaaagaagtctttgtcgaaatccactttgccctgatcgttacgcggcaggttttccagatccagcgtagaaacgcggaacatttcgcctgcaccttcggtatcagatgcggtaatcagtggcgttgaaacccagaagaatccctgctcgttaaagaagcgatgcagcgcctgcgccagcgtatggcgaacgcgcgcgacggcaccaatcaggtttgtgcgcggacgcaggtgagcgacttcacgcagatactcaatgctgtggcgttttgccgccatcgggtaagtgtctggatcttcaacccaaccagcaacttcaactttgctggcctgaatttcaaattgttgcccctggcccggcgacgccacgactttacccgtcacaatgaccgagcagccggtggtcagacgcaggacgtcttcattgtaattgggcagagaattattgatgacagcctgtacaggatcaaagcaggaaccgtcataaacggcgaggaaggagatgccagcttttgaatctcggcgggtacgtacccatccgcgtacggtgacttcgctgtcaacggctacgcggccctggagtacgtcggctacaggcacaacgctcataatattctctctgttaatagtcggaaaaaataaacacttgtccacccgtaaatggggggatacctatgttacctggcatctgcaatcagacaagcagaattcgcaaatgcagcgaaagatttcggaattaaaggtaaaaaaagggagccgattagctccctgatgatattaactggcttttttaatatgcggaaggtcgaacgctttgcgcagcgcccgaacaaacgctttatcgtggcagatagttttgccagggctgtcagaaagtttcgccaccggtttaccgttacactcaaccaacttaatcacaatattcaggggttttacctgggggatatcgcaggtcaggcgagtcccaataccaaaacttaattgcacgcgggaagagaagtggcggtatagctcaaccgctttgcgtaaatccagattgtcagagaaaaccagagttttactctgtggatcaattcccagcttttcataatgtgcaatggctttttcaccccattcaaccgggtcgccagagtcatgacgcaggccctgatagcgactggcgaactcgacaccgaaatcacgcaggaaagcatccatagtgatgcagtcggttaatgcaatgccaagttggtcgggatattcttccagccaggcagcaagtgcagctcgctggctgttggctagatccgggctgatttgctgatgtgcctggaaccattcgtgtgcctgtgttcccatcggcgtgagggaaagccgacgcgccagatcgtagttgctggtgcccacgaaccaggattcctgttgcagacgcttaacgatggtttcttgtacttcgcgagaaaaacggcgacgggtgccaaaatccataagatggaagcgcgacatatcaaggccggcggttaacgccgagaagtcgactaatttgctttccagcgtgtcgagggcttgcgcaacgtcggcctgcggtgagcgatagcgatgtaccatttcactgataaccgccagcaaaggaacttcccagaggatgacttcacgccacgggccgcttaaacgaatatccagcttgccattatcgttggatacggtgacttgttccgggttaaagcggaactcgcgtaaccagttaagatagtcggccttaaagaaaggcagagcagagagccactgatattcatcatcctgcaggcgcaggtgctgcatcgcctgaatctgttcacgaatagcatcggcataaatacccagcagatcgtcacctcggcaacgaaactccgccgcgacatgcacatcgtaatagtgatgaaacacggcttgctgcatatgcaacttataagcatctgtatccagcaacgagtgcagaacaggagaagcgaattgtgtcataggtgcgcagtagcgtcctcgtacaggagcgtttagtacaataaacatcttcaggaactgctggagtataccttgtttcgcaatttattgaaccccgatcacaccatatgccacctttctggtcgatggcattacgcggtgtatgttataaaaatgtagcaataaaggcgtttgtacctgaaaagatgaagattctgcatagcgcgatttacgcaacaggaatagactgaacaccagactctataaaagatgctaaaggttatttatgactcaacagccacaagccaaataccgtcacgattatcgtgcgccggattaccagattactgatattgacttgacctttgacctcgacgcgcaaaagacggtcgttaccgcggtcagccaggctgtccgtcatggtgcatcagatgctccgcttcgtctcaacggcgaagacctcaaactggtttctgttcatattaatgatgagccgtggaccgcctggaaagaagaagagggcgcactggtcatcagtaatttgccggagcgttttacgcttaagatcattaatgaaataagcccggcggcgaatacggcgctggaagggctttatcagtcaggcgatgcgctttgcacccagtgtgaagccgaaggtttccgccatattacgtattatctcgaccgcccggacgtgctggcgcgttttaccaccaaaattattgccgataaaatcaaatatcccttcctgctttccaatggtaaccgcgttgcgcaaggcgaactggaaaacggacgccattgggtacagtggcaggacccgttcccgaaaccgtgctacctgtttgcgctggtggcaggcgactttgatgtactgcgcgatacctttaccacgcgttctggtcgcgaagtagcactggagctgtacgtcgatcgcggcaaccttgatcgcgcgccgtgggcgatgacctcgctgaaaaactccatgaaatgggatgaagaacgctttggcctggagtatgacctcgacatctatatgatcgtcgcggtggatttcttcaatatgggcgcaatggagaataagggtctgaatatctttaactccaaatatgtgttggcccgcaccgacaccgccaccgacaaagattatctcgatattgaacgcgttatcggccatgaatatttccataactggaccggtaaccgagtgacctgccgcgactggttccagctcagcctgaaagaaggtttaaccgtcttccgcgatcaggaattcagctctgaccttggttcccgcgcggtaaaccgtatcaataatgtgcgcaccatgcgcggattgcagtttgcggaagacgccagcccgatggcgcacccgatccgcccggatatggtcattgagatgaacaacttctacaccctgaccgtttacgagaagggcgcggaagtgattcgcatgatccacaccctgctgggcgaagaaaacttccagaaagggatgcaactatatttcgagcgccatgatggcagcgcggcaacctgcgacgactttgtgcaggcgatggaagatgcgtcgaatgtcgatctctcccatttccgccgttggtacagccagtccggcacgccgattgtgaccgtcaaagacgactacaatccggaaaccgagcagtacaccctgaccatcagccagcgcacgccagccacgccggatcaggcagaaaaacagccgctgcatattccatttgccatcgaattgtatgacaacgaaggcaaagtgatcccgttgcagaaaggcggtcatccggtgaattccgtgctgaacgtcacccaggcggaacagacctttgtttttgataatgtctacttccagccggtgcctgcgctgctgtgcgaattctctgcgccagtgaaactggaatataagtggagcgatcagcaactgaccttcctgatgcgtcatgcgcgtaatgatttctcccgttgggatgcggcgcaaagtttgctggcaacctacatcaagctgaacgtcgcccgtcatcagcaagggcagccgctgtctctgccggtacatgtggctgacgctttccgcgcggtgctgctcgatgagaagattgatccggcgctggcggcagaaatcctgacgctgccttctgtcaatgaaatggctgaactgttcgatatcatcgacccgattgctattgccgaagtacgcgaagcactcactcgtactctggcgactgaactggcggatgagctgctggctatttacaacgcgaattaccagagcgagtaccgtgttgagcatgaagatattgcaaaacgcactttgcgtaatgcctgcctgcgcttccttgcttttggtgaaacgcatctggctgacgtgctggtgagcaagcaataccatgaagcaaacaatatgaccgatgcgctggcagcgctttctgcggcggttgctgcacagctgccttgccgtgacgcgctgatgcaggagtacgacgataagtggcatcaggacggtctggtgatggataaatggtttatcctgcaagccaccagcccggcggcgaatgtgctggagacggtgcgtggtctgttgcagcatcgctcatttaccatgagcaacccgaaccgtattcgttcgttgattggtgcgtttgcgggcagcaacccggcagcgttccatgccgaagatggcagcggttaccagttcctggtggaaatgcttaccgacctcaacagccgtaacccgcaggtagcttcacgtctgattgaaccgctgattcgcctgaaacgttatgatgccaaacgtcaggagaaaatgcgcgcggcgctggaacagttgaaagggctggaaaatctctctggcgatctgtacgagaagatcaccaaagcactggcttgatacttttgagccaaaatgcctgatgcgacgcttgacgcgtcttatcaggcctacaactccgttgaaattgctggttttgtaggctggataaggcgttcacgccgcatccggcagccgtgcccaactgcctgatgcgatgcttgacgtgtcttatcaggcctactagtccgttgaaaatgctggttttgtgcgccacatccggcatattaaccatgacgccgaatcagttgttcagaatgcccacgccgcattacccgttgcaatacttccgcttccagctccgctaatcgcaccgaccctaatcgacgcggacgggggatatccactgtcaaatccagaccaatttttccctcttcaattaacaacacccggtcagccattgctaccgcttcgctcacatcatgcgtcaccaacagtacggtaaagccgtgctcctgccaaagtgacacaatcaaatcctgcatctcgagtcgcgttaaggcgtccagtgccccgagcggttcatcaagcaacaataaacccggtcgatgaatcaacgctcttgccagcgccactcgctgtttctgcccgcctgaaagtgcggcaggccattccccggcgcgattctccagtcctaccgcagccaacgcccgacgcgcggcatcgcgccactggcctttaaggcctaacccaacgttatcaatcaccgatttccacggtagcagacgcgcatcctgaaacatcattcgcgtgtcttcctgaatttcagccagcggtgtggtgcctgccaacacatcgcctgcggttggcgtttccagcccggccagcaggcgcagcagggtacttttgccaccaccgctgcggcccaccaccgccacaaactgacctgccggaatatgtaaatccagttggttcaggacgatattttccgcgtaatgtttgcttactgcattgagcaacaatggtgtgccctggttcagacgagcagtattcataccgtggcctccttcaaatgataagccgggttccagcgcaaccagaggcgctctaacagctgcgcgctgacgtcagcaagtttgccgagcagggcgtaaagaataatagcgactaccaccacgtccgtttgcaaaaactcccgcgcattcatcgccagataaccaatgcctgaattggcagaaatggtttcggcaacaatcagcgtcagccacatcaggcccaacgcaaaacgcacgccgaccataattgagggcagggcaccaggcaggatcacatggataaacagcggtatgccggataatccatagctacgcgccatttccaccagaccgcgatcgatattacggatgccatgccaggtgttgatataaatggggaatagcgtgccgagcgccaccagaaagatttttgcggattcatcaatgccaaaccacaaaatcaccagcgggatcagcgccagatgcggtacgttgcgcaacatctgaattgaggtatccagcagccgttctccccagcgagatagcccgctaatcagtcccaaaatcaaccccagcgatccgccaattgaaaagccaatcagcgcccgccaggaactgatcgccagatgctgccacagttcgccgctggcggagagcgtccagaacgccgtcaccaccccttccggtgagggcaaaatacgcgtcgacagccagccaactgaggaggccagttgccacaccgccacgatgcccaccggtaaaaaccagggggcaacgcgcaataaccacttcttcactggcgttgccattatttcttccttagctttgcgcgactttacgggggataaaatcattcgccaccgcttcgccttgcggattcagcggctgcggctggggaatttccggaatggcgacatccagatgtgggaacagcaactcgccgacccgatacgcttcttccagatgcggatagcccgaaagcacaaagctgtcgatgccaagcgcggcgtattcgttgattcgcgcagcgaccgtaggaccatcgcccaccagcgccgttccggcaccgccgcgcactaagccaacgcccgcccataaattggggctgatctccagattgtcgcgcttgccgttatgtaacgccgccattcgctgttgtcctacggaatccgtccgggcgaatgcggcctgtgctttggcgatagtttcatcatcaagatgcgagattaaccgctcggcggcctgccacgcttcgtcgttagtttcacgaacaatcacatgcagacgaataccgaaacgaattttgcgtccatgcgcggcagctttcgcccgcacttgttcgatcttctcttttactagttctggcggttcgccccaggtgaggtagagatcaacttgttctgccgccagctcctgggcgacgtctgacgatccgccaaagtaaagcggaggataaggctgttgaatcggcgggaagagcagttttgctccgcgcacatgaatatgtttaccgttgaaattgacggtttcccccagcaataagcgccgccagacctgggtaaattccgccgaggcttcgtagcgctcgctatgatcaaggaacacgccgtcgcctgccagctcttgtggatcgctgcctgtgaccagattaaacaacgcacgaccatttgagagacggtcaagcgtggcggcctggcgagcggcaacggtaggtgaggttacgctggggcgcagggcgacaagaaacttcagccgctgcgtcaccgggatcatcgacgccgccaccagccacgcatcttcacacgatcgccccgttgggatcagcacaccggtatagcccagacgatccgccgcttgcgcaatttgttgcagataaccgtgatcaaccgggcgtgaaccttcttccgttcccagatagtgcccgtcaccgtgggtcggtaaaaaccagaacatattcagactcataattgttttccttccagttgagtgggctgccagatgcgctggcgaatatcgacttttttcggcaccagacgattttcataaaacagatctgccgtttgctgctgtaaggcggcaacctcggcgttaaccggtttgatggtggtaggagggcgatgatctaagtaagaggcaatcaccggtgccggtaagcccatcgtttttgccagtaaagcgatgctttgctcgcgctggctgcgggttaacgcatcggcctcactaaaggttgccagtacgccctgaataaaagcgccgtttttttctgcatagggacgagctgccagataaaacgatccagtttgattgagatcggtgccgtctttcagcacccgcacgccgccctgtaataatgcagcagagtagtagggatcccagatagcccaggcgtcaacgttaccttgctggaacgcggcgcgggcatcggcaggcgtcaggtaagtgggctggatgtcagtaaacttaagtccggcctgacgcagtgcacgcagtaaaaggttgtgtgaactggaacctttctgaaaggcaactttgtgacctttaagatcggctacggttttgatcgggctgttttctgccaccagaatcacttcggctttgggcttcggtggctcgacgcccacatataccaaatcagccccggcagcctgggcaaagattggcggaatatccccggtactgccgagatcaatactgccaacgtttaacgcttccaacatttgcggacccgcggggaactccacccaggagatttttgattgcggatagcgtttttccagtaactggtggctttttgccaataccataccaatactgcctttctgatagcctatacgtaacgcttcaggcgaggattctgcagcaaccgcaaaagtagagacgctaagcaatcccgccagcgccagtttaatgatgttacgcatggacattacctcgcagagacagaaggtcaggaacctgaacatcgcggcggtgcaatgcctgccagaaagtttctagcgcggtatcaagacgggtttgcagatttggcgtgaactggggtttgtgatggtaatcaataacttgtgagtcatcggcaaacacgccgtgcaggatctcctgggctttcatcgcacttaaaactggcttaagggcataatcgaccgccagcagatgagccaccgtaccgcccgtcgccagcggtagcaccactttgccttgcaaagcgcgctctggcagcaggtcgagcagggttttcagcgcgccggaataggcggctttatacacaggtgtagcgactatcagtccatcagcctgttgcagctgttcggtgaaggtcttgagtgccggactatcgaaacgagcgtaaagcagatcttccggggcgaagttttgcagattccagtgataaacctctacatcgaggccatttagtttttcccgcgcatattccagcaaggagctggagcgagaaggaaagcgaggactacccgccagggtgatgacacgcatactctctccttataaccaatcgttctttttttgttaacattgataacaattcggtcagtctgtcggagagacaagaaaatgccaaatataaattttgtgtatctttttctgaaaataaactaaagaaagggctttatatatcacgcatatttatttgttggatagtcattagatgttgaatcaatgaattactcgttcagttaatatttaaatattcatgaaatctataaattaaagatttgtcacttattggatttagtatgcttgatttaaatggcggtcaattattgttattattaagtctaatgtcatttaaaggcattatcatatttacgaagagatcaggatgatgacgatgaaaaaaagtgtattgacggcgtttataactgtggtatgtgcaacgtccagcgttatggctgctgatgataatgctatcacggatggctcagtaacatttaatggtaaagttattgctccagcttgtaccctggtagctgcgacgaaagattcagtagtcacattgccaaatgtcagcgccaccaagttgcaaactaatggtgcagtctctggcgttaaaactgatgtaccaattgccttagaaggctgtgatgttactgtaactaaaaatgcgacgtttacctttagtggtacggctgacggcgtgcaacctacagcatttgccaaccaggctaccaccgatgcagcgacgaatgttgctctacaaatgtatctgccagatggttctacatcggtaactcccggtaccgaaacgtcgaatattcagttagcggattctgctgagcaaacagtgacctttaaagttgattatatcgctacggggaaagcgacttctggtaatgtgaatgcggtaacaaatttccatattaactattattaatagaactcattaattgttttattaattagtacccctctagtgttctggaggggatattcatattttttaagagtgactatttatgaaaacttgcataacaaagggaattgtgaccgtaagtttaacggcaatattactcagctgctcatccgcatgggcggcaggtaaaggcgggattggacttgcagcaacacgtcttgtttattcagaaggtgaagagcaaatttcactgggtgtacgtaacaccagtccggatgttccttatcttattcagtcatgggtgatgaccccagataataaaaaatcagcagactttattattacaccaccgctatttgtgctgaatccggctaatgagaatctgttacgcattatgtacattggtgcgccgttggcgaaagacagagaaacccttttcttcactagcgtacgggcagtcccttcaacaacgaagcgggaagagggaaataccctgaagattgccacacaaagcgtcatcaaacttttctggcgaccaaaaggtttagcgtatcccttaggcgaggctccggcgaaactgcgttgcacttcgtcagctgacatggttacggtcagtaacccaacaccttatttcattaccctgacagacctgaaaataggtggaaaggtagttaaaaatcaaatgatttccccctttgataaataccaattctctctgccaaagggggccaaaaatagcagcgtaacgtatcgaaccatcaatgactacggggcggaaacgccgcaactcaactgtaaatcgtaagccgtcttcagttaagagagcgagatgtatagaactcatcgacaacacagcctgttaagctctggtggagtgccatcgtttattggtgggctggtggtgtttgtgtcggcagcgttcaatgcacaagctgaaacctggttcgatcctgcttttttcaaagatgatccctcaatggtggccgatttgtctcgtttcgaaaaaggacaaaaaataacgccaggggtttatcgtgtcgatattgttctgaatcagacaattgtagatacgcgcaacgtcaattttgttgagataacgccagagaaggggattgccgcctgtttgacgactgaaagcctggatgcaatgggtgttaatactgatgcgtttccggcttttaaacaactggacaaacaagcgtgtgtgccattggcggagattattccggatgccagcgtaacgtttaatgtgaataaactccgtctggaaatttcagtaccgcaaatcgccatcaaaagtaatgcccgtggttatgtcccccctgaacgttgggatgaagggatcaacgcgctattactgggatattcgtttagcggggctaacagtattcatagcagcgcagacagtgattctggcgacagctattttctgaatttaaacagtggcgttaatttaggcccatggagattgcgcaacaattcaacatggagtcgcagtagtggccaaaccgcagaatggaagaatctcagcagctatttgcagcgggcggttattccactaaaaggcgaactgaccgtaggtgatgattatactgcaggcgattttttcgatagtgtcagctttcgtggtgtgcagctggcgtcagatgacaacatgctgccagacagcctgaaagggtttgcgcctgtggtgcgtggtatcgccaaaagcaatgcccagataacgattaagcaaaatggttacaccatttaccaaacttatgtatcgcctggtgcttttgaaattagtgatctctattccacgtcgtcgagcggtgatttgttagttgaaatcaaagaagcggacggcagcgtcaatagctacagcgtaccgttttccagcgtgccattactccagcgtcaggggcgaatcaaatacgcggtgacactggcgaaatacagaaccaatagtaatgaacagcaggagagcaaatttgcccaggccacgttgcagtggggcggagcgtggggaacgacatggtatggtggtggacaatatgctgaatattaccgtaccgccatgtttggtctgggatttaaccttggcgatttcggagcaatttcgttcgatgcgacccaggcgaagagtacgctggcagaccaaagcgaacataaaggtcagtcatatcgttttctgtatgccaaaacgctcaaccaattgggcactaattttcaattgatgggctatcgctattcgacgtcgggtttctacaccctttccgacaccatgtataaacatatggatggctacgaatttaatgacggtgatgatgaagatacgccgatgtggtcgcgttattacaatttgttttacaccaaacgtggcaaactgcaggtcaatatctcccagcaattaggcgagtacggttcgttttatttaagtggtagccagcaaacttactggcataccgatcaacaggatcggctattacagtttggctacaacacgcaaattaaagatctctcgctgggggtttcctggaactacagtaagtcccgtggtcaacctgatgctgatcaggtgtttgcactaaatttttccctgccgctcaatctgttgctccccagaagtaatgatagctataccaggaaaaaaaattacgcctggatgacctctaacaccagtatcgataacgaagggcacattacacaaaacctgggtttaacggagacactactcgatgacggtaacctgagctacagcgtgcaacagggatataacagcgaggggaaaacggctaatggtagcgccagcatggactacaaaggggcgtttgcagatgcccgagtgggctacaactacagcgataacggcagtcaacaacaactgaactacgctctttcaggcagtttagttgcccattcacagggcattaccctggggcaatcgctgggggaaactaacgtgctgattgcagcaccaggcgcagagaatactcgtgtggcgaacagcaccgggctgaaaactgactggcgcggatataccgttgtcccctatgccacttcttatcgggaaaatcgaatcgcacttgatgcggcatcgttaaaacgtaacgtggatcttgaaaatgcagtagtcaacgtggttcccaccaaaggggcgttggttctggcggagttcaatgcccatgcgggagcaagggtattaatgaaaacatcaaagcagggtataccgctgcgttttggcgcgatagcgacgctggacggcatacagactaatagcggcattattgatgatgatggctcgctctatatgtccggtttgcccgctcagggagcgataactgtacgctggggcgaagctcccgatcaaatttgtcatatcagttaccagcttaccgaacaacaaattaactctgcgattacgcgaatggatgccatatgcagataatctttggagaaaaatgcgtgttattactacgactattttttgccgccgtcttaatgctatggtgcgctcaaactgctgcttatagcgggcagtgtcataccactcaggggaatccgtatattggcgtcaattttggcgttaaaaccctggaggaagaagaaaatacggctggagtagttaaagacaaattttatcagtggaacgaatcgaatgattattatgtttcctgtgattgcgataaagacaatgtcagaagtggccgatgggcattcgccgcggattcaccgttagtctatttaggcgacaactggtacaaaattaatgactatcttgccgccaaagttttattgcaggttaaaggcagttctcctactgcggttcctttcgaaaacgtgggcacaggggcagatacacgatggcatatttgcgatcccggcggtcaacgtttaggtggccagggggctagcggtaatagcggtagcttttccctgaaaatattgcagccgttcgttggttcggtcgtcattcctcctatggcgctggcgcgattatttgaatgctacaacatacccgcaggtgattcctgcacgactacaggtacaccggttttagtgtattacctgtctggtactatcaattcacttggctcatgttccgtcaatgccggagaaacaatcgaggtcgatctgggcgacgtatttgcggctaactttcgtgttgtagggcataagcctcttgcggccagaacggcagaacttgcaattccagtcaggtgtaacacgggaaacgcggggttagttaacgtcaacctgagtctgacggcaaccacagaccccagctatccccaggcgattaagacgtcacgtcctggcgtgggcgtggtggtgaccgatagccagaacaacattatttcccctgctggtggaacattaccgctctctattcctgatgatgcagacagtatcgcgcgaatgaatgtctatccagtcagcacgacaggtgtaccaccagaaaccgggcgatttgaagccacggcaacggtgagaataaattttgattaacgcgtgaacgtatgaagaaaaaaacgatatttcagtgcgttatcttgttctttagcattcttaacatccatgtcgggatggctgggcctgaacaagttagtatgcatatttatgggaatgtggtcgatcagggctgtgatgtcgccaccaaaagtgcattacaaaatattcatattggtgattttaatatcagtgattttcaggccgcgaataccgtaagcactgctgctgatttgaatatcgatatcaccggttgtgccgctggtattactggcgcggacgtcctttttagcggcgaggctgacacccttgcgccgacactgctcaaactaactgacacaggcggaagcggtggtatggcaacggggattgccgtgcaaattcttgatgcgcaaagtcagcaagaaatcccgctcaatcaggtccagcctcttacgcccttaaaagccggggataacacactcaaatatcaacttcgttataagtccacaaaggcgggagcaacgggcggtaatgcgacggcggttctctattttgatctggtttaccagtgaaggagtgatgttgaaacggataatctggattctgttcttactgggattaacggggggctgtgagctatttgcccatgatggcacagtcaacattagcggatcgtttcgccgtaatacatgcgtgctggcacaggatagcaagcaaatcaatgtgcagttaggcgatgtctcgctgacacgtttttttcatgggaattatggcccggagaaatctttcatcattaatttgcaggattgcggaacagatgtcagcacggttgacgtcaccttttcaggaacccccgacggagtgcagagcgaaatgctgtccattgaaagtggtacggatgcagccagcgggctggcaattgcgattctggatgatgcgaagatattgattccgcttaaccaggcgagtaaagactacagcctacatagcggtaaggtgccattaactttttatgcgcaattgcgacctgtcaatagcgatgtgcagtcgggtaaagtgaatgccagcgcgacatttgtacttcattatgactaatacgtggaacagattggcgctcttgattttcgccgttttatcgctgctggtggcgggtgaattgcgggcaggagtggtggtcggcggaacgcgatttatctttccggcagacagagaatcgatatctattttactgactaataccagtcaggaatcctggcttattaacagtaaaatcaaccgcccaacgcgttgggccgggggggaagcgtcgacagtgccagcaccattactggccgctccgccacttattctcctgaagcccggtactacaggcacgttgcgcttgctgagaacggaaagcgacatcttgcctgtggatcgcgaaacgctatttgagttaagcattgccagcgtgccatccggcaaagttgaaaatcagagcgtaaaagtggcgatgcgctcggtatttaaactgttctggcgacccgaaggtttgccgggcgacccgctggaagcttatcaacaattacgctggacacggaattcgcagggtgtacaactcactaacccaacgccttactacattaacctgattcagttgagcgtaaatggtaaagcgttaagtaatgcgggagttgtgccgcctaaaagccagcgtcagacaagctggtgtcaggcaatcgcaccgtgtcatgtcgcctggcgggcgataaatgattacggcgggttgagtgcaaagaaggagcaaaatctgccctgaaacaggttcggaaaacgtttgcgttttttttgccgcaggtcaattcccttttggtccgaactcgcacataatacgcccccggtttgcacaccgggaatccaggagagttcatgtactaccccttcgttcgtaaagcccttttccagctcgatccagagcgcgctcatgagtttacttttcagcaattacgccgtattacaggaacgccgtttgaagcactggtgcggcagaaagtgcctgcgaaacctgttaactgcatgggcctgacgtttaaaaatccgcttggtctggcagccggtcttgataaagacggggagtgcattgacgcgttaggcgcgatgggatttggatcgatcgagatcggtaccgtcacgccacgtccacagccaggtaatgacaagccgcgtctctttcgtctggtagatgccgaaggtttgatcaaccgtatgggctttaataatcttggcgttgataacctcgtagagaacgtaaaaaaggcccattatgacggcgtcctgggtattaacatcggcaaaaataaagatacgccagtggagcagggcaaagatgactatctgatttgtatggaaaaaatctatgcctatgcgggatatatcgccatcaatatttcatcgccgaataccccaggattacgcacgctgcaatatggtgaagcgctggatgatctcttaaccgcgattaaaaataagcaaaatgatttgcaagcgatgcaccataaatatgtgccgatcgcagtgaagatcgcgccggatctttctgaagaagaattgatccaggttgccgatagtttagttcgccataatattgatggcgttattgcaaccaataccacactcgatcgttctcttgttcagggaatgaaaaattgcgatcaaaccggtggcttaagtggtcgtccgcttcagttaaaaagcaccgaaattattcgccgcttgtcactggaattaaacggtcgcttaccgatcatcggtgttggcggcatcgactcggttatcgctgcgcgtgaaaagattgctgcgggtgcctcactggtgcaaatttattctggttttatttttaaaggtccgccgctgattaaagaaatcgttacccatatctaattatttcttcgaattcctctttataagataatcagggctttattttcagccctggttgttttatattcatcgctgttgcttatttagacattttgtacttttattgttgaggttattaagcgaagcgacaatggattgtgttgctgcggttttatagggtaggggagaggcagatgcgaattaaaccagacgataactggcgttggtattacgatgaagagcacgatcgaatgatgctcgatttagccaatggtatgctatttcgctcacgttttgcgcgcaagatgttgactccagatgccttttctcccgcatgcttttgcgttgacgacgccgcgctctatttctcttttgaagaaaagtgccgcgattttaatttatctaaagaacaaaaagccgaactggtgctgaatgcactggtagcaattcgctatctcaaaccgcaaatgccgaaaagctggcattttgtttcccatggtgaaatgtgggtgcccatgccgggcgatgcggcctgcgtttggttgagcgatactcacgagcaggtcaatttgctggtcgttgaatctggcgaaaatgccgcactatgcctgctggcacaaccctgcgttgttattgcgggtcgcgcgatgcagttgggcgacgccattaaaatcatgaacgacaggctgaaaccgcaggttaatgttgacagcttcagcctcgaacaggcagtctaacgcgccaacttaagtgcagtcttcggtacacagctacagcaaagaatggtgccatcatcgcccattgctgatttttttagcggcgtgacttcgccttctaaaagctgaacacggcaacttccacaaatgcccgcgcggcaagaataagggatacgaattccctgattttctaattgctccagcaacacctgttggttatttccacgaaatgcctgtccctgccagtcaatatctacatttgcgtccggttgttgcgtgatgttggcggtatcatcagcggcagctgcgccgtaaatttttgccggagccgttgccagaatttccacctcatcgccaacgcgaatcacgccgctattacgggcaattaaattctgaccaaaatcgacatcgccgttatcctgggcagtgcggaaagattgcaatgtttttaatggttcgcctgccggatgtttttgccctttttctgggctgacggtggtgaaaatacagcggctacaaggtttaaccacatcaaacaccacatcaccaatgcgaatcactttccagctatcttcttcccaggctgacgcgccggaaaccaccagattggggcggaattgctccatttttacactggccggacaacgttgttggagatcacgtaacgaggcttcgttagcaagaaggtaaggatagccatcagcaaatgacaggggtacagtgttgtggcgtttcacgcgccgggtcatttgtggccccacccagcgtaattgcacttcgcgggagaaaaatccacttagccatttgttgatcgcgtctggcgcaattcgcgcggtaaaatgtgtgccccaaacttcggttggtgcgtcttgtgtggcgaaatcagcaaaacgaacatatgcgctactgccatctggtgcggtgagatgcaagccatcatgcacaggtgaaggagtaaaccgtaccatctggggaaactggcgagcggtaataaacgtaccgtcaggttccgtgatcataaagatgcgatcgaaggccagaccactgacatcagccagagcatgtgtaagaccaatgccgcgcatcgatttaacaggatgaataaaaagccgggttaatgtcaccacggtgcggtcctcaaatgaaaataagccctcaactttatgacatgacgcgcttattagctataatgcgcaacaattttcttagcgcctgtcccattaggctattttatttgtcagtttggccctgggttgtgctcgaaatcctcacgtacttgtgtacgctccggtttctccgcgctgtccatgtccagactgactgcaacaattacgcctactgcggtaggctcttagagtaaaagtgacgatatgaattctctgtttgccagtacggcccgtgggctggaagagctgttaaaaactgaactggaaaacctgggggccgttgaatgccaggtggttcagggtggggtccatttcaagggcgacacacggcttgtttaccagagcctgatgtggagccgcctggcctcgcgtattatgttgccgctgggcgagtgtaaggtttacagcgatttagacctctatctcggtgttcaggcgatcaactggacagagatgtttaatcctggcgcgaccttcgctgtccacttcagtggtttgaatgacaccatccgcaacagtcagtacggcgcgatgaaagtgaaagacgcgatcgtcgatgctttcacgcggaaaaatctgccgcgtccaaatgttgatcgcgatgcgccggatatccgcgttaacgtctggctgcataaagaaaccgccagtatcgctcttgatctgagtggtgatggtttacatctgcgtggctatcgcgatcgtgctggtattgcgccgatcaaagaaaccctggcagccgctattgtgatgcgatccggctggcagccaggaacaccgctgctcgatccgatgtgtggttccggtacgttgctgattgaagcggcgatgctagcgaccgatcgcgcaccaggcttgcaccgtgggcgttggggctttagcggctgggtgcagcatgatgaagatatctggcaggaagtgaaagcggaagcgcaaactcgtgcccgtaaaggcctggctgagtatagctctcatttttacggttcggacagcgacgcacgggtgattcaacgtgcgcgcactaacgcccgtcttgcggggattggtgaactgatcacctttgaggtgaaagatgtcgcgcaactgaccaatccgctgccgaaagggccgtacggcacagtgttgagcaacccgccatacggggaacgtctggacagcgaaccggcgctgattgcgctgtatagcctgctgggtcggatcatgaaaaaccagtttggtggctggaatctctctttgtttagtgcctcgccggatctgctaagctgcttgcagctgcgtgcagacaaacagtacaaggcgaaaaacggcccgctggactgcgtacagaaaaattaccacgttgccgaaagcactccagacagcaaaccggcgatggtagcggaagactacgccaaccgcctgcgtaagaacctcaaaaaattcgagaagtgggctcgccaggaaggaattgaatgttaccgcctgtatgacgccgatctaccggaatataacgttgccgttgaccgttatgccgactgggtggtggtgcaggagtatgcgccgccaaaaactattgatgctcacaaagcgcgtcagcgtctgttcgatattatcgctgcaaccatttcggtactggggattgcgccaaacaaactggtgctgaaaacccgtgaacgccagaagggcaaaaatcagtaccagaaactgggcgagaagggcgagtttcttgaagttaccgaatataacgctcacttgttggtgaacctgacggattacctcgataccggtctgtttctcgatcaccgtatcgcccgtcgtatgctcggtcagatgagcaaaggcaaagatttcctcaacctgttctcttataccggcagcgccaccgtgcatgcgggattaggcggtgcacgcagcaccaccaccgtggatatgtcgcgtacttatctggagtgggcagaacgcaacctgcgtttgaatggcctgaccgggcgtgcgcatcgcctgattcaggccgattgcctggcgtggctgcgtgaggcaaatgaacagttcgatctgatctttatcgatccgccaaccttctctaactcaaaacgaatggaagatgcgtttgatgttcagcgcgatcatctggcgctgatgaaagatttgaaacgtctgctgcgtgcaggtgggacgattatgttctcgaacaataaacgtggcttccgtatggatctcgacggcctggcaaaactgggactgaaagcacaagaaattacgcaaaaaacgctctcccaggatttcgcccgtaaccgccagatccacaactgctggctgattaccgcagcctaaaggaatagtaatgtcattaatcagtatgcatggcgcatggctgtcgttcagcgacgcgccgcttctcgataacgcagaactgcatatcgaagataacgaacgtgtttgtctggtgggccgcaacggcgcgggcaaatcgacgttaatgaaaatcctcaaccgtgaacaagggctggatgacggtcgcattatttacgagcaagatttgattgtagctcgtctgcaacaggatccgccgcgtaacgttgagggtagcgtttatgatttcgttgccgaaggcattgaagaacaagcggaatatctgaaacgctatcacgatatttcgcgcctggtgatgaacgacccgagcgagaaaaatctcaacgaactggcgaaggttcaggaacagctggatcaccacaacctgtggcagctggaaaaccgcatcaacgaagtgctggcgcaactggggttagatcctaacgttgcgctgtcgtcgctttccggcggctggttgcgtaaagcggcattaggacgcgcgctggtgagtaatccgcgcgtgctgttgcttgatgaaccgacaaaccacctggatattgaaaccatcgactggctggaagggtttttgaaaactttcaacgggacgattattttcatctcccacgaccgttcgtttatccgcaatatggcgacgcgcattgttgatctcgatcgcggcaagctggtgacctatccagggaattacgaccagtacctgctggaaaaagaagaagccctgcgcgtggaagaattacaaaatgccgagttcgatcgcaaactggcgcaggaagaggtgtggatccgccaggggatcaaagcacgccgtacccgtaatgaaggccgcgtacgcgccctgaaagcgatgcgtcgcgagcgtggtgaacgtcgcgaagtgatgggtaccgcaaagatgcaggtggaagaggccagccgctccggtaagatcgttttcgaaatggaagacgtttgctaccaggttgacggtaagcaactggtgaaagatttttcggcccaggttctacgtggcgacaaaattgccctgattggtccgaatgggtgcggcaaaaccacgctgctgaaactgatgctcggtcagcttcaagcggacagcgggcgtattcacgttggcaccaaactggaagtggcttatttcgatcagcaccgcgcggaactggatcccgataaaacggtgatggataaccttgccgaaggtaagcaagaggtgatggttaacggcaagccacgccacgtattgggctatttgcaggactttctgttccatccgaaacgggcgatgacgccggtacgtgcgctttctggcggtgagcggaaccgcttgctgctggcgcgtttgttcctcaaaccaagcaacttattgattcttgacgaaccgaccaacgatcttgatgtcgaaacgctggaactgctggaagaactgatcgacagctatcagggcacggtattgctggttagccacgatcgtcagtttgtcgataacaccgttacagaatgttggatcttcgaaggcggcggtaaaattggtcgttatgtcggcggttatcatgatgcccgtggtcagcaagagcagtatgtggcgctcaaacagcctgcggtgaaaaaaaccgaagaagccgccgcggcaaaagcagaaactgtaaaacgcagcagtagcaaactaagctataaattgcagcgcgaactggagcagctaccgcaattgctcgaagatctggaggcgaagctggaagccctacagacgcaggtggcggatgcttccttcttcagtcagccacatgagcagacacaaaaagtgctcgccgatatggctgctgcagagcaggagctggagcaagcctttgaacgctgggagtatcttgaagcgttaaaaaatggtggctgatcgcaaaatagtcgatttaaacagagacagctgacaacggtaaaattgcctgatgaactgggtttatcaggcatgaaaaccaacactttgttagtcatctgtaaaatagcgcatcattaaggagtaccaatgtgcgaacatcatcatgccgcgaagcacatcctgtgctcgcagtgtgacatgctggtggcgttaccgcgccttgagcatggtcagaaagcggcatgtccccggtgtggcacaacgttaaccgtggcgtgggatgcccctcggcagcgtcccaccgcctatgcgttggctgcactgttcatgctgttgctgtccaacttgtttccttttgtgaatatgaacgttgcaggagttaccagtgaaattacattactggaaattcccggcgtgcttttttctgaggactacgccagcctcggcacctttttcctgttgtttgtgcaactggttcccgcgttttgtctgataaccattctgttactggtgaatcgcgcggaattaccggtccgtttaaaagagcaactggcacgggtgctttttcaactcaaaacctggggaatggcggagattttcctcgctggtgtgctggtcagtttcgttaaactgatggcttacggcagcattggggtaggcagcagctttctcccctggtgtttattttgtgtcctgcaactgcgcgcttttcagtgcgttgatcgtcgctggttatgggacgacatcgccccgatgccagaactgcgccagccgctaaaaccaggcgtcacggggatacgtcaggggctgcgttcgtgctcctgttgtacggcaatccttcctgctgatgaacccgtgtgcccgcgttgtagtaccaaagggtacgttcggcgtagaaacagcctgcagtggacactcgcgctgcttgtaacgtccatcatgctgtatcttccggctaatattttgcccatcatggtgacggatttattaggctcgaagatgccgtcgacgattctcgctggggtcattctgttatggagcgaaggctcttatcccgtcgctgcggtgatctttctggccagtattatggtgccaacgttaaagatgatcgccatcgcgtggctgtgttgggatgccaaagggcatggcaagcgcgacagtgaaagaatgcatttgatttatgaagttgttgagtttgtaggccgctggtcgatgattgacgttttcgttatcgcggtgctctcggcgctggtgcgtatgggaggtttaatgagtatttatccggcaatgggtgcattaatgtttgctttagtcgtcataatgacaatgttttctgctatgacgtttgacccgcgtttgtcgtgggatcgtcaacctgaatcagagcatgaggagtcctgacagtatggaatctaataatggggaagccaaaatccagaaagtgaagaactggtctcccgtgtggatatttcctatcgtcacggcgctcattggggcctgggttcttttttatcattacagccatcagggaccggaagtgaccctgatcaccgcgaatgcggaaggaattgaaggtggcaaaaccaccattaaaagccgtagcgttgacgtcggcgtggttgaaagcgccacactggctgatgatttgacgcacgttgaaatcaaagcgcggctgaattccggtatggaaaaattgctgcataaagacaccgtcttttgggtggtgaaaccgcagattggtcgcgaagggattagcggcctgggaacgctgctgtctggagtttatatcgaactgcagccaggcgcgaaaggcagcaaaatggataaatacgatttgctggactcgccaccgttggccccgcctgatgcgaaaggtatccgtgtgattctcgatagcaaaaaagccgggcagctctcgccaggagatccggtgctgttccgtggctatcgggtaggttcggttgaaaccagcaccttcgatacacaaaaacgcaatatcagctatcaactgttcatcaatgcaccttatgaccgactggtgaccaacaatgttcgcttctggaaagatagtggcattgcggttgatctgacgtcagcagggatgcgtgtggagatgggctcattgacaacgctgctgagtggcggtgtcagctttgatgtgccggaaggtctggatttagggcagccagtggcaccgaaaacagctttcgttttgtatgatgatcagaagagcattcaggattcgttgtacaccgatcacattgattatctgatgttctttaaagattcggtacgcggtctgcaaccgggagctccggtagagttccggggtattcgcctgggtaccgtaagcaaagtgccattctttgcgccgaatatgcgtcagacatttaacgatgattaccgtattccggtactgattcgtatcgagccagagcggctgaaaatgcagcttggcgaaaatgcggatgttgttgagcaccttggcgaattgttgaaacgtggtttacgcggatcgctgaaaaccggaaacctggtcactggtgcactgtatgttgatctcgatttctatccaaatacgcctgcaataaccggtattcgtgaatttaatggttatcagattatcccgaccgttagcggcggcctggcgcaaatccagcaacgactgatggaagcgttggataagatcaacaaactgccattgaatccgatgattgaacaggcaaccagtacgctttctgaaagtcagcgcacaatgaaaaacctgcaaacgacgctggatagcatgaacaagatcctcgctagccagtcgatgcagcagttgccgacggatatgcagtcaacgttgcgtgaattgaatcgcagcatgcagggcttccagcctggctccgcagcctacaacaagatggtggcggatatgcagcgccttgatcaggtgttgcgagaactgcaaccggtgctgaaaacgctcaatgagaagagtaacgcgctggtatttgaagcgaaggacaaaaaagatccagagccgaagagggcgaaacaatgaaaaagtggctagtgacgattgcagcactgtggctggccggatgcagctccggcgaaattaataaaaactattaccagttacctgtggtgcagagcggtacacaaagtaccgccagccagggcaatcgtctgttatgggtagagcaggtcactgttcctgactatctggcggggaatggtgtggtttatcaaaccagtgatgtgaagtatgtgattgccaacaacaacttgtgggccagcccgttggatcaacagttgcgcaacaccctggttgccaacctgagtacgcaactgcccggctgggtggttgcctcccagcctctgggaagcgcccaggacacgctcaatgttaccgtaacggagtttaacggtcgctatgatggcaaggtcattgtcagtggtgagtggctgttgaaccaccagggacaactgatcaaacgtccgttccgtctggaaggagtgcaaactcaggatggttacgatgagatggttaaagtgctggccggtgtctggagtcaggaagccgcttctattgcacaagagataaagcgtctaccttaattataaagatttgtaaatataaccgtctccggtatgttgcctgaggcggtttttttgtctctaacgtgcggaaaaatttgttcctcttcacattttttgtacaaccgacatgcccgtgtagctcacaaatatgacagtggcgtgaattttgcgcattgacggcagttatgattcgcggtattgcttaactgtgattgcacatttagtaatcactgttttcttttccaccagaaaccagtatgagggaaacgaggcatgaagagacaaaaacgagatcgcctggaacgggcacatcaacgtggttatcaggccggcatcgccggacgctcaaaagaaatgtgtccctatcagacgctgaatcaaaggtcacaatggctgggaggctggcgagaagccatggcggacagggtagtaatggcctgattctgtctctttaaaaagaaacctccgcattgcggaggtttcgccttttgatactctgtctgattataatcagaaggcagacgtatcctggaacagaccgactttcaggtcgctggcggtatagatcagacgaccatcaaccagcacttcgccatccgccaggcccataatcagacgacggttaacaatgcgtttaaagtgaatacggtaggtcacttttttcgctgtcggcagtacctgaccagtgaatttcacttcgccaacgcccaacgcgcggcctttaccttcgccgcccagccagccgaggtagaaccctaccagctgccacattgcgtccaggcccaggcatcccggcataaccggatcgccaataaagtggcatccgaagaaccacagatccggattgatatccagttctgcttcaacataccctttgtcgaagttaccacccgtttcggtcattttgaccacacggtccatcatcagcatgttcggtgctggcaattgcgggcctttagcgccaaacagttcaccgcgaccagaggcaagaaggtcttcttttgtataggattcgcgtttatctaccatgttctctgtaagccttattttattgaagcacgcaggatagctaacacgtgtacgctgaacaagtccgatcagttcggaataaaccagttcagccaacgtaatggccatggaaaacggtgacgtccttcctgttgcgatgcttgcgcgatacgttcctggatggtttgcatcagcgtcgtttggccttcgccatcccacaccagatttaataataacggcagtgcgtcagtcacatcgtctactgcccagatggtgaatttgccttcttctaccgctttcaccagttcactgtgaagacttaaatggcgaacgttagctgtggggataatgacaccttgtttcccggttaactcacgttgctggcaaatagcaaagaagccttcgattttctcatttaaaccaccgaccggctgggcgcgaccgaactgatcgactgaacctgtgatagcgatactctgattcaccggcacatcggcgagggcgcttatcagggcgcagagttcagccatcgaggcactatctccatcaacttcactgtatgactgctcaaatgtcagcgatgctgagaaggggatctgttgctcaagctgtagttccgacatcaggaacgcttgcatgatcatcatccctttcgcatggatattgccgccaagctccgctttgcgttcgatgtcggtgaattcaccatcgccaatatgcacaacgcagctaatgcgagaaggttcgccaaaagcgcgtggatgacccggaaattcaatgaccgaaagggcgttaatttgcccgatgcgttcgccttcggtttcaatcaggatttgctcctgaaggatctcatcctgcatacgttcagcgaggaaaccttcgcgccattcacgctgctgcagcattaagtttagctgctcgccggagaaggtgtcgccatcacacagggaggcgacctctttacactggcggaggatccactgcgggctaagcggaagtgtttcttgttcaccggtgtagcgtgctgcttcgcggataagtaccggccaggcatccgctcccggtgcaggtaagtgattatgtctggcggtaaatgtcacccagcgacaccactgggttactgactccgcatcgacaatctgcagagtatcttcaaattcgctataaatagcctgctctgaaagctctggctccatctcctggaaatcagccaatgattcgcgttcgcctaccagaatgactttcagcttcaatggcatcgaaggcacagagacggggagagggcgcgactcatcaaacgcaacccagtcaaaacgctcgcggttaacgatatttttcagccgcatccacagcagaggttgcgccagcagtgtacgcaaagagatgatgagaataccgccatttgcctgatgcaccagaccaggctgcagggtaatgtcgccattaaactggcgcaggcagccaaagagttgctccgcttctacccagtcggcagcgacaacttgcgttaaagtcgcaaaattatcatctgcactcactgcgtgacgtaagcggatggagtggccggaaacctcatagtgaccgcccaccagttggcctgcatcgctttgtagcgtacgcgcggcattggcaataagattcagatactcagactcttccggggccttcgccagcataaaagaggaggatgctcgcgtatgcagcaactgctccagtgcgaattgcagtcgcggttgagtatcactgaataaaggatcgttttcgtcaatcaaatgtggctgagcaaatatttcctgatagctatcggtatcaggaaccaggtcacgccatgcaagtttcgtaatggtcaaagttgatgttttttagtctgttgtcaaagccgcgattataccgtaaccggcactacagcacacgtagaaagcaccgacaatactcctggcatgggcgttaaagctcacaggatggagattcttttcttcactggcctaaaaagctgatattctgtaaagagttacacggtaacattgagatcgctatgaaatatcaacaacttgaaaatcttgaaagcggttggaaatggaagtatctggtgaagaagcatcgcgaaggggagttaatcacccgttacatagaagccagtgccgcccaggaagccgtcgatgtgttgctctcgctggaaaatgaacccgtgctggtaaatggctggattgacaagcatatgaatccggaactggtcaatcgcatgaagcaaaccattcgggccagacggaagcgccattttaatgcggaacaccagcatacgcgcaaaaaatcgatcgatctggaatttattgtctggcaacgtctggctggtcttgcgcagcgtcgcggtaaaacgctttctgaaacgattgttcagctgattgaagatgcggaaaacaaagagaaatacgcgaataaaatgtcttctttgaagcatgatctgcaggcattgctgggtaaggaataactgacgaagtcagttcaatttactaaaggcgaaaaaaaccccgcagctgcggggtttttctaccagacgagaacttaagcctgcggctgagttacaacgtctttgatgcctttaacttcgatctctacgcgacgatccggagccaggcagtcgatcagtgcagcacgctgtttcacgttgtcacaggtgttgccagtaaccgggttggattcgcccataccacgtgcggagatcttgtctgccgggatacctttggagatcaggtaatcaacaacagactgagcacggcgctcggacagaccctggttgtaagcgtcagaaccgatgcggtcagtgtaacccagaacaactacggaaccgtctttcggatccaggttgctcagctggctgtacagctgatccagagcagcctgaccttccggtttcagggttgctttgttgaagttgaacagaacgtcagacttcagagtgaagtgcttggtctgtacttccggtgccggagctggagccggagcaactaccggagctgcttcgccctgaccgaaacggtaggaaacacccaggctcagcagaccgttgtccggacgagtaccgatggtgtttgcgtcaccgatgttgttggtccactggtattccagacgggtagcgatttcaggagtgatcgcgtactcaacaccacctgcgaaaaccggagaaacgccagtgtcgtggtctttaaaggatgcgccaccaggtacgttagccttggtgtctgcacgccataccataccacccagacgagtgtatacgtccagatcgtcagtgattgggtaacccagtttagcagtcagttgaacgccctgagctttgtatgcaccgttgatgttgtcgcctttgtacggcatacgacctaaccagtcgtaacccatttcaaaaccaacatacgggttaacctggtaaccaccaaaagcacctgcacccagttggttttcgtgggtcggaccattgttaggaataaaaccagtgtcatggtactgggaccagcccagtttagcaccagtgtaccaggtgttatctttcggagcggcctgcgctacggtagcgaaaccagccagtgccactgcaatcgcgatagctgtctttttcattttttgcgcctcgttatcatccaaaatacgccatgaatatctccaacgagataacacggttaaatccttcaccgggggatctgctcaatattaactctaccgatatcttcggcttatgccgagcacccctggcgatgtaaagtctacaacgtagttgaaaacttacaagtgtgaactccgtcaggcatatgaaaaaaaagtcttgtataaggtatgtttaatcttttttgtcagcgacaatttacagaagaaaatcgcggaaaccgcttcagacaagcctccgcaaggaaaattagtcacgactgaaagcattggctgggcgacaaaaaaagttccaggattaatcctaaatttacttaatgatacaaattagagtgaatttttagcccggaaagttgtctcgtggcgtgagaggatgcgcttaccggacgcataataaaccccatagcgttaccttcatttgccgcatcaacaagttcagcatgctcttcttcagtcaaatcatctgccaaccaaccgatcaccacactgtaattgcccgtgcgtaaagcgcgaaccattgactccacagtgtggcaaggggagagctggctaatctgcattactttcgttaagggtagcccagatgcctgaacccattcccgactcagtttttgttgcggtgttaaccagagttgccagcgcgattgctgaccgagttgctgtaacaatggcaacagtagaagttgcgtcatcatgggctgatcttcgcgatagacaacttcactgataagcccggctgtagtgttttccgtagagacacgcgcaattttacttgctgcggatgagaacgacgaagaacgatgtgcatagcctgaagtgtacataatcaatccagcccctgtgagttactgtatggatatacagtacatccagtgacaacaaagatcaaccctattttcggaaagagcctcgcaaattttgtcgttggtgacgggaaaacataaattaatcttgccccttaagaataagttgcctattttcgtagttaacggatccgttaatgtgaatcattcttttatgttatgattttaaaaggaattttatgaaaagcctctcctataagcggatctataaatcacaagaatacctggcaacgttgggcacaattgaataccgatcattgtttggcagttacagcctgaccgttgacgacacggtgtttgcgatggtttctgatggtgagttgtatcttcgggcttgtgagcaaagtgcacagtactgtgtaaaacatccgcctgtctggctgacatataaaaagtgtggccgatccgttaccctcaattactatcgggttgatgaaagtctatggcgaaatcaactgaagctggtgcgtctgtcgaaatattctctcgatgcagcgctgaaagagaaaagcacgcgcaatacccgggaaagactgaaagatttgcccaatatgtcttttcatctggaagcgattctcggggaggtggggattaaggatgtacgggcgttacgtatacttggggcaaaaatgtgttggttgcgactgcggcagcaaaacagtctggtgacagaaaagattctgtttatgcttgaaggtgccattatcggcattcatgaagctgcgctcccggtggcacgccgccaggagcttgcagaatgggctgactctcttacgccgaaacaggagtttcctgcggaacttgagtaatctggcgttgcagacgaccaatctcaggcagtaatgcaatcaataatccaacttgttgtacgaccagaggttctttgctgtctgcccgtggttcaagttgctgcatccgctgtttcaggctagctaatgcctcattgacgcgttcttcatcagcaggttgatgatgtaacgcgtcatcaacatagcaaactgcgtcatcaagaaacgccagaatttcaggattagttaactgctcccggtgagcaccgagggctgagatatagctggtaaacgtatggttaaggcacagcaaccgaaacgcggcttcgcgaatttgcggggtaacgttcggctcgctggacatatttgataccaccgacgccagctcagcatcacggttgtgtgcatcgcggcgggcaatacgatacgccagacggttatcacgcccctgatggtattgctccagtatggcatcgagataccgacagttggcctctgtggcgcgttcgagcatgcgcggcagattgcgaaactgccagtcaggccagatgtagctcactgccgcccacgcaatggcacaaccaatcagcgtatcgattacgcgaggtaacgctacttcaaaaccttcacccagtaagttaaaacacagtagcaccaaaagtgtgatgaacatcgttgcatgagcgtattgcacgttacggaaggcaaaaaagagcacgccggtaataaccagcagcaccagctgcccttccagtgatggcacaaaccacagcacaggaatgccaatggcgatacctaccagcgtaccaataatccttaacttcaggcggtggcgcgtggcgttatagtttggctggcagacaaacaaacttgtcagcaagatccaatacccgtgatgcattccggttatttgaatgatggcgtagccgaagcacaacaccagcgacattcttaccgcatgacggaagagggcggattccggcgtgaagtgacggctaagacgcagccagatatcactcaacccgtgcgggctgtcatcagcgagctcattttcgtcattattatggggtagtgcctgggcctgttctgattcaattgttgccagttgggcatcaatggcgcgtaaattgttcagcaaaaatcccagtgttttgagtaaatcggcgggtgcgccgttatcgcgcatccgctccagcgcagcatcaatatgcgtaaaagcgcgctcaaaatgcggatcatgttgataaggctgacgcagcaaaatacagcgtgacagttgctggcacgcctggccctgcatcgacatcagccgctgaaaacggaacagcacgtcgctgtggcgaaaatgttcacgcaatgtttgatactgaatatgagaagagctggcacgctcgtgaatatcctgcgcgacaaagtaataatgcagcgtgcgacgcgttccccgttgaccacgatcgccacgtaagcgggtcagcagcgagagtttcgtctgattcaatgtcgccatcagttgtccgttggcgagagccaaatcgtacagcggtgcctggctttcatcttcaatatcaggatcaaacatgcgcgacttgagctcaagataacgcgccagttgttcatagcaacgcgccaggttgtcctgcagcgggcggaccgggaacagcagatgaccaataagtgtcaggacgttgtaccagacggcaccggccagcagataaatcggctgctgataccagtgctcataaagtgatgttcccaacatagtgtaaatggcgatcagcaatgcaccgaaggcaattgttgcatagcgttgacccagaccgccgagcaaaatgaagccgctggtagagagcgttaagccaatcgcaaatagccagggccagggaaacagcaattctactgaggccgaggcgataaaaaagcagaacagcgtaatgatgaggttacgcaaacgtcccgccagtcggtcatcgagatcggtcagcgccgctgccaccatccccagcgttagcggaatcgtcagttttacatcacccagccaccacggaaacgctgtggttccacaaagcgcaataaaaatacgcgcgtaatacagccaggcgctgttccaggtatagcgtttgagcaaaggacttagcataaaggccatattagtggattattcaaaacgacgacgtgcattggcttcacgcgcagcttgcgctgtttctaccgataccacgcgacgaccaaccggccatagtgcaatagcggcaattttaaagttcgcaatgccgacaggaatgccaatgattgaaatacattgtgcgatgcccgttgcaatgtgcatcaggcataaccaccagccaaagaaaatcagccagaaaatattcaataccgtaccgccagtattcagcagtacatttttgccagccgggttcagttcatcgacatgaatagcttcattgccataaggcaccagagacagtttagtgatctcccagcaggatcgtgtcagcggtaaggtaaaaatcagcacaatactgaccagagtcgccaacagccagcccagagtggtggcaaatccgccaagcacaaagttcagaatgttcaaaacggtacgcataaaacctcgctttactgtggttttcagtaatgggcggcaattgtaacgtttttttgggctggagcacgttttctctgacggttacactgataagaaataatttcgtgtggatctacagagtcatggaactgaaagcgacaacgcttggaaaacgtctggcacagcacccttacgatcgggcggtgatcctcaatgccgggattaaagtctccggcgatcgccacgaataccttattcctttcaatcaattactggcgattcactgtaagcgcggtctggtatggggcgagctggaatttgtactgccggacgaaaaagtggtgcgtctgcacggcaccgaatggggcgagacgcagcgtttttaccatcatcttgatgctcactggcggcggtggagtggcgagatgagcgaaattgcgtctggtgttttacgccagcaactggatttgattgccacgcgcactggagaaaataaatggctgacgcgtgagcaaacctctggcgttcagcaacaaatccgccaggctttgtcggcgttgccgttgccggttaaccgactggaagaattcgataactgccgtgaggcgtggcgtaaatgtcaggcctggttgaaagatattgaaagcgctcggttgcagcataaccaggcgtataccgaagccatgcttaccgagtatgcggattttttccgccaggtcgagtcttcaccgctgaatccggcgcaggcccgggcagtcgttaatggcgagcattctctgttagtgctggcaggtgcaggaagcggaaaaacgtcggtgctggtggcccgtgcaggctggttgctggcgcgtggtgaagcgtcccctgagcaaattttattgctggcgtttggtcgcaaagccgctgaagagatggacgagcggattcgcgaacggctacataccgaagacattaccgcacgcacgtttcatgcgctggcgctgcatattattcagcagggcagcaaaaaagttccgatagtcagcaaactggaaaatgataccgctgcccgtcatgaactctttattgctgagtggcgcaagcaatgcagcgaaaagaaagcgcaggcgaagggctggcggcaatggctgacggaagaaatgcagtggtcagtgccagaaggtaacttctgggatgatgaaaaattacagcgtcgccttgcctctcgcctcgatcgctgggtaagtctgatgcggatgcacggtggtgcacaggcagaaatgattgccagtgcacccgaagagattcgcgatctgttcagtaaacgtatcaagttgatggccccgttattaaaagcctggaaaggtgcgctgaaggcagaaaacgctgtcgatttttcgggccttattcatcaggcgattgtgattctggagaaaggtcgctttatcagcccgtggaagcatattctggttgatgaatttcaggatatctcgccgcagcgggcagcgttgttagcggcattacgcaagcaaaacagtcagacgacgttgttcgccgttggtgatgactggcaggcgatttaccgattcagcggtgcgcaaatgtcgctcaccaccgctttccatgaaaactttggtgaaggcgatcgctgtgatttagacacgacttaccgttttaacagtcgtatcggtgaggtggcaaaccggtttattcagcagaacccaggccagctgaaaaagccgctaaacagcttaaccaatggagacaaaaaagccgtcacgttattggatgagagtcaacttgacgctttgctggataagctctctggttatgccaaaccggaagagcgcattctgatcctggcgcgttaccatcacatgaggcctgccagcctggaaaaagcggcaacacgctggccgaagttgcaaatcgactttatgaccattcatgccagcaaagggcaacaggcggattacgtcatcatcgttggcttgcaggaggggagtgatggttttccggctgcggcgcgggagtcgattatggaagaggcgctactgccaccggttgaggatttcccggacgctgaagaacggcggttaatgtacgtggcgctgacccgggcacgccatcgggtatgggcactgtttaacaaagagaatccctctccctttgtggaaatactgaaaaatctggatgtgccggtagcgagaaaaccgtaagaaacaggtggcgtttgccacctgtgcaatattacttcagacggtccgcgagataacgctgataatcggggatcagaatatcgaccgcgtcgttgaaatgcggcgactggattatgaagtctgccgttgccacgttggtggcgaccggaatgttccataccgtcgccagacgcaacaaggctttcacgtcaggatcgtgcggcacggcatttagtgggtcccagaagaaaatcaatacatcaattttcccttctgagatcaatgcgccaacctgctggtcaccccccattgggccactcaacatcgcgttgacgttcatgccggtcgcgcgggaaattaagttaccggtagtgcctgttgcatacagtacgtgttgttccagtaacggttgatgccgttccacccagctcatcagcatttgtttgcagtgatcgtgtgccaccagcgcaatatgtttccgcgcaggtaaagtgcgagtcgtcagttccataatgtacatccgtagttaactttcctacagattactgtaagcacttatcgctgcaagataaagaccgaaaaagcctgcgcacaggcacaaaaatctcaggaagatggttgtttttccgcccactgcaggaaagtatttcgcgtttgtgggtcagccagtttaaaccaatacttcagccgttgttctgtgagcacctgagactgcggtggaatagcatccagctcggaaacacccgaaagcagcgtactgtcatctgccatcatcgtggcaaattgcggtagtgaagcgcgtttcgcggatttgttatagcgttcaacctcgacctcataatcaatcgtttttgccgttgaggtaatggcgagaatatccagctttaccggaatcggcgtcgcatcgccatccaacaattcaaggcgcggcgcggcatcaaaatggttagcttcccgctcattctccaggcgaggcaggcgaaaattgacctggttgatgagctgggtattaaaactgaccaccagcggtggggagatatacagccgttcttcactattggaaagatgaatcgtcttctcaacgcgaaacactaactgatgcggtccattatccagttcaatgctgtccgcaccgcgcagcagagagctggaaaccttcttgccgtcgagtaccagaagatcgacatcggttgaaagccgcagcgtggtggcaaaaacggataccggcaaacataatgcaatcaaggtggtcacgatgccggttttcataggtagctcctgtcaaaagaccgcccgaataataatgtgtcaaaatttttctttaatcatacttactaacatatagacatatttcccgcttttgctctcattcattcgtattagctgcatggttggcatgtcggctttgtcgtacactttgttaaacagtctggaggaaataatgaaagaaaccgatattgcaggcattttaacgtccactcacaccattgcgctggtgggggcaagcgacaaacccgatcgtcccagctatcgcgtgatgaaatatctactcgaccaggggtatcacgtcattccggtttcgccaaaagttgccggcaaaacgctgctgggccagcaggggtatggcacgctggcagacgttccggaaaaggtcgatatggtcgatgttttccgtaattcagaagcggcgtggggcgtggcacaggaagctattgccattggcgcgaaaaccctctggatgcaactgggggtgattaatgagcaagcggcagtactggcacgggatgccgggttgaatgtggtgatggatcgctgcccggctattgagatccctcgcctgggcctggccaaataaaaaatccccggaaggcaaaaaccttccggggattcgttcagggatcagttacgcagacgcggggcctggagttgtttgcggatggtctgcgccagctcatccatggatggctgttcaggatgttcatcctgcaattcgctacttagctgggcttcagccaggtaggtatgaaccggtaggccgttatcgtcctccatcaccacgtgataccacggagcggcgcgaagctcgtcattcaccgccagctcatcaggcgacggttcagagagcgaataaaccgggtcgatatccacgaccactccgagataacctaacagggaatggcggacctgctggccgataccgaatttgctggcaatcatagtcacctcccgggaaatctttacctttgatataagggtaaaattccacatttcaagttacatgacgcgacaggcaaaccctttcagatatagcccttccggataggtagcgatcaccggatgatcggctgcctgacggaactgctctataaattgtacatcacggccggcatcaattgcggcatccgcgatgattttctgaaataaatcgctggtcatcagaccggaacaggagaaagtcaggagaataccgccttcattcagcaactgaatcgccagcatgttgatatctttatagccacgacacgcgcccatcaactggcttttattctcaacaaacttcggcgggtccatcacgataacgtcaaatttttcaccgcgatcgcgataagtacgcagcaatttaaagacatcatcacggacaaactcagccttgctcagatccagtttgttcagctcaacgttctgccgtgcaatatccagcgcttcctgggaggtatcaacgctgacaacctggctgcaaccgcccatcagtgccgatacggcgaaaccaccggtataggagaaacagttcagcacacgtttattttcaacgtagcggcgggtagccaggcggctatcacgctggtccaggtagtagcccgttttgtgtccgtgctgaatatccaccagcagtttcatgccgtgttcttcaatcggcagcagggcaggtggcaactcgccggtgacgaggccctgggtcagctccatcccttcttttttacgtaccgcaacatcgctgcgatcgtaaatcgcacattccgggtacagcgtttgcagggcactaattaatgccgcgcgctgatattctgcgccagcactcagcagttgcagcaccagaaaattaccgaaacgatcgatagtaatacccggcaggccatcagattctccggcgattaaacgatagctgtcgaggccatctttttgcgccagccagtcacgccatttttgtgcttgttgcaaacggcgggaaaaaaaagcaatgtcgatagactcagacgggtcaaacgtccagacgcgcgcccggatttgcgaagctggtgaataagcgccgcgtgctaaccattttccctgatgatcaacaatatcgatggtttcaccgaggctggctttaccttccatgcgggcaacggccccggaaaagacccacggatggcgacgaagtaatgatttttcgcgccctttggctaacactaaacgtacactcataatttacttttctgtcgatgcaaagaaatgggcgtcattgtccggagttttccatggatttgcaacgcgtccattaaggataaggagagcagcaatgtcgaaagtctgcataattgcctgggtttacgggcgagttcagggcgtaggatttcgctacaccacacagtacgaagcgaaaagactgggtttaaccgggtacgccaaaaatcttgacgatggcagcgtggaagtggttgcctgcggtgaagaagggcaggtggaaaaattaatgctgtggttaaagagtggcggcccgcgttctgcgcgtgtggaacgggtgcttagcgagccgcatcatccctcgggggaattagccgattttcgtatccgttaaatacattttaccggttttggcaggccagcaattttggtggcttgcttagccggacctttcggaaacagtcgatataaatagcggctgttacctttttcttcgccaaatttattcgccatcgcttttaccagcatacgaatcgccggagaagtattgaattccagatagaaatcacgcacaaaacgcaccacttcccagtgttctggcgacagcgaaatcccttcgttctctgcaatcaccacagccagcggctcactccactggctgctttctttgagatagccttcggtatccgtttctatctctttaccttcgaagatcagcataattattactaccttaatcagactggcggcagtgtaacaaaaaacaaagccccgcataaagcgaggctatgaaagtgttagcgggtgagattaatcgcggctagcgaagcccagaatgctcagcaggctgacgaagatgttgtacagcgaaacatacaggctaaccgtggcacgaatatagttcgtctcaccgccatgaatgatgttgctggtttcaaacaagatagcgccagaggagatcagaatgaagaccgcgctgatcgccagatgcagagcaggcagttgcaggaagatattagcaaccataccaatcagcaccaccacaatacccgccatcagcataccgccgaggaacgacatatctttgcgggtggtcagcacatatgcagagcagcagaagaacactaacgccgttccgcccagtgccatagcgattacgtcacccattccggcagacagataggtgttcagaataggtccgaggatataacccagaaaaccggtaaaggcgaatgcggagataatcccggtcggcttattcgccgttttataggtcaggaacatcaaaccatacatacccaccagcgtcagaatcagacccggagatggcagcatcagcaccgtactggcagttgcggtaatcgccgaaaaggccagcgtcaggctcagcagaaaataggtattacgcagcaccttatgggtgctaagcagtgatgtacggtcatgtgaagaactaacaatacgatccattgagtcactctctatgacagatgtaattaattaagcagcataatgataatgcgtaagggcacccagaagttttacccatctttacgcatttgatctggaacaggtttaacagcggattatcaggtcattaagcaaatataacgccctgagaatttcgacaggcaaaagaaaaaggggttagcatttagctaaccccttatcttatttggcggaagcgcagagattcgaactctggaaccctttcgggtcgccggttttcaagaccggtgccttcaaccgctcggccacacttccggaatgacgcgcactataaacatcccgatgcggcgtgtaaacccctaatttgtttgtttgcctgaaaaacagccaaaagtgcattgatagcgtgaaataacagcagattgatcatttcatcaccatgaattccttctcttttactcgtttagcaaccggctaaacatccccaccgcccggccaaaagaaaaataggtccatttttatcgctaaaagataaatccacacagtttgtattgttttgtgcaaaagtttcactacgctttattaacaatactttctggcgacgtgtgccagtgcagaaggatgagctttcgttttcagcatctcacgtgaagcgatggtttgccttgctacagggacgtcgcttgccgaccataagcgcccggtgtcctgccggtgttgctaggagaagagacgtgcgatatgaataacgaggaaacattttaccaggccatgcggcgtcagggcgttacccggcgcagctttctcaaatattgtagtctggctgccacgtcgctgggattaggcgcgggaatggcaccaaagattgcctgggcgctggagaacaaaccccgcattccggtggtatggatccacggtctggaatgcacctgctgtaccgaatcttttatccgctccgctcacccactggcgaaggacgtcatcctttccctgatttccctcgattatgacgatactttgatggctgccgccggaacccaggcggaagaagtcttcgaagacatcatcacgcaatacaatggcaaatatatcctcgcagtagaaggtaatccgccgctgggcgagcaggggatgttctgtatcagcagcggtcgaccgtttattgagaaactcaaacgtgccgctgccggagccagcgcgattatcgcctggggaacctgcgcgtcctggggctgcgtgcaggccgcgcggcccaatccgacgcaggcaacgcctatcgacaaagtcatcaccgacaaacccattatcaaagtacctggctgcccgccgatcccggatgtgatgagcgccatcattacttacatggtgacctttgatcgcttgccagatgtcgacagaatgggccgtccgctgatgttctatggtcagcgaatccacgataaatgctatcgccgcgcccacttcgacgccggagagttcgtccagagttgggatgatgacgctgcccgcaaaggttactgcctgtacaaaatgggctgcaaagggcctaccacctataacgcctgttcctccacacgctggaatgatggcgtttcttttccaatccagtctggtcacggctgcctgggctgtgcggaaaatggtttctgggatcgcggttcgttctacagccgcgtggtcgatattccgcaaatgggtactcattccactgccgataccgtcggtttaaccgcgcttggcgtggtggcagcggctgttggtgtgcacgcagtcgccagcgccgttgaccagcgcagacgtcataaccagcaacctacagaaaccgaacatcagccaggcaatgaggataaacaggcatgagcactcagtacgaaactcagggatacaccatcaataatgccggacgccgcctggtggtcgacccgattacgcgcatcgaaggccacatgcgctgcgaagtgaatattaacgatcagaatgtgatcaccaatgccgtctcctgcggcaccatgtttcgcgggctggagatcattctgcaagggcgcgacccgcgcgatgcgtgggcgttcgttgaacgtatctgcggcgtctgtactggcgtacacgccctggcttcggtttacgccatcgaagatgctatcggtattaaagtgccggacaacgccaatatcatccgcaacattatgctggcaacgctctggtgccacgatcatctggtgcacttctatcagcttgccgggatggactggatcgatgtgttagatgcgctgaaagccgacccgcggaaaacctccgaactggcgcaaagtctctcctcttggccgaaatcatccccgggctatttcttcgacgtacaaaaccgcctgaaaaaattcgttgaaggcgggcagttggggatcttccgcaatggctactgggggcacccgcagtacaagttgccgccagaagccaacctgatgggctttgcccactacctcgaagctctcgatttccagcgtgaaattgtgaaaatccacgcggtctttggcggtaaaaacccgcatccaaactggattgtcggcgggatgccttgcgccatcaacattgacgaaagcggcgcggtcggggcagtcaatatggaacgcctgaacctggtgcagtcaattatcacccgcacggcggacttcattaacaacgtgatgatccccgacgccttagccatcggtcagttcaacaaaccgtggagcgaaatcggcactggtctttctgataaatgcgttctcagctacggcgcattcccggatattgccaacgactttggcgagaaaagtctgctgatgcctggcggcgcggtgattaacggcgacttcaacaatgtgctgccagtggatttggttgatccgcagcaggtgcaggagtttgtcgaccacgcctggtatcgatatcccaacgatcaggtcgggcgtcatccgttcgatggcatcaccgacccgtggtacaaccccggcgatgtcaaaggcagcgataccaacattcagcagctgaatgaacaggaacgctactcgtggatcaaagcgccacgctggcgcggtaacgcgatggaagtggggccgctggcgcgcacgttaatcgcttatcacaaaggcgatgctgcgaccgttgagtcggtcgatcgcatgatgtcggcgttgaacctgccgctttccggtatccagtcaacgttaggccgcattttgtgccgcgcgcacgaagcgcagtgggccgcaggtaagttgcagtatttcttcgacaagctgatgaccaacctgaaaaacggcaatctcgccactgcttccacggaaaaatgggaacctgcaacctggccgacagagtgccgtggtgtcggttttaccgaagcgccgcgcggggcgttaggccactgggccgccattcgcgatggcaagattgatctctaccagtgcgtggtgccgaccacctggaacgccagcccgcgcgatcccaaagggcagattggcgcttatgaagcggcgctgatgaacaccaaaatggcgatccccgagcaaccgctggagatcctgcgtactctgcacagctttgacccgtgcctcgcctgttcaacacacgtgctgggcgacgacggtagcgagctgatctccgtgcaggtgcgttaacagcgaaggagaatcatcatgcaacagaaaagcgacaacgttgtcagccactatgtctttgaagcgccagtccgcatctggcactggttgacggtgttatgcatggcggtgttgatggtcaccggatactttatcggcaagccgctaccttccgtcagcggcgaggcgacgtatctgttctatatgggctacatcaggttaattcacttcagcgccgggatggtttttaccgtggttttgctgatgcggatctactgggcttttgttggcaatcgatactcccgcgagctgtttatcgtgccggtatggcgtaaaagctggtggcagggcgtgtggtatgaaatccgctggtatctgtttctggcaaaacgtccgagtgccgatataggccataatcccatcgcccaggcggcgatgttcggctatttcctgatgtcggtctttatgatcatcactggttttgcgctgtacagcgaacacagccagtacgctatttttgcgccgttccgttatgtggtggaatttttctactggacgggtggcaactcaatggacattcacagctggcatcggctggggatgtggctgattggcgcgtttgtgatcggtcatgtctacatggcgctgcgtgaagacatcatgtccgacgacacggtgatctccaccatggtcaacggctaccgtagccacaaatttggcaaaataagtaacaaggagcgttcatgagcgagcaacgcgtggtggtcatggggctgggcaacctgctgtgggccgatgaaggcttcggcgtgcgggtggcggaacggctgtatgcccattaccactggcccgagtatgtggagattgtcgatggcggtactcagggactgaacttgctggggtatgtcgaaagcgccagccatctgttgattctcgatgccattgactacgggctggaacctggaacgctgcgaacctatgccggagaacgcattccggcttatctcagcgcgaagaaaatgagcctgcatcagaacagtttctccgaagtgctggcgctggcagatatccgcggacatctgccagcacatattgccctcgtcggtctgcaacccgctatgctcgacgactacggcggcagcctgagcgaactggcacgggatcaactgcccgctgcggaacaatcggcgttggcgcaactggctgcgtggggaattgtgccgcaaccggctaatgaatcgcgctgtctcaattatgactgtctgtcgatggaaaattacgaaggcgttcgtttgcgccagtacaggatgacactggaggagcagggatgagcaacgacacgccatttgatgcgttgtggcaacgaatgctggcgcgcggctggacgccggtcagtgaatcccgtcttgacgactggcttacgcaagcgccagacggcgtggtgttattaagcagtgacccgaaacgtacgccagaggtcagcgataatccggtaatgattggcgaattactgcgcgagtttcccgactatacatggcaggtggcgattgctgaccttgagcagagcgaagccatcggcgatcgctttggcgtctttcgctttcccgccacattagtgtttaccggcggaaactatcgcggtgtgctgaatggtattcacccgtgggcggaactgataaacctgatgcgcgggcttgtcgaaccgcagcaggagcgtgcctcatgagcgaaacttttttccatctgctggggccaggaacgcaaccgaacgatgacagtttcagcatgaatccactgccgatcacctgtcaggtgaatgatgaaccgagtatggcggccctggaacaatgtgctcacagcccgcaggtgattgcgctgttaaacgagttacaacatcaaatgagtcaacgccagccgccgttgggcgaggtgctggcagtcgatctgttaaatctccacgccgacgatcgtcactttatcaatacccttctcggggaaggggaagtgtcagtgcgcattcagcaggctgacgacagtgaaagtgaaatacaggaggcgatcttctgcggattatggcgggtgcgcagacgtcgcggcgaaaagttgctggaggacaaactggaagctggctgtgcgccgctggcgttgtggcaggcggcaacgcaaaatctcttgccgacagattcgctgttaccgccgcccattgatggcctgatgaatggcctaccgttggcgcatgagttactggcacatgtacgtaaccccgacgcgcagccgcacagcattaatctgacgcaattacccatcagcgaggctgatcggctttttctctcacgtctctgtgggccgggaaatattcagattcgtaccattggctatggcgagagctatatcaacgccacggggttacgccatgtctggcatttacgctgtacggacaccttaaaaggccctttactggaaagttatgaaatctgcccgataccggaagtggtgctggcagcgccagaagatttggtcgactctgcgcagcggcttagcgaggtatgtcagtggctggcggaagctgcaccgacgtaaaaagacggtaagtatcgctttcagtcttatgaatatcgcaatcggcgaatacctctggtcgtagagtttcaggataaagagggagatctaccattatcgggttatttttctctcttcgcctacaggagtgcgcatgtgggatgtcattgatttatcgcgctggcagtttgctctgaccgcgctgtatcactttttatttgtaccccttaccctggggctgatttttttgctggctatcatggaaaccatttacgtggtcaccggcaaaacaatctaccgcgatatgacgcgcttctggggtaagctcttcggtatcaattttgctcttggcgtggctaccggcctgaccatggagtttcagtttggtactaactggtcattctattccaactatgtgggcgatatttttggcgcaccactggcgatggaagcattaatggccttcttcctcgaatccacctttgtcgggctgttcttcttcggctggcaacggctgaataaataccagcacctgctggtgacgtggctggtggcgttcggttcaaatctctctgcgttgtggatattgaatgccaacggttggatgcaatacccgaccggtgcgcattttgatatcgacaccctgcgtatggagatgaccagcttcagcgagctggtctttaacccggtcagccaggtgaaatttgtgcacaccgtaatggcgggctacgtgaccggggccatgtttattatggcgatcagcgcctggtatttactgcgcggacgggagcgcgatgtcgcattacgttcgtttgccatcggttccgtcttcggtactctggcgattatcggtaccctgcaactcggagacagttctgcgtatgaagtcgcgcaagtacaaccggtaaaactggcggcgatggaaggggagtggcaaacggaacctgcacctgcaccgttccatgtggttgcctggccggaacaggatcaagagcgtaacgcctttgccatcaaaattcccgcgctgctagggatcctcgccactcactcattagataaacccgtgccgggtctgaagaatttgatggctgaaacctacccacgcttgcaacgcggacgtatggcctggctgttaatgcaggaaatatcgcaaggcaatcgtgagccgcatgtgttgcaggcattccgggaactggaaggtgacctgggctacggcatgttgctctcccgctatgcgccggatatgaatcatgtcacagccgcacagtaccaggcggcgatgcgtggcgcgatacctcaggttgcgccggtattctggagtttccgcatcatggtgggctgtggttccctgctgctactggtgatgctgattgcgcttgtccagacgctgcgtggcaaaatcgaccagcatcgctgggtgctgaaaatggcgctctggagtttgccgttgccgtggattgcgattgaagccgggtggtttatgaccgagtttggtcgtcagccgtgggcgatacaggacatcttaccgacatactccgcgcactccgctttaaccacaggacaactggctttctcactgatcatgatcgtagggctttacaccctgttcttaatcgccgaagtctacctgatgcagaaatatgcccgtctggggccgagcgcgatgcagagtgaacaaccgacgcagcaacaggggtaaaggagaaaatcatgtttgattatgaaacattgcgcttcatctggtggctgctgattggcgtgatcctggtggtctttatgatctccgacggatttgacatggggatcggctgtctgctgccgctggtggcgcgtaatgatgatgaacgccggatagtgataaacagcgttggtgcacactgggaaggcaaccaggtctggttgatcctcgctggtggggcattatttgccgcctggcccagagtgtatgcagcggcgttttccggcttttatgtggcgatgatcctggtgctgtgctcgctgttcttccgtccgctggcctttgattatcgcggaaaaattgccgatgcacgctggcgtaaaatgtgggatgccggtctggtcatcggcagtctggtgccgccggtagtcttcggtatcgccttcggcaacttgttgctcggcgtgccgtttgccttcacaccgcaattacgcgtggagtatctcggcagcttctggcaactgctgacgccattccctttattgtgcggattgctcagccttgggatggtgattttgcaaggtggcgtctggttacaactgaaaactgttggtgtgattcatctgcgttcacagctggcgactaaacgcgctgcactgttggtgatgctgtgctttttgctggcgggttactggctgtgggtcggtattgatggctttgtactgctcgcccaggatgctaacggtccttccaatccgttaatgaaactggtggcagtgctacctggtgcctggatgaataatttcgtcgaatcgcccgttttgtggatcttcccgctgctggggttcttttgcccattgctgacggtgatggcgatttatcgtggtcgcccggggtggggatttttgatggcgtcattgatgcaatttggcgtgattttcacggcaggcatcacgctgttccccttcgtcatgccgtcaagcgtgagtccgatctccagcctgacgttgtgggacagcacttccagccagctgacgctgagtattatgttggtaatcgtgctgatatttttgcccattgtgttgctctacactctctggagctactacaaaatgtgggggcgcatgacaacagaaactctccgccgtaacgaaaacgagttgtactaaggagcaggaacaatgtggtatttactttggttcgtcggcattttgttgatgtgttcgctctccacccttgtgttggtatggctggacccgcgtctgaaaagttaacgaacgtaggcctgatgcggcgcattagcatcgcatcaggcaatcaataatgtcagatatgaaaagcggaaacatatcgatgaaagcgatcttaatcccatttttatctcttctgattccgttaaccccgcaatctgcattcgctcagagtgagccggagctgaagctggaaagtgtggtgattgtcagtcgtcatggtgtgcgtgctccaaccaaggccacgcaactgatgcaggatgtcaccccagacgcatggccaacctggccggtaaaactgggttggctgacaccgcgcggtggtgagctaatcgcctatctcggacattaccaacgccagcgtctggtagccgacggattgctggcgaaaaagggctgcccgcagtctggtcaggtcgcgattattgctgatgtcgacgagcgtacccgtaaaacaggcgaagccttcgccgccgggctggcacctgactgtgcaataaccgtacatacccaggcagatacgtccagtcccgatccgttatttaatcctctaaaaactggcgtttgccaactggataatgcgaacgtgactgacgcgatcctcagcagggcaggagggtcaattgctgactttaccgggcatcggcaaacggcgtttcgcgaactggaacgggtgcttaattttccgcaatcaaacttgtgccttaaacgtgagaaacaggacgaaagctgttcattaacgcaggcattaccatcggaactcaaggtgagcgccgacaatgtctcattaaccggtgcggtaagcctcgcatcaatgctgacggagatatttctcctgcaacaagcacagggaatgccggagccggggtggggaaggatcaccgattcacaccagtggaacaccttgctaagtttgcataacgcgcaattttatttgctacaacgcacgccagaggttgcccgcagccgcgccaccccgttattggatttgatcatggcagcgttgacgccccatccaccgcaaaaacaggcgtatggtgtgacattacccacttcagtactgtttattgccggacacgatactaatctggcaaatctcggcggcgcactggagctcaactggacgcttcccggtcagccggataacacgccgccaggtggtgaactggtgtttgaacgctggcgtcggctaagcgataacagccagtggattcaggtttcgctggtcttccagactttacagcagatgcgtgataaaacgccgctgtcattaaatacgccgcccggagaggtgaaactgaccctggcaggatgtgaagagcgaaatgcgcagggcatgtgttcgttggcaggttttacgcaaatcgtgaatgaagcacgcataccggcgtgcagtttgtaatgcataaaaaagagcattcagttacctgaatgctctgaggctgatgacaaacgaagaactgtctaatgcgtagaccggaaaaggcgttcacgccgcatccggccactttcagttttactctttctcggagtaactataaccgtaatagttatagccgtaactgtaagcggtgctggcgcgtttaatcacatcattgaggatagcgcctttaatattgacgcctgcctgttccagacgctgcattgacaaactcacctctttggcggtgttcaagccaaaacgcgcaaccagcaggctggtgccaacagaacgccccacgaccgcggcatcactcaccgccagcatcggcggcgtatcgacaatcaccagatcgtaatggtcgttcgcccattccagtaattgacgcatccgatcgcgcatcagcagttcagacgggttaggtggcacctgaccgcgagtaatcacatcaaagcctcctttgccaaaatgctggatcactttgttgagctcatctttacctgccagatattccgacaagccatgttcattactcacggtaaacaggttatgcgaataaccacggcgtaagtcggcatcaataaataacactttttgatcggactgggcgatcaccgctgccagagttgaactgacaaacgttttaccactgtctggcgtcgcaccggtgatcatcagaatgttattctccgtctccatcatagcgaaatgcagactggttcgtagcgcacgtacggcttccacagcagaatccgccgggttatccaccgccaggaaggggatatttttagtacgatggcgctgctgattagaaaataaatttttcttacgcagacgggtgcgtttatccagccactcggacattgggatagtggcataaacgctgatgccgtgctcttccagttgttccggggcttctacaccacgacgcaacatcgcacgcgccagcacggcacccacagaaataaacaggccaagaataaaaccaagcaccacattcaacgcttttttcggtttcactggctgcggctgagtgactgccgggtcgataatccgcacgttaccaatggcactggatttcgaaatactcaactcctgctggcggttaagtaattgcagatataccgcacggcccgcttctacgtcacgacttaaacgcaacacttcctgttgggtggaaggcattgccgatacccgcttattcaggcgtttgcgttcttgctccagcgtctggcgtttttccagcagcgcacgataagttgggtgatctttcttatacagctgggagatctctgcctcgcggaaggtcagctcattgagttgattatcaacgttcacaatctgctcaagaacggctttggcttccaggttaaggtcaaccgaatcgcgctgctggcgataaacgttgagtttttcttccgcctggtccagctcgctgcgcacttcaggtaactggcgctgtaagaattcaaggctttgtgaatcctgcgccgcctggcgagcgatattctgttgcaaatagttgttagcgatgctgttcagaatacgagtaatcaactggggatcatcaccagtcatggtaagttccagcatcccgctttctttactgcgttcgctaacggtaaaggtttcctgcaatgcgttaatcgcttccagttcggtacgctggctcaggacaaactgtgttcctggtttggccttaatgtccgcgatagtcagcgcaacgccatctttttccagacgctggccgaccataccattgacggtgaactcttcaccttccagtgtatagtggccgttttccccaaccgtgagtgtcagttgctgatcctgaccattcagttgtggaatatgcatccagctgatcgccagctcacctggtttttctttggttaatctcgcccagccgcgacccacaatcggaaaatacttctgctcaactatgtcgcgcagattcagttcagcaatggttttaccgagaatcatgcgcgattgcagcagttggatctccggtgcagactcgggcgatgagttagggatcatatcgctcaggccgctgagaatggcgttgccctgtttttgctcaacctggaccagagtatctgcctgataaattggtgtacttaacagcgagtaagcgacagcgatcagcgtgaataacgcggtcacgctgataataaacttacggtgatcccataactcgccgaccagacgaagcagatcgatctcattttcctgagtgctgcctggtggcgtattcatatttttagttgtcatcgtattttataaactcaaattaccggctgaggcgcttcgcccattcctgactggcgcgctccaacataccgtagacatgttcaaatgcgtcctgacttttacgatagggatccgggatctctttctgttccagccattgcccaaacagcattgtcttcccgcggacctcgggagcgattgcggtaacctgagcaatatgctctgactccattgccagaatcagatcgtaatttcgtgccatctcagcagtgagcttacgtccggcatgtccttcaagagatacgccatgattagcggcaacatctgctgctgtcgcatctgcagggtgttttaccagaccatgaacacctgccgatttgacttttacgcctggcagacgtttacgcagcaagcgctcgccaatgggcgaacggcaaatgttgccggtacaaaccaccaggattgagttaaattttagttgggccatgtttgaatccaccgtgaagtctctgtcaggtcatgcaccccggaaatcgtcggtaccagcagagaaatcacacggttccaacgagccagcggcgcagtagtgacataaacaatgtcgtaaggttcaagctggaattccgttccgagtatcattgccgatgcgtccttcgcattcagctgataaatattggcgattttgccattctgcttgttttgcgttgcacgaataacaaaaatccccgtcgcatcagcgacatcctgattcataccctcagcgttacccagcgcttccgccagggtcataccgctgcggtccattttcagcgtgctctgtttacccacttcacccatcacgaagactttcagatcatcgttgcgcggaataaataaaatatcgcccgggtgcagcagtttgttctggcgcaagtcgccacgctgcatcagcgcatagaggttcactttggtctttacgccattctgggtgagcaccacgttgcgccagtctgcatctgcggtcagaccgcccgcggcgttaatcgcatccatgatggtcagaggaatattggtaatcggctgctgacccgatttgctgacttcgccggtgacgtacgctttttgcgagcggaacgccgcgacgctgacatcgacttgcgggctttcaatgactgaatccagacgcgctgtaatctcgttgcgtacctgggtaagtgttttcccggccactttcaggcgaccaatataggggtagaaaatcgcaccatcggcgttaacccagttgccggtatcactggcgctacggtattgccctgcgggggtggttagttccgggtgatcccagaccgtaaccatcaacacatccccaatgccgatacgatattcatagtttgcgatttgctgctccagctccgggttagcctgcgacataatcggtttggcgcgcaactgatcaatcaatcctggcgtgacgggatagatattgaccattttgtccaggtcatactgattgtcaggtagttcaatgacatccttgttactggtcgataaattctgaccaggaacaagggtacatgctgtcaaagacagaacagccaatgtcagtaccgaaaacttaaaaatgttctttttcattggtttatatttatcagtcaatgtaatgttatgaattacgtcaggttattgtccaaccggtacttctcgctctgccgtcattggatagagctggtatttgcgtgacagcatttgtccaccatcacgcgtcaatggtgtccacgaaaccaccgcgcggttgcggttaggtccaatggtcatcaagtcgaatggaatcgagatataaaaacctttactaaagccgccttcgccgtagtcatctttagatacgttactgattgccgcccatacccctaccgccacgccgctgtcaaagcgtttggcgacgtcgatcgttgcgcctttatcttttgccagatattgcccaacgctaagtttcatcagtacgccattgagcgtcggcgggttccagtaagccgtcacgaaacctgttggcgtggaataatcggtgaaacgcatcatgttgtcccagtcacgttgcttcacgtagttaacgtccacacccagcgcccagctggcatctagcgggcgataaagcagctcggaaccgacaccggcgtacatcgtttccagataaccgccatacacctggccatagaaaccattgcctaagtcggcaaagtagttcgcctgcaagttgttgagataaacgtcattgcgaacgtaatcacggatatgcgtgcgcacgcggggcagggtagagtccgcgggcaacagcgaagacttaaacttgtcgtagttgttgtaaatattggtgaaaataccgccatcaagcagcaggtggtcggtaaaccagtagcgggcactggacatcagccccagctggaacatatagaaatcttccgggccgcccagcgactgtgaaagtgttgggttgaaagagtagctaaagcgatcttcacgaatacggtagccccgaccaaaggcagaaagatcttctgcttcaacacgttgttgttgaagttgctctgattgaccaggcgctgtaccagccagctgtttgcgcaggctggctacgtcggtttcggtagtcaccatcgccatatgctcgcgcttttgcgtcacgctaatcttctcaacgccttgcggcaggttattcaccagaatccggttggcacgatcgaccgcttcgcgagaatcacggtatttgtattgttgaccagacatatacagcgtcttatcgcgcagctgaatttccggtgcttcaaaacctgcgttgtacttcagcgcggtaagttggttcgctactgtggtgtactgcaatccttcagattcaggcgcaggttgatatgccggttttggcgtatcgcgcagggcagggcgcagatcgttgaaattggtccgtaacgtgaagccaaacatcaacgtgttaccgcgttcataactcaggttgagatctgcccagctggcagcgcgataaactgcgccgacgttgaaatggcttgcctgaggcagtttgccagcgaaatcattctggtaattgttgccatcgtattcgagtttcagacgcaggggattccacggcgtttgatactcaatgccgccaaagatggaagccgggccacgaaagatatcgctaaagctgatatcgcccgcatcgtgagactctgcgcgatgacaatatttatcgctcacccggcaaaacgggttggtaatattgcccgcattaccggcgtagccccatgccatcccgagggtgaaatcaaatggccccgcttgcttgctggccaccagatactcaccgtcaaacagacccgtaccagcaatatcacgtttaccaaacgccacttgcggtagccagtaaccttcttcccacaggcgaagtttaaaatcgaatgatttgtctttgtatgactgatcgccgctgaaatcttcccactggctatatttgcgtgtgcgcacatccgtataacgaatggtgccttccagccatgggaacagcgccacggaggtggagtagaaccggtattgatcgttatcccggtagttgacgctgaattcaccttccggtgcgatgcgcgcatttggcatctgcaacaatcctgtgccgccaaagtctgattgcgacgaacccagcggatccgggtaggttaatacttcagcatgacaggcactggagacggcaatggccaggcagcttaaaagataagaattcttcttcatcagtcaggaacacgttgcgttaaaacagacacaatctggtcatttaaatcagcatatttttcgggcagtacatgcgcagaaaagcccaaccaaagctggctgccaggcggtggttccacatgtcttttattccacagggcaacaggggcgacgacagtctcaccctcaggcgtaatcaccataacgttattcttgtccgcgcctgcaaggcgggggtgatcttgcagataatcggtaacgctacggcctgcctgccagggcaattgcccagccccagaaaccgcacccagcagagtaatagtcaccggacgctgtacggtatagagcgtatagtccccgaccaacgggggattgctgttctcatccactcgaacaaaatcagggtccagtttgaccggtaagcgaccagtgatattgagattgagtaactgctggcgcacggatttaatcgttgccgccacatcgtcgtcagcttctgcttcccaggaagcaagctgtgccatgacatgttggtagtctttaagcgctttagctttcgccgcagagtcggtcagcaaggcaccaggccaccagaggcgatcgcgcagttgcggttgtgtcaccaactggacaacattttccacggggccaacggaaagtgtctgttgttcgccaggcagataaatagtcaccgttccttgcgcaaaggcatgggatgtcattacgtaaagtacgctggcaatgaaatacgactgtaatttattcatggtgcgggtttaagaaacgtcatttctacgggaataacccctgcgcctaacatttgccgactttgacgaacctggccagtagccgaatcgacccagaatgtgttttgccactgtttttctggccgcgtggaagtcacctcttcctgccagacattacacagcacattgcgacccgcaatattcagcgtctctaatccagcaaaggaaaaagtagaactcagggtcgcagagcgaaaatggttgtcttcactccagagaatatcgcgcgtccagcggctgccatcttttattgccagcgcgttacgcagagggtcctgcccggaatttgtcacttccagcagattattattaagtttgacggtttttaaaagacgtccattgtgggtaaccagcatggcgttatcctgggataaccatttgctttgttcttgttctatatatcccagtaccacaaagattcgttgcccttcattaaggcgtaaatacatcgtggaataaggcaacgcctggatctgctgatccgctacggtgatatcctgattatcgaaaaggctggcgcgaaatgtatcgaccatactttgctggctgtgcgtacatcccgcaagaaatagtgcgaaaatcgataaaataagagggcgcacctttaatccttgaaaggttaattaaaaaaatgcaaatctctaaagcccggtacgaatatcggaaccgggtatcatttaactttaatttcgacgcgttaaagcagtattagcgtgtagtggacgtggtggttgaggtgttatgagaaccgccatcgccactgtcatttgctgcaacaactgccaacgtcgccacaccaacagccgttgccacaccgacaactgtcgccgtgccgacagcgccagcagccacgccaccagtggtagtagcagtcgtggttgcgccggtagtggtcgttgtggtgccagtagtacccgtcgttgcctcggtcccgtttgttgcttcaggggcagcaaacgcagctggcgtcgtcaacatgaaggccataaggattgcagaaagcttgtgtttcataacttttcctttattcatcgcatggacaatacgtacgcttgagatcaggattgtctactttgagtataacatccttgtgaaatctccctttcctcataccgcttgcactatatactgcgggtaggaaaggcgcgcagagggaaatataagattgttaactatccccctctggaaatacgacttgtgagcataagataaatcttagcaaaatacaaattaaagataaggaaattgttacgaaagctattaattattgttggtaatatagtttcaagtggtactataactggctgttaaatggcatttataactattaggtgcagagatattcgcttaaatggattagtttctttgtggaaaagtaactgatgttataatgtatgatgttgactattgcactattccaataaaaccagtcagctttaaacaagcagcgtcatattaagagagataaacatttgccgctgttggtcctcgcaggccatttacgcggcaaaattccacacgtaatcctggtataagcacttctgcgtcgcggggagtgaatgcggaaatatggacctgaacttctttacgaccgtcggaggggataatgaatcctttgccgcttttgcgatcaaaggttttgacaattcctgtcattttacgggacaaacaaattccttactgaaaatactgcgctgcactatacggggttaataaaataaagccagcgatatttaagaccgccggacggctaaaataaaatttgcttaatctcaattatcatgcgttaatagctgcgtcggtttgaaagacagacagcatacaaagtagtttactaaagcagttcttattatcaggcattatccccttcttttgagtctctctcctgaacactaagtagtttctgtattaaagccctgtttgccgaaaggcccaaaatgaaggaagtaaaatatgtctaataaaatgactggtttagtaaaatggtttaacgcagataaaggttttggctttatcactcctgatgatggcagcaaagacgttttcgtccatttcaccgccatccagagcaatgaattccgcacgctgaacgaaaatcagaaagttgaattttctattgagcaggggcaacgtggccccgcggcagcgaacgttgttacgctctaaggttgccgttattactcaacatctccatttccgctgtccatgttgtcatggttcacagtaccgcacatcggcattcgatgtgacggagcgaaaccctttgggcgctaagtgtattttttgtaaatcgacgatgatcacctttgataacgtcgcgctgcaaatacgcactgaccatgtgccgctggatttcacaaaataatatcaggctccctcgtggagccttttttatatctgccttatttttcttcaacgctgtatgtatagtaagcgataacctgttgattattgaatctttcggggagatggcttataacattccttacctgaccagggtaccgggaaccaacaccttactggcgtgttgctgtctttcaagaccagaagaggttaacagtgaatattgaagagttaaaaaaacaagccgaaacggaaatcgccgactttatcgcgcaaaaaatcgccgagctgaacaagaatacagggaaagaagtctctgaaattcgcttcaccgcacgagaaaaaatgaccgggcttgaaagttatgatgtcaaaatcaaaataatgtgattttgtgaacatcacccgtgcgaggtgatgttccgcttgttgctaatttagtgaccaatcattggcgcttgtggaattaagcgtcggtacaattcatccggtaccgggctttgccatactcccgcatacattgcgtaaccaatcaccgcaaacataatccccagaaccagtagcgtcattaaccagccagacaacgcaaaggcttttttatttgccgcaggtttttgcagtgaaaaggtcaatgttgaggctaccggacatgactctacgcaagtcatacagccggtacattccactgttcgtacctgaattaatttatcgaccgggatccgtgatgggcaattttttgcgcatttgccacagtcgatacaactttcggcattgcgacgaatcttaaacggcgacaatagcgaaaccacgcccatcagcgctccatatgggcaaagataacgacaccaggcatggcgaataaacaggctggcaatcagcaaaacggtcacgctgattaatgtcgcggtccccatatgacgaaagaaatcgagcattttaacgtccatcaccacgctgtagggcgacaacataaaatagtgaatcgcctgagcgggcatcaataacgcgatatagagaaaaaaactcaacagcaaatacttcacgccgcgcagaggaatatccagccagcggggaaggacacattgccgaccaaacagtttgttaccgagatcgccgattaattcagaaagcgtaccaaccgggcataaccatgagcaaaaggcctttttgagtaatagactgatgacgataaaagcgaccaataacagcatcgcggcggcgtggacggacggtaactgacctgttacaaggctatatttcagattcatcagcccggcaatcggtagccagccttcgatacctcccggtctggcgacaaatgtcgtgctacttgccgtttcgtaatagcgcacccaataccagaacgtgatggcaatataaatattcattgccaacagtaataattgcgtcgctttacgccaggtcgtggcattacgccagtcattccacggtaatttgccgcccgtcgtgcctggccgccgctgccagcgggttcttttattctctgccatgattttgccagtccgttaagttgtataccaaatgccactattctagttgttcttaactggctgatattgattcaaatcgcgttcaggtctttcttatgcaaccatgcttccagagcggcaacactgcgtgtaatttcttcgtgtggaaggggggcagataatggctgctgctccagttgtgcgcatagctggctggcgatacgcattcccagactcgagcaactgctttttagctgatgcgcggcacgctttattttctcgctatcctgactggcgcgggcaatgtcgatttcatcgagaagcggcagggcatgttgtgtaaataataccagccattcgtggatcttctccgtccccattaactgagcatcttcattgagttgcgatacatccagcgattgatcgttattgtcttgcagttggagatagtgcgccagtaactgaccgagcacttcacgcggcaccggtttagggataatcccgcggaataatgaactggtacgctggcgcagcgtttcgtcaatgacatgggcgctaaagccaatcaaaaccagcgacggatattgctgtgccagttgtcgggcaagcgtaatgccgtcgacatccggcagatcaaaatccaccagtgcggcagcaaacggttcgctattttgcagtgtctctaaagcctgcgcggcattgccaacagcaacaacctgcgcaccactggtgttcagcatctcaacggtaattcgctgggttagcgggttatcttcaattaacagcaaacgtaaaccgtcaagacgcaccgcctgattgactgtttttggcacgggtgctgtggcaacacgtaacggcaagcgtaaacaaaaacagcttccaacctccggcgtgctggtggcgctcagttcgccgcccatcgcctgggccagacggctactgatagtcagccccagcccggtgccgccgcgtttgccgcttacctgcacaaatggctggaagatttctgccagtttcgcgggatcaataccgcagccgctgtcttccacttcgaccagccattgctcgccatcagtgcgactacgcaggataatgtacccttcgtcagtaaaacgcagggcgttgctcaacaggttggttataacctgacgaatacgtcgtggatcgcccattaacgcgcacggcatatcatcggcaattgccgttgccaggcgaatcgggcgacctttcacccgtccgctcattaattgcagggtactttccagcagcgggcgcggttcaaagggctcatcgctgaccgaaacattcttgccacctgcttcgatagcggaataatcgagaatatcgttgaggatggtcagcaacgattcaccagagtcagtaattgcccgcaaatcatcacgctgggcgttaagtgcggggttatctgccagcagttgagcagtgccgagaataccgtacagcggtgtgcggatctcatggctcatcgccgccagaaacgccgattttgcctggctggctttttctgcttccgcccgtgcctgtcggtgttctatcaccagttcctgcaattcagctgtacgcgctttgacctgcgccgccagctgttcgcggtggcgattcagtgcatgaacattgctgcgaaacgcatccatcagccgcccgatggtatccagctcccgtacgccagcggtttccgggaaaggggagtcaatatcaccgtccagcagccgttgcagcgcctgcgtttgttcggcaagtggacgcgtgactgagcgataaaccacgcgccaaaggatcagaatcagtgcgcaaagtgaaaccatccccagcaataacaggctgtattgcccgcgtgcactggctttttccagatgcgccagtccgtgctgattacgcagctcaatggtgtcgaccagctgactgacttcgctactaaactgcgcgaactgggcgatgttattttgtgcgagagtttgtaggtgattgctgatttcactgtcctgctgatacagcgccagcaaatcgctatattggctaacggtagttaacgttgttgcgacctgcgcacgaacacccggatcttcaatgcgtatttgccgacgttgcagaattttcaccgcattattgagctgcttttccagcgttggtgcatttttctggatctgctccagccccagattcatcaccatttgctgcacccgcagagcgctaaggcgcagttcattcatctggttaacatactcaagatcgatatcaatcagccgatcgagtgcactttcagcagcctgacgctgatcttgttcgatcaaatcgtaaatcccggcctgggtcgctccggcggaggttgccgcattattcgcctgaccttgcgccaggcgtgcgatctcatcggcggcagcgactatctgctgactgagttgctgttgttgctggcgtagttgcagacgccgccccaccagttccccttgctgacgtaatgaacgggagatctcctgctcctgttgttcaatagcggtggtatcaaaaccttgttcccgtaacgcttgcagcaacgcattaatcttcaggctttgtgcggtgagcattcgcccctgcgcctgccacatcttttcgttatcggcactggtcaggttctgcgcggcgaaaagttcccaggcgctggcttcgctcaactggcgcgccatattcatggtaggaatcaatgcctgagtgttgtctttttccacctggctgataaagcgcaggttgtaccatcccaccagggtactggtcagggttaacagcgccatcagggcaaagcccatccagagtcttcgggtcagggttaaattcacggtcggtgcactttaggtgaaaaaggttgagtcgcaaagcagaatgcatctagcataaagccttattattgatgaggctatcatgcgcgtactgctatttttacttctttcccttttcatgttatcggcattttcggctgataacctgttgcgctggcatgatgcgcagcattacacggtgcaagcctctacgccgcttaaagccaaacgcgcatggaaactgtgcgcgctttatcccagcctgaaagattcatactggttatcgttgaactatggtatgcaggaggcagctcgccgctatggtgtggatttaaaagtgctggaggcaggcggctacagccagttggctacccagcaagcacaaatcgaccagtgtaaacagtggggcgcagaggccattttgctcggtagtagcactacgtcatttcccgacctgcaaaagcaggtagcaaatctgccggtgatcgaactggtaaatgctcttgatgatcccctggtgaaaagccgcgttggtgtaccctggtttcagatgggctatcaacctgggcgatatttggtgcaatgggcgcacggtaaaccactgaacgtgctgttgatgcccggacccgataatgccgggggcagtaaagagatggtcgagggttttcgcgcagccattgccggaagcccggtgcgtattgttgatattgcgcttggtgataacgatattgaaatccagcgtaacctgttgcaggagatgctggaacgccacccagaaatcgacgtcgttgccggaacggccattgcggcagaggcggcaatgggtgaagggcgtaacctgaaaacgccgcttaccgtggtgtcgttttatctttcacatcaggtgtatcgcgggctgaagcggggaagagtgattatggctgccagcgatcaaatggtctggcagggggaactggcggttgagcaggccatcaggcaattacaggggcaatcggtgtctgataatgtcagcccaccgattttagttctgacgccgaaaaatgccgaccgtgaacatattcgccgctcgctgtcaccagggggatttcgtccggtctatttttatcagcacacatcagcggctaagaaataaccttcaccatgttgcgtcaccagtaaatccgcgctgagtttatgacgtaaacgacgaattaacacatcgacggtgcgcaggtcagggttttccacccgacgcgcagaaagcatacgtagcagacgttcacggctgagaatttcgcccggattcgtcacaaatgccaccaacatttcatactctgcgcgggtcagtttaatcggctcgccatcccgctccagcgtatggcgcgacacattcaggcaataaccggcaaagcgatagcagttgtcctgagtgtgcggttgagcttgtcgcgcgaggtcgattcgccagagcagatttttcacccgtactaccagttcgcgcagttccagcggtttggtgacgtaatcgtctgcgcccatttccagcccaacaatacggtcaatccgatcgctgcgtccggtaaccagaataatccccaccgttgagcgttctcgcagggcgcgggttaacatcaggccattttcatcgggtaagttgatatccagcagaattaaatctaccggctgattctgcataatttcccgcagcccggcaccgctcgctgtaacggaaacggtatacccctcctgagtgaagtaagattgtaatcgcgcctgggtaaccggctcatcttcaacaataacaatgtgatgtggcatcagagggttttactcattctgttcatatctgttcatattctgccgtaagccgttcatcctgaccagtgccgctgttcatatttgctcattaagatcgcttcactaaaccataattttacaggggctattatgcggaaactctggaacgcgctacgccgacccagtgctcgttggtcggtactggcgctggtcgcaattgggattgtgattggcattgcgctgattgtattgccacacgttgggatcaaagtcaccagcacaaccgaattttgtgtcagttgccacagtatgcaaccggtgtatgaagaatataaacagtcggtgcatttccagaacgcctccggcgtgcgagctgaatgccatgactgtcatatcccgccggatattccaggcatggtgaagcgcaaactggaagcgagcaatgatatctaccagacctttattgctcactccattgatacacctgaaaaattcgaagccaaacgcgcggaacttgccgagcgtgaatgggcgcgaatgaaagaaaacaactcggcaacctgccgctcctgccataactacgatgcgatggatcatgcgaagcagcatcctgaagcggcacgtcagatgaaggtggcagcgaaagataatcaatcctgcatcgactgtcataaaggtattgcccaccagttaccggatatgagtagcggcttccgtaagcagttcgatgagctgcgcgccagtgctaatgacagtggtgacacgctgtactctattgatattaagccaatttatgcggcgaaaggcgataaagaagcctctggttctctgctgcctgcttcggaagtgaaagtccttaaacgtgacggcgactggctgcaaattgaaattaccggctggacggaaagcgccggacgtcagcgtgtactcacccaattcccaggtaaacgcatctttgttgcctcgattcgtggtgatgtgcagcagcaggtaaaaacgctggagaaaaccaccgttgccgacaccaataccgagtggagcaagttgcaggccaccgcatggatgaagaaaggcgacatggtgaacgatatcaaaccgatctgggcctatgcggattcgttgtacaacggcacctgtaaccagtgccacggcgcaccggaaatcgcccactttgacgctaacggttggatcggcacgctcaacggcatgattggctttaccagtctcgataaacgtgaagaacgcactttgttgaaatatctgcaaatgaatgcgtctgacaccgcaggtaaggctcacggcgataagaaggaagaaaaataatgaacaataacgatctctttcaggcatcacgtcggcgttttctggcacaactcggcggcttaaccgtcgccgggatgctggggccgtcattgttaacgccgcgccgtgcgactgcggcgcaagcggcgactgacgctgtcatctcgaaagagggcattcttaccgggtcgcactggggggctatccgcgcgacggtgaaggatggtcgctttgtggcggcaaaaccgttcgaactggataaatatccgtcgaaaatgattgccggattgccggatcacgtacacaacgcggcgcgtattcgttatccgatggtacgcgtggactggctgcgtaagcgccatctcagcgatacctcccagcgcggtgataaccgttttgtgcgcgtgagctgggatgaagccctcgacatgttctatgaagaactggaacgcgtgcagaaaactcacgggccgagtgccttgctgaccgccagtggttggcaatcgacggggatgttccataacgcttcggggatgctggcgaaagctattgccttgcatggtaatagcgttggtacgggcggagattactctaccggtgctgcgcaggtgatcctgccgcgcgtggttggctcaatggaagtgtatgaacagcaaacctcctggccgctggtattgcagaacagcaaaaccattgtgctgtggggctctgatttgctgaaaaaccagcaagcgaactggtggtgcccggatcacgatgtttatgaatattacgcgcagctaaaagcgaaagtcgccgccggtgaaattgaggtcatcagcatcgatccggttgtcacatccacccatgagtatctggggcgcgagcatgtgaagcacattgcggttaacccgcaaactgatgtgccgctgcaactggcgctggcgtatacgctgtacagtgaaaacctgtacgacaaaaacttcctcgctaactactgtgtgggttttgagcagttcctgccgtacctgctgggtgagaaagacggtcagccgaaagatgccgcatgggctgaaaaactgaccggcattgatgccgaaaccattcgtgggctggcgcggcagatggcggcgaacagaacgcaaattattgctggctggtgcgtgcagcgtatgcagcacggtgaacagtgggcgtggatgattgtggttctggcggcgatgctggggcaaattggcctgccaggtggtggctttggttttggctggcactataacggcgcaggcacgccggggcgtaaaggcgttattctgagtggtttctccggctctacgtcgattccgcctgttcacgacaacagtgattacaaaggctacagcagcaccattccgattgcccgttttatcgatgcgatcctcgaaccggggaaagtgatcaaatggaacggtaaatcggtaaaactgccgccgctgaaaatgtgtatttttgccggaactaacccattccatcgccatcagcagatcaaccgcattattgaaggctggcgcaagctggaaacggttatcgccatagataaccagtggacctcaacctgccgctttgccgatatcgtgctgcctgcgaccacgcagtttgagcgtaacgatctcgaccagtacggcaaccactccaaccgtggcattatcgccatgaaacaggtggtgccgccgcagttcgaggcgcgcaacgactttgatattttccgcgagctgtgccgtcgctttaatcgcgaagaagcctttaccgaagggctggacgaaatgggctggctgaaacgcatctggcaggaaggtgtacaacaaggcaaaggacgcggcgttcatctgccagcgtttgatgacttctggaataacaaagagtacgtcgagtttgaccatccgcagatgtttgttcgccaccaggcattccgcgaagatccggatctcgaaccgctgggcacgccgagtggcctgattgagatctactcgaaaaccatcgccgatatgaactacgacgattgtcaggggcatccgatgtggtttgagaaaatcgaacgctcccacggtgggcccggctcgcagaagtatccgttgcatctgcaatctgtgcatccggatttccgacttcactcgcagttatgtgagtcggaaactctgcgtcagcaatatacggtagcgggtaaagagccagtgttcattaacccgcaggatgccagcgcgcgcggtattcgtaacggtgatgtggtacgcgtctttaacgctcgcggtcaggtgttggcaggggcagtagtttctgaccgctatgcacccggcgtggcacgaattcacgaaggggcatggtacgatccagataaaggcggcgagcctggtgcgctgtgcaaatacggtaaccccaacgtgctgaccatcgacatcggtacttcgcagctggcgcaggcgaccagtgcgcacactacgctggtggaaattgagaagtacaatggagcagtggagcaggtgacggcgtttaacggccctgtggagatggtggcgcagtgcgaatatgttcccgcgtcgcaggtgaaatcatgaccacgctgacagcacaacagattgcctgtgtttacgcctggctggcgcagttgttctcccgtgaactggacgatgaacaactgacgcaaatcgccagtgcgcagatggctgaatggttttcgttgctgaaaagcgaaccgccgctggctgcggcggtgaatgagctggaaaactgtattgccacgctgacagtacgtgacgatgcccgtctggaactggccgctgacttttgcggcctgtttctgatgaccgacaaacaagcggcgctgccgtatgcatcggcctacaaacaggacgagcaagagattaaacgcttgttagttgaggcagggatggaaaccagcggcaatttcaacgaaccggcagatcatctggcgatctatctcgaattgctcagccatctgcatttttcgctgggagaggggaccgttcctgcgcgaagaatcgacagtttgcggcaaaaaacactgacggcgctgtggcaatggttaccagagtttgttgtgcgttgtcgtcagtatgacagctttggtttttacgcggcactaagccagttattgctggtgttagtggagagcgaccaccaaaacagataacgtcgtttgtgcgcctgaaaagacgcgtttagcgtcgcatcaggcattatggggcagttgccggatgcgtcatcacatccggcaaacacacatcacggatgagttacaaaccgggaaagtcgctggcgcagcaggcggttttcctgcttcaggtgcgcaatatcatccattaacgtcagcgccaccgcgatcccaggccagtccagagccagttcatgacgcaggcgtactgcgcgttgcaccacgatggcggcatggtcgtcaaatacccaggttgtttcctggatctcacgcggttcaaccacccccaaaccgacaatttcattcaactcctcttcagagatgccggtatgcaggcaaaattcggtaatagtaaaagtcaccgtaacattagccattatgctttcccccaatctttacgtggatcaaaagacgactgggcgtctgccagttgctgccacagcgcggcagtgttttcatccggtttcggcggcatcacgattttcagtaccgcatacagatcgccggtctgttttttgctcaccagacctttgcctttaacgcgcaatcgttgcccggcctggctgcctggcgggatagtcagcaaaatgctttctttcagtgttggaacggtgactttagcacccagcgccgcttcccacgggctaaccggcactacaatttccagatcatggccgacaatatcgaacagcggatgtggcgcaatatgaatcaccagccacaaatcgccatttggaccgccgttttcgcccggcgtcccctggcctttcagacggatgcgttgaccattgccgacgcccgccgggatcttgacattcagcgttttcggaatttcctgttcgatcatgccaaaggcgttataaaccggcaggttatagctgatggtacgcttatgctcagtaagcgtttcttcgaggaataccgccacttcgatttcaatatcgtggccgcgtgtggcggggcgttgacggctctggcgggcatgctgaccgaaaattgacgagaagatatcgtcaaaatcttcggcattaaaactctgaccgtcgccatgatggaactgacggttaaattgcggatcgttgcgatgttgccacatctgatcatactcagcgcgacgttgttcatcacttaacacttcccaggcttcagcgacctctttgaagcgggcttcggcatccggttctttgctgacatcaggatggtatttacgggccagtcgacgataggcggtcttgattgtcttgagatcgtccgtcggtttcacgcccatgatggcgtaataatcctttaattccatagcgttatctcgcgtaaatcaacacaaattgaaggaacccctgtaaggtaactcctataagtgtagggtaatcctcaaaatttcatatgccaacacagaatatgttattgaaatcatcgcggagaggaggtcgccatcaagatgggttgctgaacatattttaaacaggtgaaaaagggtgagcgatttttgatagttgaaccaggcactttaagtttaactagggcgtcattatttattaaattttatagacgctatatatgggtagtaatatacatggaattagttgcactgcaaataattatttgaaacaggcctggaacgatataaaaaatgagtacgaaaaaaatcaaacatattcaatcacgctttttgaaaacacactggtgtgttttatgcggttatacaatgaactcagacgtaaagtaaatgaagaggatactccatgtctggaatgtgaatcactagaaaaagaatttgaggaaatgcagaatgataatgatctatcattatttatgagaacattgcgtactaatgacacacaaatttattcaggggtttcagaaggtattacatatactatacaatatgttcgagatattgatattgttagagtgtccttgccgggcagagcttcagagtctatcacagattttaaaggttattattggtatggctttatggaatatattgaaaacattactgcgtgtgatgggtgatgctgccaacttactgatttagtgtatgatggtgtttttgaggtgctccagtggcttctgtttctatcagctgtccctcctgttcagctactgacggggtggtgcgtaacggcaaaagcacc

SEQ ID NO: 36 - DNA, 78027 bp, Escherichia coli
  source 1..78027: mol_type = genomic DNA
caggtgaatcaggccgccggtcgttatattcgttcgcatgaagccgttcagcacatcagcatccgcgaccggctgaatgattttatgcagcagcacggcacagcactggcggcggcactggcaccggggctgatgggctacagtgagctgacggccattgcccgaaactgtgccatacagcgtgccacagatgccctgcgtgaagccctcctgtcctggcttgcgaagggtgaaaaaattaattattccgcacaggatagcgacattttaacgactatcggattcaggcctgacgcggcttctgtggatgacagccgtgaaaaattcacccctgcgcagaacatgattttttcgcgtaaaagtgcgcaactggcatcacgtcagtctgtgtaaaattccccgaaaatccgcctgtttttactgaaaaaagccatgcatcgataaggtgcatggctttgcatgcgttttcctgcctcattttctgcagaccgcgccattcccggcgcggcctgagcgtgtcagtgcaactgcattaaaaccgccctgcaaagcgggcgggcgaggcggggaaagcactgcgcgccgggagcgtatttcatgaatttaaatctatagaaaggtaaataaatagtaacgtggataatggacgttttcagtcagatatttatttttataaaaataaaagggaaccttaggctccccttacaaaattatttttttattaaactgtgtttttttatgtctttaaatatatgagcttctttagtctgcacacgattatctatccagtcatccatcattgcgtccacttgactaaacagtccctgagcttcatattttaaatagactttttcaaagtcgttattaacggagtaaccatcagcttcgttaccctttggatttaacaactttgcgtatctgagcttttccatcatcagccctcctgtcaaaatatcgaaaacagcattcgatataccataatatatagcacaaaacttgagcaaattctacttaagtttgattttaatttgttggtgtatctacatacattttgtaaataacttcggaatatattgctattaatgaactaaggttcaaaaggaagtcttgatccctctcaagtgagaattgatctggcaatgcgcttgtaagaacaagaactccaaggcattcttcttcattggagttttgctggtaggcaagaataggaacggaaataaatgaacaataattctttctgtcggcaggatcggatatttttaactcattacttttagtaatgtctgggcatatcttcaattccttatgcaaatacgtcaaacctacgtgtccaaatccgggtttccagtttctatttttcttagtaattctatcatcacatattctagatatgacttctaaataatttttttctttgttataaatgtaaagagttatattgaattttgactcgcttttataaccaaatagcgtttctctatttctggacaaataaccaagaacagtcgaaaaaaaacttgcggtatcaatagggaagtctgcgagggtcaattttttctctttgttggcaataagtattttacgaatatggctattcacctgcagcgttgttaaatatataacaagcttttgagtggtggataatttatcttcttgcaccattcttttccggattgtctcgatttcacttactctcttattatattcttttgttaagtcaccaagttcgattgtagcgtcatcttttttatctaaatattttgcaccccacgcaaggatcaaatggagaatgaaaaacattatacaagctataaaaaagaaatcacttattccattgttaatatcttttttttgaaaaacatacgatacaccaagaccaataataataggagcaaataatgcgttccacaaactagtgaaacttacaaaataacctgcgaattgagcattaatgcgtctgttccttcttaggattctttctatttttctattgtccatgatttaccttggaatataaataatcagcataccattgtaacattattcttctattttctatatgaagagcatgattatagatccctcgtattgagttcttatccatatgggctaattgtaattcaatccactgagtatcaaaacctttttcatgtaaaattgtcgacattgtatgtcgaaaaccatgacctgtagcacgtcctttgtagccaattaactcaatcacttgcgatacgctttctttcgagattggtttgctgcggctgttcctgccaataaagatgtaagggtagtggccggtaataggtttgagctgtttaaaaagatcaactacctgagtcgataaaggaacaatgtgaggcctacgcattttcatccgttcagcggggatctcccatatacctttatcaaggtcaacttcttcccacgtagcaaatcgcatctcctgtgttcttacaccagttaacatgactatctttgtcgcatttttagtgatgatgcttccggtatatgcttcaagatcttgaataaaataaggcaactcttcggcagataaaaatgggtggtgtttttgcttaggaacggccagagcgatagctaaatcaggtgctgggttgtattcagctcggccagttatgattgcataacgaaagacctcaccgcatctttggcgcacttttctggtcttctctagtgctcctcgtttctctattcgtcgcaatacttcaagcagttctaatggtttgatttcactgacaggacgtttaccaatgaatgggaagacatcttgctcgaatgtcttaatgatttcttctcggtaggccacagtccagcggtcagctttgttggtatgccattctcgacatattgcttcgaaagaattttctgttgatagcttttgggcgagccttaaagctttgcgttcctctaccgggtcaatgccattagcaacctgcttacgggcgatatcacgcttctcacgtgcttctgcgaggcttactaaatcgtagctgccaaatgacattaaccgcgctttccctgcaaaccggaaacggaaacgccagcctttcgagccatctggattgataagcaatgacagaccttgtccatcgttcaatgtgtatggtttgtcttgtggttttgcacgtttgatctgtatatcggttagagccatgtgtataactgaaaactacgtataaaaaatctatacacattactatacatgtttttcgcggattcagggagatgatctcggactattacggacaagataattattcatcatattgaatctaaaggattttatggagtctctcggaactggctggatgaggtttggcggaagatcacaggagtcgaacctgcccgggaccgctggcggccccaactggatttgaagtccagccgcctcaccggagacgacgatcttccgcgcctcgattgctacatggaggcggggcgcattatagctacttccttgagtttctacatcccccagatcagttttttccgcctaatacacgcagcgtattatcacgaaagcattatagttcatataaaacccatattttacaatgatatatgagcggaattaacgctaccacgatcacataaaacaagaatcataaattaataaccagatatcggaatattcgctctcacagggatggtttacaaaatgcgttatcggtctcagcacccctatagcatcaaggaaaagcagatgaagagtgaagtgttgtccgttaaagagaaaattggttatggcatgggagacgccgccagccacattattttcgataacgtaatgttatatatgatgttcttttataccgatatttttggcattcctgccggatttgtcggaaccatgtttttggtcgctcgtgcactggatgcgatttccgatccttgcatggggttgttggccgatcgaacgcgctctcgctggggtaaatttcgtccgtgggtactgtttggcgcactgccattcgggatcgtctgtgtactggcctatagcacgccagatctcagtatgaacggcaaaatgatctatgcagcaattacttacaccctacttaccttactttataccgtcgtcaatatcccttactgcgcattgggtggtgtaatcaccaatgacccgactcagcgtatctcgctgcaatcctggcgttttgtgctggcgaccgcgggaggcatgctttctactgttctgatgatgccactggttaatttaattggcggtgataataaaccactcggtttccagggcggtatcgcggtcctttccgtggtggcattcatgatgctggcattttgtttcttcaccactaaagaacgcgttgaagcaccacctacaacaacgtctatgcgggaagatttacgtgatatctggcaaaacgaccagtggcggattgtcggtttactaaccattttcaatatcctggcggtgtgcgtacgcggtggggcgatgatgtattacgtcacatggattttgggcacgccggaagtgtttgtcgcttttctcaccacttattgcgtgggtaacctgattggttccgcactggcaaaacctctgaccgactggaaatgtaaagtcactatcttctggtggacgaacgccctgctggcagtgattagcctcgcgatgttctttgttcccatgcaggccagcatcactatgtttgtcttcatcttcgtgattggtgtgttgcatcaactggtgacacctatccagtgggtaatgatgtccgataccgtcgactacggcgagtggtgcaatggtaaacgcctgaccgggatcagttttgctggcacgctgtttgtgctcaaactggggttggccttcggcggcgctcttatcggctggatgctggcttatggcggatatgatgcggcagaaaaagcgcagaacagcgccacgattagcatcattattgcgctattcacgattgttccggcgatctgttatttgctgagcgcgattatcgctaaacgctactactcactcacgacgcacaatctgaaaaccgttatggaacagctggctcagggtaaacgccgttgccagcaacaattcacctctcaagaagtgcagaactaaggaacggcaatgaaaattagcgatggaaactggttgattcaacctggcctcaatttgattcacccgcttcaggtgttcgaggttgaacagcaggataatgaaatggtggtctatgctgccccccgtgatgtgcgtgaacgtacctggcagcttgatacgcctttatttacgttgcgctttttctccccacaggaaggtattgtcggtgtgcggattgagcattttcagggggcgctgaataacggtcctcattatccgctcaatattttgcaggacgtgaaggtcacaatcgaaaacacagaacgttatgctgagtttaaaagtggcaacttaagcgcgcgtgtcagcaaaggtgagttctggtcactggattttctgcgcaacggcgaacgtattaccggtagtcaggtgaaaaataatggctacgtgcaggacacgaataatcaacgcaattatatgtttgagcggcttgatcttggcgttggcgaaacagtttacggtctgggagagcgctttactgccctggtgcgcaatggccagacggtagagacctggaaccgggacggtggcacaagtactgaacaggcgtataaaaatatcccgttctacatgactaaccgtggttatggggtactggtcaatcatccccagtgtgtctcttttgaagtgggatcggagaaagtctccaaagtgcagttcagcgttgagagtgaatatctcgaatactttgttatcgacggcccgacgccgaaagcggtacttgatcgttatacccgctttactggtcgtccggcgctgccgcccgcgtggtccttcggcctgtggctaaccacttcatttaccaccaactacgacgaagcgacggtaaacagctttatcgatggtatggcggaacgcaatctgccgctgcatgttttccactttgactgtttctggatgaaagccttccagtggtgcgattttgagtgggacccgctgactttccctgacccggaagggatgatccgccgcctgaaagcgaaaggactgaaaatctgcgtctggattaacccctatatcggtcaaaaatcccccgtctttaaagagttacaagagaaaggctatttactcaaacgcccggacggttcgctatggcagtgggataaatggcagccaggtctggcgatttatgactttaccaatccggatgcctgcaaatggtacgccgacaaactgaaaggtctggtcgcgatgggcgttgattgctttaagaccgactttggcgaacgtatcccaactgatgttcagtggtttgacggttccgatccgcagaaaatgcataaccattatgcgtacatctacaacgaactggtgtggaacgtgctcaaggacaccgttggtgaggaagaagctgtcttgtttgcccgctcggcctccgtcggtgcgcagaaattcccggtacactggggtggcgattgttacgctaactacgaatcaatggcggaaagcctgcgcggtggtttgtctattggcctttcaggttttggcttctggagccacgatatcggcggctttgaaaataccgctccggcgcacgtttacaaacgctggtgcgcgtttggtttgctctccagccatagccgtttacacggtagcaaatcttatcgtgtgccgtgggcctacgatgatgagtcctgtgatgtggtgcgcttcttcacgcaactgaaatgccgcatgatgccgtatctgtatcgtgaagctgcgcgtgcgaacgcgcggggtacgccgatgatgcgggccatgatgatggagttcccggacgatccggcttgtgattaccttgaccgtcaatacatgttaggcgacaacgtgatggttgcgccggtgttcactgaagcgggcgatgtgcagttctacctgccggaaggtcgctggacacacctgtggcacaacgatgagctcgacggtagtcgctggcataaacagcagcacagcttcctgagtctgcccatttatgtgcgtgataacaccctactggcgctgggcaacaacgatcaacgtcccgattacgtgtggcacgaaggcacggcattccacctctttaatctgcaagacgggcatgaagccgtctgtgaagtgcccgctactgacggatcggtgatctttactttaaaagcagcacgtactggcaacacgattactgtgactggtgcgggcgaggcgaagaactggacgctgtgcctgcgcaatgttgtgaaagtaaatggtctgcaagacggttcgcaggctgaaagtgagcaggggctggtggtgacgcctcaagggaatgcgctgacaattacgttgtaatctattgaagaatgccgggtacgtctgagtcgtacccggcgagattgatgtttactgcaccggctctgtcgatgtaacttcgctactggaaacgacgcccgcattcatggtttgagtcacttgctgcttttcagcatttacggcgtggagttgcccgttaacggtaggtttcagcgtggcattggcctgaatcgcaccgctggcaaccagttgaatattgccatcgccagttatgggtaactcaggccatccccactgttgcaaaatattcaccggcacaccgcgtccattcaggctgatatgtgtctgacgttgtggcgtttgtgaaacactggcggtggcttccagaatgcctttttcagtaaatgcactcagttcgctgatattcaccgtgctgctgttggcggtcagcgccagcgacgggcgacgaacatcaacacgattgaatgtcgcggcggcggcattcagattcgccgagccactccagacgccccatttatgatcggtaaccagcgtcaggttggcaccgtaaccatcgagcgcggtgagctgccacgggaagtcagggtcgatatcaatgatcagattgcggctggcgctaaatctcttcagttgcaggctgtttaaccaaccgggtgtcgtttccatccacaactgttgccagtttttcggcaaggtatattccagcccggcaattgccgcatcatcaaggatcaacgttttcccgtcacgcagccagttccctgacgttctgaccatacccccttcccagcggctggtgaactggcgcagcgctacgccctgcggggaaaattccgcgtttataatcgggtcaaataaatgcagcgaaccataaatgaactcgctagcgttcatcgacagtttgccttcttgtgtctgccagtcatctttactgaaggtcatgttgcgcaagctgagatcgaggtcggtcaccgcccagtccggaccttgcaaacgagcatcgatcacttccaggcgaccaatctgcaacgacgggacagagcgtaatggcgcaaagaagtcggttagcgatttttcgctttgtagacggatatccgccatgcgcagattttccacttgccagctgccgtcggcgttacgctgcgcgtttccggttaatgtcccgcgggcgatgtcggcacccaggttagtcagcgtaacgcgatcgttatcaatactgccttcaatcagtacattggtggcaggaacatcattgagcgaaagcgatccggcactaaactgaatctgcgccttcgtacccagcactttaccggcttctggtgaccacggaaccacgccgccatttacccgctgcgcgctcagtttccattcgctattcgggctattaaacgccatatcacgcagttgcagacgatcggctttgaacggtagcggcgcggtctggtcggtgagattcagcgtcccgttttccagcaggatggtatcgacatggcgtggttcggtcagttgccgactgcttagcgcaatgtcgacactttttgccaccagggtcgcgggctgaccatcacgaccaaacgtgacgttctccagcacgatatgagatggcgcggaaaaacggtgatccatcgccccgaaggccagatgatagtcgctattctcggaaacccatgcgctgatatgttctgctccccagcgggtttgcagaagaaaatagaggccagcgatcaccactaacagagcgatgagaatgtagagaagcagcttcccaataaatttcatggtcttccatcccgtgaaatgcacataagggagttatgcacgatttacgcgcaatcctcaaggcgggaatggtgaaagaggtgagactgcggcggtaattatcttaccgccgccagtgaattactgtttttctggtgggaaaatcagattcagcacgatggcagtaataccgcccgcggcgatcccggaggagagcaggtttttcagccattcaggggcaaactgcaaaatcagcggctgctgagacacgcccagaccaaccgccagcgacagcgcgataatcagaatcgcccgacggttcagcggctcacgagaaacgatacgcacaccggaggcggcgatggtgccaaacattacaagcgttgcgccgcccagaaccggttctggaatgtgttgtacaaaaccgctcactgccgggaacagacccagcacgatcaacatcagcgcgacgacaaaaccgacatagcggctggcaacaccagtcaactggatcactccgttgttttgcccgaagcaggagttcgggaaggtgttaaacaccgccgaaacaaacgagttcaggccgtttgccagcacgccacctttcaggcgtttcatgtacagcggaccggacactggctgttcggaaacgtcagaggtcgccgtgatatcgccaatggtttccagcgaagtgatcataaagaccagcatcagcggcagcagcagactccattcaatgccaagaccgtaatagagcggcgttggcaccataatcagttcttgcgtcatcggttcgttgctttctggcaacatgcccataaaccacgccagcgcatatccggccgccatcgcaatcaccagtgaggccacgcgtaagtaagggttacgttgacggttaagcaggataattaaggctaagaccacgcctgccagcagcagatttttcggtgcgccgaaggtgttatcgctcatggctgcgtaaccgccgccaatggacgttaacccaacctgaattagcgacaggccgataatcatcaccacaacgccagaaaccagcggcgtaataatgcggcgcgccagatgcagaacgcgggagatcaccatctcggtgcaacttgccagcatcaacgtgccgaacaaagccgccatcatggtaggaacatcagcaccaccggttttcagcgcggtaccgcccataatcagcggggcaacaaagttgaagctggtgccctgaatagacaacagcccggagccaaccggaccccaggccttaatttgaataatcgatgccacaccggaggcaaacagcgacatactaataatgtgttgcgtgtcttgtgccggtaaacccagcgcctggcagattaatagcgctggcgtgatcaccgcaacgaacatcgccagcagatgctgacaggcggcaaacagggtttgaggaagcggcggacgatcttcaagacggtaaatcagttcgctgttttgagtctgcgcaaccggttgcgcattttctgactcgagggtggaaacagacatcgaaaacaatcccgtggtagcaaagcgggcattttagctgaccgaaagagaaaagcaaacgtttgccacatcctcatctaaatatttaaatgagataaatgcacttttttatataacttttggtatttttctgcttaaaatccatgccatttgttcattaacagctgagaatttgacccaggaaagcataactcgatacccgtcatagttcatgaagttgccactgcgcgatgaagtatgacgagtatgaaagagtgatgcggatacaaaggagtaactatgtttcatctcgatactttagcaacgcttgttgccgcaacgctgacgttgctgctcgggcgtaagttggtccattccgtctcctttttgaagaaatacaccataccggaacctgttgcgggtggtttgttggtggcgctggcgctactagtactgaaaaaaagcatgggctgggaagtcaactttgatatgtccctgcgcgatccgttaatgctggctttcttcgccaccattggcctgaacgccaacattgccagtttgcgtgccggtgggcgtgtggttggcatcttcttgattgtggttgttggtctgttggtgatgcaaaatgccattggcattggtatggctagcctgttagggcttgatccgctgatggggctgttggccggttctattacgctttccggcggtcacggtacgggcgctgcgtggagtaaattgttcattgaacgttatggcttcaccaatgcgacggaagtggcgatggcctgtgcaacgttcggtctggtgctgggcggcttgattggcggtccggtggcgcgctatctggtgaaacactccaccacgccgaacggtattccggatgaccaggaagtcccgacggcgtttgaaaagccggatgtgggacgcatgatcacctcgctggtgctgattgaaactatcgcgctgattgctatctgcctgacggtggggaaaattgttgcgcaacttttggctggcactgcttttgaactgccgaccttcgtctgtgtactgtttgttggcgtgattctgagcaacggtctgtcaatgatgggcttttaccgcgtctttgagcgtgcggtatccgtgctgggtaacgtaagcctgtcgttgttcctggcgatggcgctgatggggctgaaactgtgggagctggcttcgctggcgctgccgatgctggcgattctggtggtacagaccatcttcatggcgttgtatgccatcttcgttacctggcgcatgatgggcaaaaactacgatgcggcagtgctggctgcgggtcactgtggttttggcctcggtgcaacgccaacggcaatcgccaacatgcaggcgatcactgaacgctttggcccgtcgcacatggcgtttttggtggtgccgatggtcggtgcgttctttatcgatatcgtcaatgcgctggtgattaagctgtatttaatgttgccgatttttgccggttaaaaatgaaaaagcgtcggaaggaaccggaaacgctacgtgaacactgtcgccatatttttggtgatgagccgccagtgctctgtgtatgggaaacggaatttgattacgcagatgccgaactcaaggcgctggcggctaaagagtggcagcagatcagcgtatgggatttgagtgcttactatgtactcaatctcgtttataacgaaccgatgcaaatagagttgtttcgctatctgtttccgctctgcctggcgcaatggcatgaaaccgttttagctggcggttatggtgatcacttcgaagaatccttaatgaaggcattgtgtcggccctatctctggcaggagatgatgaatgcttcccaacgccagcaggtacggcaatttttactggacaccgcgttgcagcgtatggataacgagcgtggtttcaataacgttctttgctggctggcggtgttcaatactctgggtggggccgcgccgttaattcattctctctggtcgcgctggtgggcgctggatacgccaggaaaagcggtgtgtgctattcagtatgccgcgcatctaatttatcccatagaagccaatccgttatggtcgcaagaatggataggctgggggcatccattaggccataaagatggctggtcctctgataatcgcgcttttcttcgccaaatgttaacacctgaaatgattgtggctggcgtacaggcagcggctgaaattctgcgtggtgaaccggaaggcgcaatggcggcgcgaattgcacaggatgcgtatgaggcaatggatatcctcactatccagattgaagatttactgcgtgacttgtcttgtgatgagtctggtcatgcgttggagtaacgttccgtctccggcatccagcgttctatcagggcttttgcttgttgtgggtaacgttcgtgaatatgtcgcgccaggcgctgaacttccgggatcatcgcctgatcgcgcagtaaatccgccactttaaactcagcattacccgtctgacgcgtacctaacagttcacccggtccacgaatctctaagtctttctgtgcaatcacaaaaccgtcgttgctgtcgcgcagcacttgcagccgaatttgcgcggttttggagagcggcgttttgtagagcagcacgcagtgagaagccaccgcaccacgacctacacgcccgcgaagctggtgtaactgcgccagacccagacgctccgggttttcgataatcatcagactggcgttaggcacatcaacgccgacttcaataacggttgtggcaaccagcaggtgtagctcaccttgtttaaacgacgccatcaccgcctgtttctcgacaggtttcatccgcccgtgtaccaggccaacgttcaactctggtagcgccagtttcaactcttcccaggtagcttccgccgcctgcgcttccagcaattccgactcttcaatcaacgtacaaacccagtatgcctgacgaccttcagttatgcaggcgtggcgcacgcggtcaatgatgtcggtacggcgggtatcaggaatagcgaccgtagtcactggcgtgcggcctggcggcagctcatctatcaccgaggtatcgagatcggcatacgcagtcattgccagcgtgcgggggatcggcgtggcggtcatgatcaactgatgcggatggaagccctgctgctggcctttctcccacaatgccagacgctgatgcacgccaaaacgatgctgttcgtcgataatcaccagcgccaggccgttaaactgcacctgttcctggaagatggcgtgtgtaccgacaatcatctgcacctgaccgctggcgatggcttcctgctgtgccagccgtgctttacctttctgcttaccggcgagccagcccacttcgataccgagcggtgcaaaccagttgcggaagttattggcgtgctgctcggcgagtaattcggttggtgccatcaatgctacctgtttgccgtgggcaatcgcacgcaacgcggcgagggcggcgaccagcgttttaccggaacctacatcgccctgcaccagacgcatcatcggcacatccagcgccatatcgcgctcgatctccgccactacgcgtgcctgtgcgcccgttggcttgaacggtaaggcggcgaggagtttatttttcagcgtgtcattggcgctcagcggctgggcatgaaaacgctgtgctccggcacgtaaggctaacatgctgaggttgtgcgccagcagttcttccagaatcagacgacgttgcgccggatgctgcccggtttccagatcgctaagctgtagcgtcggtggcgggcggtgcaaagtgcgcaacgcttccggtagcgtcatcattccttgtgacagttccggcggcaggagttcttcaatggcgcaggtgtcgagcagatccagcgcctggtcggttaatttacgcagcgtggcctgctttacgccttccgttgttggataaaccggcgtgagcgtttcctgtaattctggcgtgctgagatcgccctgcacgcggtattccgggtggatcatctccgcaccatatttaccgcgctttgcttcgccataagccagtacacggcggcccgtcgccaggctatttttcattgccgcgctgaaattgaaaaagcgcatggtgaggatgccggaaccgtcgctgatctggcaggtcatcatccgccgaccgccgaaggagatattgcagttcagcacttcgccttccaccgtggcataaacgcccggcagtagttctccgatggggtagagatgggtgcgatcttcgtagcgcaggggaaggtgtaagagtagatcctgcacggtatgcaggttgattttcgccagtttgttactaagtgctgcgccaacgcccgttagggaactgagtgggacagcatctaacaggcgacctttcatggcacttaccctgcagcctgcatagtagcccaccagtcggcatcagcttcgatctcgccttgctgattgacgtggggataaggcaggcctttgcgttttgcgactttcgccagcaccggatagccgccttcaaacaacaggcgttgttgctctgcttccggcaacatgctgttttcacgcaggtacatgcctgcattttgccgctgacgctgggcttcgtaaagaatgagggctgaggcaacggaaacattcagcgactgcaccatgccgatcatcggaatgatgatgtcctgatccgccagggccaatgcttcctgcgtgatgcccgttttctcctgtcccatcaaaatgcaggtcgggcgagtgtaatcaatttcgcggaaatcgacagcgttatcagaaagatgggttgccagaatctgcatgccctggcctttgagatgagcgacggcatcgccaatggtgcggtgtgttttcacctgtacccagctgttactacccgccgctgccgaagccatggtgcgcatgcggctaccaggccagacggcgtgaacttcatgtacgccaacggcatctgcggtacgaataatcgcagaaacgttatgaggtttgtggacctgctccatgcagacggtcagatcaggctgccgcctggcgagcatttcgcagatgcgtgcataacgtgttgggttcataaaacattaatttcggtttcgggtgactttaatcacgtctggcatcacgcggattttgcgcatgatattcgccagatgcacacggtcacgagcggtcagacgaataaaggcgctgtagacgcgaccatctttctcttccgtattcaaactttgaatattcgaggtcgtggtgttaattgccgccgtcaggtttgccagcgcaccctgatgattgaacatctccaccttgatttcggtgatgaactcctgcgccgtctctttatcccattccacagccataaacttctctggctctttctggtagccacggatgttacggcaggattcatggtggatcaccagacctttaccggggctgacgtgggcgataatcgggtcgccaggaatggggcggcagcatttcgcaaaggtgatcagcacgccatcagcgcctttgatcggcagatgcccgtggctttgagtcgccggtggaatggaggcgtccccatgttgtagatttttcgcgaccaccacgctcattgcgttaccaaggccgatttctgccagcagatcgtcaagcgttgccagcttcatgcgatccagctcgcgctgaatattttcctgcgggatttcattcagcttacggctaccacccaaagcatggttgagcagacgacggcccaggcttacagaatcatcacgcttgaggtttttcagcaactgacgaattttggcgcgcgcttttgagctaacgacaaagttcagccacgcggcattcgggcgagcgcccggtgcggtaatgatttcaacggtttgaccgctggtaagcggctgcgacagcgggtaaggctggcggtcaacgcgtgcgcccacgcaggcatgaccgatatcggtatgcactgcataagcgaagtcgacgggcgttgcaccggcaggcagctcgacaattcgcccttccggtgtgaaaacgtaaatctcatccgggaagagatcggatttaacgctctcgataaattcaaacgaactaccggcgctctgttgcagctccagcaggctttgcatccagcgctgggcgcggatttgtgcggtagtactggtttcgccgtgctctttataagcccagtgcgcggcaacacccatctccgccatctgatccatatcttcggtacggatctggacctcaaccggcacgccgtgcgggccaatcatcgaggtgtgcaacgactgatagccgttcgctttaggaatggcgatatagtctttcacgcgacccggacgcggcttgtacaggctatgcatttgcccgagcacgcgataacaggtgtcagaatcattgacgatcacgcggaaagcgtagatgtccatgattgagtgaaaacgctgctctttgagcaccattttgcagtaaatcgaataaagatgcttttcgcgaccactgacgcggcacggtattcccgcttcctgcaaacgcccttcgatttcagagaggattttttggatcatctctttacggttgccgcgcgcggctttcaccacttctttaattacgcggtaacgattgggatacagcgcctcaaaacccagctcttcgagttcggttttaatgtggtggatacctaaacggtgcgccagcgggctataaatttcgagagtttcacgggcgatgcggcgacgtttgtccgggcgaagtgagcccagcgtgcgcatgttgtgggtacggtcggcaagtttgatgagaatgacgcggatatcctgcaccatcgccataatcatcttgcgaaagttttcggcctgcgcctctttcttatcgcggaacttgagcttatcaagtttcgacaccccctctaccagctcggcgacgcttttaccaaaaagctgttccatgtcctggtaggtggcgggagtatcttcaatcacgtcatgcagcagcgccgccatcagcgtttcatagtcgagtttcatctcggccagaatgcaggcaaccgctaccgggtgcgtgatatagggttcaccgcttgaacgtgtttgcccctcgtgagcatcacgtgcaacgagatacgcctgccgcagacgcttgatttggtcttccggcaggtaggtttgaatcagttgattcaggctttcaaacagatacaagggcgacccgctttgtgattaacgacgaccttcagcaatagcggtaacggcttgtaattcagcggcttcctgctcttgctgttcctggcgttcgcgaacgtcgaggatctggttgttgatcagaccttcttcgatttcgcgcagcgcgattacagtggttttatcgttttcttccggtaccagcggatcctttccgcctacctgcatctgacgagcgcgacgcgcggcgaccagtaccaggtcaaaacggttaccaattttctctacagcgtcctgaacagttacgcgtgccatacttaaaaagctccacaggtgaagaaatgactgggcatgatactgaaatcaggttcagtctgccaacaatttgctgattaaagcgtcatgacgctgcttttggcggctcatgcgcagacgttcggcgcgaataatggtcttcaaatcggtcaacgcggtatcgaagtcatcattcacaatcagataatcatattcggcgtaatggctcatttctgcaacagcttgcgccatacgctttgcaatgacctcttcgctgtcctgaccgcgaccgcgtagacggcggtccagttcaattttggacggcggtaaaataaagatactccgcgcgtgcggcattttctggcgaatttgctgcgcgccctgccagtcgatatcgagaaaaacatcgacaccggtcgccagtacttgctcaatggcctcacgcgaagtgccatagtaattaccaaaaacttctgcgtgttcgaggaacgcatctctgctaatcatttctttaaattcatcatgattaacaaagaaataatgttcaccgtggacttcaccaggacgcggttggcgtgtggtgtgtgaaacagaaacctgggtgtcatacaacggttgggtttttaataaagcctgaatcaggctggatttacccgcgccactgggggcagaaacaatataaagcgtgccttgagccatgagtatctttcgtatgtgattagcgaaataaagcctacatacgagcttattatacacggcgcggccatgtgacgtagcccttgctcacactttttgcgcaaagttgttgcgttttgcgtagctgtttccgcatttgcctgtgatttactgcaataaagacgattctcaggaagcgtcctcgcagactccgtttttgccactcggctttgccttcaccacgttgtatatctgccagcctgactacagcggaggtgaagatgaaagtatggatggcgatattaataagtatcttgtgctggcaatcatctgtgtgggcggtctgtccggcctggtcgccagccagagcacaggaagaaatttcccgcctgcaacagcaaataaaacagtgggacgatgactactggaaggaaggaaaaagtgaggtggaagacggtgtttacgatcagttaagcgcccgtcttacgcagtggcaacgctgctttgggagcgagccccgcgacgtgatgatgccgcctttaaatggtgcggttatgcatccggttgcccatacgggtgtacgcaaaatggtggataaaaacgcattaagtctgtggatgcgagaacgtagcgatctttgggtgcagccaaaagttgatggcgttgcggtaaccctggtttatcgggacgggaaactgaacaaagcaatcagtcgcggtaatggcctgaaaggcgaggactggacgcagaaagttagcttaatttccgctgtgccgcaaaccgttagcgggcctttagccaacagtacgcttcagggggaaatatttctccagcgcgaggggcatatccaacaacaaatggggggaataaatgcccgcgcaaaagttgctggcctgatgatgcgccaggacgatagcgacacgctgaattctctgggcgtttttgtctgggcatggccggatggaccgcagttaatgaccgatcgtttaaaggagctggctaccgcaggttttactctaacgcagaggtatacccgtgcggttaaaaatgctgatgaggttgcgcgcgtacgcaatgagtggtggaaagcgaaattacccttcgtcaccgatggcgtggttgtgcgaggggcgaaagaacccgaatcccgccattggctaccaggccaggcagaatggctggtggcctggaaatatcaacctgtagctcaggttgccgaagtgaaggcgattcagtttgcggtgggtaagagcggtaaaatatcggtggttgcgtcactcgcacctgtcatgctggatgataaaaaagtccagcgggtgaatattggttccgtcaggcgctggcaggagtgggatattgcgcctggtgatcagatcctcgtcagccttgccggtcagggtattcctcgcattgatgatgtggtctggcgcggtgcagaacgtacaaaaccgacaccaccagaaaaccgctttaactcgttgacctgctactttgcttctgatgtttgtcaggaacagttcatttcacgcttagtctggctggggtcaaaacaggttctggggctggatggcattggtgaggccggctggcgcgcgctgcatcagactcatcgctttgagcatatcttttcctggcttttattaacgccagagcaattacagaacacgccggggatcgcgaaaagtaaaagtgcgcagctatggcatcagtttaatctggctcgtaagcagccttttactcgctgggtgatggcaatgggaataccgctaacccgggcggcgcttaatgccagtgatgaacggtcctggtcgcaacttttatttagcacggagcagttctggcagcagctgccggggactggatcggggcgcgccagacaggttattgaatggaaggaaaatgcgcaaatcaagaagctgggcagttggctggctgcccagcagatcacaggttttgaaccttagtgtccttcgtggctgtagtaaaagaccggtaatcccagcttaaggcgtagcgccagtaagcgggcaaaaaagccgaataccagggtggagataattaccacatcatggttagaaacatagtgttgcagcgcgatgtacagcacggcggaggcaaatgagacaccggcatacaactctttctggaataccagtgggatacgtttacagaacatatcgcgcaaaacgccgccaaacacgccggtggttaccgccgcgacaacggcaataattgggccgtgccccatatccagtgcaacctgtgcgccgatgatagaaaagaccaccagtccaagcgcatcgagcaccagaaacactttgcgcaggtaaggcattacaggagcaacgatagtggtgagtactgcggcggtagcgacgataatcacatattccgggtgtttgacccagccgagcggatagtggcccagcagaatatcgcgcactgaccctccgccaattgcggtggcggtcgcaataataattacgccaaatgtatccatgcggcgtcgcccggccgccagagcccccgtcatggcttcggcagtaatgccaaccaaatacaaaatgtgtaacagcatggttctctccctaaaaatctgtctggcagggtagcgatttgtgcgtattgtcacgattgagattttttaaggtgagaggaaattgataacttgtagttatgtgaaatcgctattttctgtagcgtagatgcattcttctgacttcttgtctgagaaaatgcataagaaaaaataggttaaaattgaggggtggaaaagaaaggtgcaatgtttagccattgtgttcaccgcacctggactttggcttacgcatcgggtatctcaatcaacaaaaagagtttttagtttctgctatttcttctctgtaatttttacactgttttccaactgcttgatgctgacctgcggggtcggcaactcctcaggcatggttccgccaagttcctgaatggtttgcctcaccttgctacccacgtcaaagtgtgtggtattagcttgctgttttgaattcacgccatcccgcttgagtttttcttctgtttgggtagctcgaaagagattagccgccagttctgttgaacccatatgatccaggatcttctgactctttttcagccccttccgctgatggatggctttctgatctaatccaccatacagcccccggtaaccatgattctgaaatatggcgaaatcgatagctgtcgctaccccagcttgctgcgctgcctcaaccaattgtttgttatgttctttcaattcatttctcagaaaaagacgcttttcgtcttcacgaagttgcctgaaagcttcatcgtcagccagctcctgccgtcgggtctggatagcaaaataagtttgccctgccgcaataaccggtttcgcagggtcgccgttttgtactaccaggtaacaggcatagcgggagagatgaacatcttcaagttctcgttgagcccctgaacctaatacaaccattttggtggtttcaacgaaatggtcagatgcagcttgattgctggcttcgcacgcttgagtcgcgcgggccagtaccttttgaaaattgcgccagtcccgataatccagtaacggtgccaattctctagctgaccaaaattcttgcccttcagtgccataatgccgtatttcttcaaaaggttgatgatgttcgttcattgcccactccatgtgatatcgattgcaaagaaagtaaatctgtaactgtatttatatacagttgtgagtatctcacgttctcagtgtgctgggcaaaaaaacatcgcaaaatctggagcaggcacgcaaaacagaattgaagttgcggggaagaaaaatgccgctctgtttgagtgggcggcatttgtgaaggctgaaaagtaagaattggcgttacgagttattcaatgttctgaatctgctcgcgcatctgctcaatcaacactttcagctcaatcgcggagtttgtcacttcggcattgatagacttcgacgcaagagtgttcgactcgcggttgaattcctgcatcataaagtccagacgacgaccaacggcttcttttttcttcagaatgttgtaggtctctttgacatgcgcttccaggcggtccagttcttcggcaacgtcaattcgttgtgccagcagaaccagctcctgctccagacggttgttttccaactgaacctgagcatcttccagcttcgcgaccagacgctcacgctgccattgcaggatttccggcatatgggcgcggactttgaccacttcggcggtgacgccttccagacgctgctcgatcaatgctttcagtgcctgaccttcggtttcgcgcgcgacaataaagtcgtccagcgtaccatccagcgccgcgagaatttcagcggcaatggcgtcaagatcctgctcctgggctgccatcacgcccggccagcgtagaatatcaaccgggttgatttccccttcgtcactctgcatttttacccagttcgcggcagttaccagctgtttagccagtttttcgttgaggatcagctcaccttgcgcgctaacatctggctcatagcgcagggtacattccactttaccgcgcgtcaggcgagaacgaatacgctcgcgaacgacaggttcaagactacggaactgctccggcagacgaaagtaagtttccagataacgctggtttaccgagcgcatttcccaggttgcgctcccccattcacccttgatttcacgccgggcgtaggcggtcatactgcggatcatagacgttcctgtttataaaaggagaggtggaaggattatagccatcgatgccttgtcaggataggaataaccgccggaagtccgtataatgcgcagccacatttgtttcaagccggagatttcaatatgcgtccagcaggccgtagcaataatcaggtgcgtcccgttaccctgactcgtaactatacaaaacatgcagaaggctcggtgctggtcgaatttggcgataccaaagtgttgtgtaccgcctctattgaagaaggcgtgccgcgcttcctgaaaggtcagggccagggctggatcaccgcagagtacggcatgctgccacgttctacccacacccgtaacgctcgtgaagcggcgaaaggtaagcagggtggacgcacaatggaaatccagcgtctgatcgcccgtgctcttcgcgcggcagtagatttgaaagcgctgggtgagttcaccattacgctggactgcgacgtgcttcaggctgatggtggcacgcgtaccgcgtcgattacgggtgcctgcgtggcgctggcagatgcgctacagaagctggtggaaaacggcaagctgaaaaccaacccgatgaaagggatggtagccgcagtttctgtcggtattgtaaacggtgaagcaatttgcgatctggaatacgttgaagactcagccgcagagaccgacatgaacgtagtgatgaccgaagacgggcgcatcattgaagtgcaggggacggcagaaggcgagccgttcacccatgaagagctactcaccttgttggcgctggcccgagggggaatcgaatccattgtagcgacgcagaaggcggcgctggcaaactgatttttaaggcgactgatgagtcgccttttttttgtctgtagaaaagtaagatgaggagcgaaggcatgaaaccatatcagcgccagtttattgaatttgcgcttagcaagcaggtgttaaagtttggcgagtttacgctgaaatccgggcgcaaaagcccctatttcttcaacgccgggctgtttaataccgggcgcgacctggcactgttaggccgtttttacgctgaagcattggtggattctggcattgagttcgatctgctgtttggccctgcttacaaagggatcccgattgcgaccactaccgccgtggcgctggcggagcatcatgaccttgacctgccgtactgctttaaccgcaaagaggcaaaagaccacggtgaaggcggcaatctggttggtagcgcgttacaaggacgcgtaatgctggtagatgatgtgatcaccgccggaacggcgattcgcgaatcgatggagattattcaggctaatggcgcgacgcttgctggcgtattgatttcgcttgatcgtcaggaacgggggcgcggcgagatttcggcgattcaggaagttgagcgtgattacaactgcaaagtgatctctatcatcaccctgaaagatctgattgcctatctggaagagaagccggaaatggcggaacatctggcggcggttaaggcctatcgcgaagagtttggcgtttaaagaaactcgccggatgaaaagtcatccggcgtcatattactgcaactgcgcggcaattagcggccagcgggcgtcaaaatcatccgtcgggcggtatttaaattcgctgcggacaaaacgtgacagcataccttcacagaaggccaggatctggcttgccagcagggtttcatcggtggtgtaaccttcaccctcacgcattctcttttcacgcaatacctggcgcagctgcgcttcaatacgctcgaacagctggttgatacgcccttgcaggcgatcctgttcaaacatcagcgcatgaccagtgaggatgcgggtcaggccaggattacgctcaccaaaaccgagaagcagcaacacaatcagacgcaggcgcgctgtggtgtctttctcatctttcagaatcaggttgatgcgagtaatcaggctatcttcgataaactcaatcaggctatcgaacatgcgggtcttactggggaagtggcgatacagtgccgcttcggaaacgccgacagaggcggccagttttgccgtcgtgatacgttggcttccatcgctggattccagcatcagcgccagagactgaagtatttcctcgcgacggttccttttcgcagtttgtttttctgccatgttacaaaatacccctgaaaataagcacttgccaggcggcacccacgctatgaccgcaaacgaaatgtttgcggctatgttatgacgttattcggatgcgtatgtgttactgacgaccagagtgaccaaagccgccttcaccgcggtcggtggcgtcgaaatcttccaccagattaaattcagcctgtactaccggaacaaaaatcatctgggcgatgcgttcgccaggttgaatggtgaagctgtcctgaccacggttccacacggaaatcatcaactggccctgatagtcagaatcgatcaatcctaccaggttaccaagcacgataccgtgcttatgtcccaatccggagcgcggcagcatcattgccgccagtgaaggatcggcaatatgaatcgccagcccggtcggaaccagcgtagtgtcacccggagccagttctacggcgtcgtcgagacaggcacgcaggtcaagtccggcagagccagaggtggcataagtcgggagcggaaattccttcccaacgcgcgggtccagaatcttaacgtcgatttttttcatcataacgggtcacgatctcgtcgagtaataattggccaaggagctctttgcgctcaagcggtaagactttatctccgtcctgccagaaaaggtgtaatgcgttgttgtcgctgttaaatccttgagttggctgggaaacatcgttcgcgcagatcagatcaaggtttttacggatacgtttttgccgggcgtattcttccacattatttgtttcggcggcaaatccaacgacgtagggtcgatggtcttttagtgcggcaacgcctgcgacgatatcggggtttttaaccatttttattgttaattcatcaccctgcgtggcctgctttttgattttctctggggccacggtagctgcgcgataatccgccacggcggcgcaaccgataaaaatattttgctgctgtacagaagcattcacggcggcttccatttccagcgcagtcatcacatcaacacgtttaacaaacggtggcgtcggtagtgaaaccggacctgataccagcgtgacgttcgcgccacgacgggcagcggcggcggcgatagcaaaacccatcttgccggagctgtgattagagatataacgcaccggatcgagcggttcacgcgtcggaccggcggtaatcataatgttcagatgtttcaggtcgttgacgggcgaaaaatgcgccaccgccatatccacaatggttaacggatcgagcattcgcccaggaccgatatcaccacaagcctgactgccactgtctggcccccagatgagcaaaccacgggaagcaagcacctctaaattatgctgcgtggcagcggcacggtacatctgctggttcatggcggggagcacggctacaggcgcaggtgtagccagacaaatcgtcgataccaggtcattcgccattccggcagcaatacgggcaatcaaatctgccgtggcaggggcgagaatcactaaatcagcccatttacccagctcaatatggcccatagcggcttcggctgccgggtccagcagactgtcggaaacgggataaccagaaaccgcctgcaagctaagtggggtgataaaggcttttgccgcttcggtcatggctacgcggacgtcggccccgcgatcgcgcaaacgacgcaccagttcaggggttttataggcagcaataccgccgctaacgccgagaacgatttttttaccggccaggctcatgatgatttttcctgtagggtgacaccagaagttggcgattttatcacaatacttttgttgtcgtgccttcacctgagattcactttgcgaggcgctttccaggattgaaaactggccgtcgatttaacgaaacggctatgacaggatgcgagcaccacaaaggaggtgaaggtgaaaaacaattcacagctgttgatgccgcgcgaaaaaatgctgaagtttggtattagcgccttaacggatgtcgagctgctggcgctatttctgcgtaccggaacgcgcggtaaagatgtattaaccctggcaaaagagatgctggagaatttcggctctctttatggcttgttaacctctgaatatgaacaatttagtggcgttcatggaattggcgtggcgaaatttgcccagttaaaggggattgctgaactggcgcgacgttactacaacgtgcggatgcgtgaagaaagccctttactcagcccggagatgacgcgggaatttttacaaagccagctcacgggtgaggagcgggagatctttatggtgatctttctcgactcacaacaccgggttataacgcatagccgtcttttttccggcacgctaaaccatgttgaagtccatcctcgggaaattatccgcgaagcgataaaaataaacgcctcggcgctgatccttgcacataatcacccttcgggttgtgctgaacccagtaaagcggataaactcattactgaacggataataaagagttgtcagttcatggatttacgcgtgctcgaccatatcgtgattgggcgtggagagtatgtttcttttgccgaacgcggctggatttaacccgctatgcgcgatccttcgggatctttgtctgttcgggacttgagcacatcgctgagtcagcgtatactacgccacctttgagaatctcgggtttggcatttgggcctggcaatcgagagttcacatagaactgcgatgaccgggctgtaaagcctgacgaggcgccaataccccatacgaagctcgagctaatttgatttttggagaatagacatgtcccgagtctgccaagttactggcaagcgtccggtgaccggtaacaaccgttcccacgcactgaacgcgactaaacgccgtttcctgccgaacctgcactctcaccgtttctgggttgagagcgagaagcgttttgtcaccctgcgcgtatctgctaaaggtatgcgtgtaatcgataaaaaaggcatcgatacagttctggctgaactgcgtgcccgtggcgaaaagtactaagtacttagaggaaataaatcatggctaaaggtattcgtgagaaaatcaagctggtttcttctgctggtactggtcacttctataccactacgaagaacaaacgtactaagccggaaaaactggaactgaaaaaattcgatccagttgttcgccagcacgtgatctacaaagaagcgaaaatcaaataattctcgctttgatgtaacaaaaaacctcgctccggcggggttttttgttatctgcttgcccccatattgactgcatctgttcattcctggagatgctatgcctgaattacccgaagttgaaaccagccgccgcggcatagaaccgcatctcgttggtgcaaccattcttcatgcagtggtgcgcaacggacgcttgcgctggccggtttcagaagagatctaccgtttaagcgaccaaccagtgcttagcgtgcagcggcgggctaaatatctgctgctggagctgcctgagggctggattatcattcatttagggatgtctggcagcctgcgcatccttccagaagaacttccccctgaaaagcatgaccatgtggatttggtgatgagcaacggcaaagtgctgcgctacaccgatccgcgccgctttggtgcctggctgtggaccaaagagctggaagggcataatgtgctgacccatcttggaccggagccgcttagcgacgatttcaatggtgagtatctgcatcagaagtgcgcgaagaaaaaaacggcgattaaaccgtggctgatggataacaagctggtggtaggggtagggaatatctatgccagcgaatcactgtttgcggcggggatccatccggatcggctggcgtcatcactgtcgctggcagagtgtgaattgttagctcgggtgattaaagcggtgttgctgcgttcgattgagcagggtggtacaacgctgaaagattttctgcaaagtgatggtaaaccgggctatttcgctcaggaattgcaggtttacgggcgaaaaggcgagccgtgtcgggtgtgcggtacgccgattgtggcgactaaacatgcgcagcgggcaacgttttattgtcggcagtgccagaagtaattcatgcgcgccggatggcataccatccggcataaacgctacgctaacttcgccatcagcgcctgatggacattctccggcaggaaatgggtgacatcgccctgatggcgcgccacctctttcaccaacgatgaagagataaacgaccactctttcgacggcatcagaaacacactttccagttccggcattaagtggcgattcatatgcgccagctgcatttcatattcaaaatccgccaccgcacgcaggccacgaatcagcaccgtagcgtgttgattacgggcgaagttcgccatcaaatcactaaacccgaccacttccacgttccccagatgcgcggttgcctgctgtgccagcgccacacgctcttccagggtaaacatcggttttttactggggctggcggcaatcgccagaataacgtgatcgaacatttgcgtggcgcgcgtcacgatatcgatatgaccattggtaatgggatcgaaagtacccggataaatcgcccgtttttgcataacaacctcaatgcgttttcggtggcaggtaaggttccagcagttgaagcagacgctgtagcgcgccctggttttgatacagtacttcaacggcatgacggccatagaaactacggtaatcggcgtcggtgagtaaagaggacacctcttttgcaagcgtagtggcatcggtaacggtaatcagcccgcttgcctgctccagccgcgcgcaaatgtctttaaagttaaaagtatgcggccccatcaataccggaatagcgtgtgcggcagcttccagcggattatgcccaccacgttcaaccagtgaaccgccaacaaaggcgagatcggcaatgccgtacagtaacatcaactcgcccatcgtatcgccaactacaacctgcgtgctggtggaggggacttcccctgaagagcgtgtgatatagcttagtccagcctggcggacaaggttaatcgcatccgggaagcgttctggatgacggggtaccaggatgagcaataaattcgggaattgctgtaacaatgcctgatgtgcggcaatgaccacgctctcttcaccttcgtgagtgctggtggcaatccataccgggcggtgtggtgcccattggcggcgtagcgtcacggctttagcagccaactgcggcgttacagaaatatcgaatttcaggctaccggtaacggttacctggttattttttgcgcccagcgccacaaaacgtgcaccatcttcttcattttgcgcagcaatcagcgtaatacgacgcagcaagcggcggacgaatttacccagtttggcataacctgcggccgagcgggcagagagtcgcgcgttagcgatcaccagcggaattttacgtttatgtagcgccgcaatcaggttaggccatagttcggtttccataatcaacaccagtttagggtcgactttattcaggaaacggttgagtgcatcgggcaggtcatacggcagataaacgtgctgaacatccttcccgaaagccgattgtacgcgctccgaaccggttggcgtcatggttgtaacggtaatcggtaaatcaggataacgatgacgcagcgcgcgcaccaacgggatcgccgccagagtttcaccgacggagacggagtgcagcataatgccgcctggttttagcggatggcggtaaaaaccgtaacgttcaccccagcgttttcgataggccggagccttacgtccgcgcacccagagccgtatccagatcagcggctgaataaggtagagaagggcggtgtaaagcaattcgagcatagtaaatagctgacttatggatgtgctggggattctatgtatttagctgtggctttaccattacttttcccgtttttgacttaaatagcaatttacccgccaattcttgctgaacatctatactttttttgtatttttatgcgattcattgatttctgctgtacgtgcaggaaggaatcgcagagcaacagtgaaagaatatggttgctaatgattttatttgattgatttctttattgaaaatcaacaatgtgcttaaaaatcattcgggtcggattgccgcgaaagaagtgatacactagcgcgtcaatatcagtgcggtatcagtattcaggtagctgttgagcctggggcggtagcgtgctttttctgcttcaccttaatcggataatctcaacaaaaagagttacttgtggataagccatttcgaagaattttgctcattaagatgcgttttcatggggatatgttattaactactcccgtcattagttcgctgaaaaaaaattaccctgacgcaaaaatcgatgtgctgctttatcaggacaccatcccgatcctgtctgaaaatccagagattaacgcgctctacggcataaaaaataaaaaagcaaaagcctcagaaaaaattgccaacttttttcatctcatcaaggtattacgtgccaataagtatgaccttatcgtcaatcttaccgatcaatggatggttgctatactggttcgcttattaaatgctcgtgtgaaaatttcccaggattatcatcatcggcagtctgctttttggcgtaaaagtttcacccatttggtgccgttgcagggtggaaatgtggtggaaagtaacttatccgtgctgacaccattgggacttgattcgttggtgaagcagacaaccatgagttacccgcctgcaagctggaaacgtatgcgtcgcgaacttgatcacgctggtgttggacaaaattatgtggttatccaacctacggcgcggcaaatcttcaaatgctgggacaacgccaagttttccgctgtgattgatgccttacatgctcgtggttatgaagtcgttctgacgtccggcccagataaagacgatctggcctgcgtcaatgaaattgcgcagggatgccagacgccaccagtaacggcgctggctggaaaggtgaccttcccggaacttggtgcgttaatcgatcatgcgcagctgtttattggcgttgattccgcaccggcgcatattgccgctgcagttaatacgccgctgatatcgctgtttggcgcaacagatcatattttctggcgtccctggtcaaataacatgattcaattctgggcgggagattaccgggaaatgccaacgcgcgatcagcgtgaccgaaatgagatgtatctttcggttattccggcggcagatgtcattgctgctgtcgataaattactgccctcctccacgacaggtacgtcgttatgatcgttgctttttgtttatataaatattttccctttggcggtttgcagcgcgattttatgcgtattgctcagacagtcgccgcccgaggtcatcatgttcgggtttatacccagtcgtgggaaggcgaatgccctgatgtatttgaactgatcaaagtgccggttaaatcgcgtaccaatcacgggcgcaatgcggagtattttacctgggtgcaaaaacatttacgcgaacatcccgtcgataaagtcgttggattcaacaaaatgccggggctggacgtttattatgccgctgatgtttgttatgccgagaaagtagcgcaggagaaaggctttttctatcgcctgacgtcacgttatcgccattatgccgcctttgagcgggcaaccttcgaacagggcaagccgacacagctgctgatgctgacagataagcaaatcgccgatttccagaaacattatcagactgaagcggagcgttttcatattctgccaccggggatttatcctgatcgtaaatatagccagcagccagccaatagccgtgaaatattccgtaagaagaatggaataaccgaacaacaatatttattgttgcaggtcggttcagacttcacgcgtaaaggtgtcgatcgttccattgaagcacttgcttcgttaccggattcgctgcgccacaacacattgctatatgttgttgggcaggataaaccgcgaaaatttgaggcgctggcagaaaaacgcggcgtgcgcagtaatgttcactttttctcggggcgcaatgatgtctcggaattaatggcggcggcggatttattactgcatcctgcctaccaggaagcggcgggaattgtgctgctggaagcgattactgcaggattaccggtactaacaacagccgtttgtggctatgcgcattatattgtcgacgccaattgcggcgaggctattgctgagccattccgccaggaaacattgaatgagattttacgcaaagcgttaacgcaatcttcattgcgccaggcctgggcggaaaatgcgcgacattatgctgatacacaagatttatacagtctgccagagaaagcggcggatatcataacgggtggtctggatggttgaacttaaagagccgtttgccacgttatggcgcggcaaagatccttttgaggaagttaaaaccttgcagggtgaggtatttcgtgaactggaaactcgccgtactctgcgctttgaaatggcgggcaaaagctattttctcaaatggcatcgcggcacgaccctgaaagagataatcaaaaatttactctcattgcggatgccagtattaggcgcagaccgcgaatggaatgcgattcatcgactgcgggatgtcggcgttgatactatgtatggggtggcattcggcgaaaaaggcatgaatccgctgaccagaacctcgtttattattaccgaagatctgacaccaaccataagtctggaagattactgtgctgattgggcgactaaccctccagatgttcgtgtaaagcgtatgcttattaagcgtgtcgcgacgatggtgcgcgatatgcatgctgcgggcattaaccaccgtgactgttatatctgtcatttcctgctgcacttgcctttttccggtaaggaagaggagttaaaaatttcggtaattgacctacaccgggcgcagcttcgcacgcgcgttccacgtcgttggcgcgataaagatcttatagggctttatttttcttcaatgaatatcggcctgactcagcgggatatctggcggtttatgaaagtgtattttgccgccccgcttaaagacattctcaagcaggaacaaggactgctgtcgcaagcagaagcaaaagccacaaaaatcagggaaagaacgattcgaaaatcgttgtaatttccggagagaaatatgagtgcccactattttaatccacaagagatgatcaataagacaatcatcttcgatgaaaggccagcggcgtcagtggcatcatcattccatgttgcttatggcattgataaaaactttctttttggttgtggtgtttcaatcacgtcagttttgttacataacaacgacgtgagttttgttttccacgtttttattgatgatatccctgaagccgatatccagcgtttagcccaattggcgaaaagctatcgtacctgtatccagatccatctagtaaattgtgaacggcttaaggcattaccgacgaccaaaaattggtctattgccatgtatttccgttttgtaattgcagattactttattgatcaacaagataagatcctttacctggatgctgatatcgcctgtcagggaaacttaaagccgctgataacaatggatcttgccaataacgttgctgctgttgttactgaacgcgatgctaactggtggtcgttacggggtcaaagtctgcagtgtaatgaacttgaaaagggttactttaattcaggtgtcctgttaattaatacactagcgtgggcgcaggagtccgtttctgctaaagcgatgtcgatgcttgctgataaagccatcgtttcccgtttaacctatatggatcaagatatccttaatcttatcctgttagggaaagttaaattcattgatgctaaatacaatacgcaatttagtttaaattatgaattaaaaaaatcatttgtttgtccaattaatgatgaaaccgtattaattcattatgtcggcccgacaaaaccctggcattactgggccggttatccaagtgcgcaaccttttatcaaagccaaagaagcatcgccctggaaaaatgaaccgttaatgcggccagttaactcaaactatgctcgttattgcgccaagcataattttaaacaaaacaaaccaattaacgggataatgaattatatttattatttttatttaaagataataaaatgaaattgagaaaagttaaatgaatgaatttataaaagaacggttttcgtatttagcagataataaaaaagaaaacgccccagagctaaatgtttcctacggtatcgataagaattttttgtatggtgctggcgtttcaatttcttccgttttgattaataattcagatattaattttgtctttcatgttttcactgattatgtggatgatgattatttaaagtcatttaatgaaacagcaaaacaatttaatacctcaattattgtatatttaattgaccccaaatactttgctgatctgccgacgtcacagttttggtcgtacgcgacatacttcagggtattgtcttttgaatatctgagtgaaagtatttccacactgctgtatctggatgccgatgttgtttgtaaaggaagcctgaaacctctcacagaaattatatttaaagatgagtttgctgcggtcattcctgacaatgatagtactcaggcggcatgtgcaaaacgcctcaacattcccgaaatgaatggacgttatttcaatgcaggcgttatctatgtcaatcttaaaaaatggcatgaagcaaatttgacaccgtatttactcaaacttttacgaggggaaactaaatatggctctcttaaatatttagatcaggatgcgttgaatatcgcatttaatatgaataatatctaccttgcgaaggattttgatactatttataccctgaaaaacgaactttatgatcgtagtcatcgaaagtatcagcaaaccattaccgataaaacagtgttgattcactatacagggataactaaaccatggcatagctgggctggatatccgtctgcatcatactttaatatcgcgcgtgaacaatctccctggaagaaatatcctcttaaagaggcgcggactgttgcagaaatgcagaaacaatataagcatctgtttgcccatggtgagtatataaaaggcataacttcattaattaagtacaagcttaagaaataaattactcttatgattacaagtatacgttatcgcggcttctcattttattacaaagataatgataataaatataaagaaatctttgatgaaatactggcctataattttaaaacagtaaaagtattacgtaatattgatgataccaaagtatctttgattgatacgaaatatggtcgctatgtttttaaagtctttgctccgaaaacgaaaaggaatgaacgttttttaaaatcttttgtaaaaggtgactactatcagaatttgatcgttgaaaccgatcgtgtcagaagtgcaggtcttacttttcctaatgatttttattttctggctgagcgtaaaattttcaactatgctagtgtttttatcatgcttatcgagtatgtcgagggcgtagagctcaatgatatgccgattattccagaaaatgttaaagcagaaattaaggcttcaatggaaaaattgcatgccttaaatatgctatcgggcgacccacaccggggtaactttatcgttagtaaagatggtgtcaggataattgacctatccggtaaaagctgtacggcagagcgtaaagctcgtgatcgtctggccatggaacgtcacctgggtattgtcaacgaaataaaagattatggctactattcagtaatctacagaaccaaactacgcaaatttattaaaaaattaaaaggcaaagcgtaaaccacacagtcaaaacggaaccaacatggatttattagctgagagtattactgaagtcgctgtctctggggaaattgctaacaccgatcgtgtgttaaatatcgcttacggtattgaccgtaactttttatttggtgcggcagtatctatgcaatcagttgttatgcataacccggaccttgcggttaagtttcatctctttaccgactacattgatgaagattatctacaacgtgttaatgcttttaccagcaaaaatgctaacgttgaagtaataatttataaagtctccaatgcctttattgatatcttccccagcctgaaacagtggtcttatgcaacattcttccgtttagttgcgttccagtatttgagtgaaactattgaaaatctgttatatatcgatgctgatgtcatctgtaaaggctcattagctggattgcttgatattaattttgatgaggataagttcgcagctgttattaaagatgtgccttttatgcaggaaaaaccagcgaagcgtctggctatagagggacttccagggaattatttcaacgccggtgtagtatatctgcagcttgaagcatgggcgaaaaatgattttatgaataaagccattgctatgctggcaagtgacccgcagcacacgaagtataaatgccttgatcaggatattttaaatattctgttctttggtcattgtatttttattagcagcgattatgattgcttttatggcattgactatgagttaaaaaataaaagcgatgaagattataaaaagaccattaccgatgatactaagctgattcattatgttggcgtaacgaagccctggaacgactggacgaattatccctgccagaagtattttaatgaggcttatcaggcttcttgctggaatgatgtggcgtttattccagccacgaatgaaaagcagtatcaagtgaaatatcaacatgcaaagaaaaatggtgatacgtttaacgcttttatttacttcattaaatttaaattaaataagtataaaagaaaactatttggataataataaaaatcatggatgtctgagttacaataataattaaggatgagtactatcatattttattagttcaggcaagagaacacgatgagcaatgattaccctttagtatccataataataccgacgtataattcatctgattacattactgaaactctaacgaaattagaaaaacaaacttacccaaattttgaaattgttattgttaatgatggttctaaagataacacatcaaacgttttgagagagtatgggttaacccactctcgattaattattatcaataaagaaaatggcggtgtttcgtctgccaggaatacaggtatccgcaaggcgcaaggacagtttatatgttttatggatgatgatgatgagatagatcctaactatctgctgaagatgtataccagacaacatgagacgggaggggatgcgatttattgtgggctttatggccattatataaaagatggtgttacttactcacctataaatacagagtttaatgaaggatctttacttttcgactttttttataaaaaggttagattccatatagggtgcttgtttataagaaaacaacttctggaagagaataatcttttttttgatgaagatttacgactaggagaagatcttgattttatctatcgactgctaattacatgcgatatgtatgcggttccatattatatgtataagcataactatagagaaaattccttaatgaactcatgtagaaccatcactcattatcgacatgagtcatttgcgcacgaaagaatctactcttctgtgatgcagttatacaaaggtaaccggaaagaagaaattcatacattattgagtcaaaatagagcttatcataaaactcgttatttatggaatgttctacttaatggtgattttaaactattgaatcaattagttgaaagcaatgaaaaagaattaagagattgtaatcttcctggcaagagagataagagacgagcaaaaatattagcatcaaaaaattatattctctggaggatggtaagactggtaaatagaaaaaagaataaacgttagatcttgcattaaataacccatcctcgtagcataggttgaaactatatgtcgttttgttggaatgaaattaattctggtataaagtctttaattctcatattatgtattttttctttaatgactttgtctttatgggatgatgttgcaacaaagtttcttcatgcagctggaattatatctgcattgtattttcttgcgacaccaaaaaaaacaataactaataatcctactttgttaattttcatctcattatgtcttttgggtatcgtaaatatcatctggtattcacattataaagtttcaggctctgtttataccaatgcatatcgtggcccaatggaaactggaaaaattgccttgtgtagcgcttttattttcttagttctttttgctaaaaatgagatgagaacaaaaataaaatttgggaaactaattctgttcgcatccctggcaacgcagttacttttttttgcgcatgccatgtggcaacatttctatttaaacgtcgaccgtgttgcattatcagcttcccacgctacaacagcaggctacatcatcctttttccttctttactggcatcaattctcattttaaaatccgacttaagacataaaacaacattatatacaattaacttcatgcttagcttatgtgctgtcatagtaactgagacgcgtgcagccatattagtgtttccattctttgcgttaatattaatcgtaatggatagttatattaataagcgaattaattataagttatattgttttattacgattgcattattagcaggtgtattttcttttaaagatacattgcttatgagaatgaatgacttaaataacgatttagttaattattcgcatgataacaccagaacttcagtcggtgcccgtctggcaatgtatgaagttggcttaaaaacatattctccaataggacaatcactggaaaaacgtgcggaaaaaatacatgaactagaagaaaaagagcctagattgagtggcgctttaccctatgtagattctcatttgcataacgatctcatagatacgttatcaacgcgtggtattcctggagttgtattaacaattttagcattttcagcaatactcatatatgccttaagaactgctaaagaaccttatattttaatcttgcttttttcactactggtagtaggactaagtgatgtaatactcttttctaaaccggttccgactgctgtgtttatcaccataatattgctttgtgcttattttaaagcacaatcggaccaatgtttattagagaagtaatgaatatgtgaaataaaatcagcaaggaagctgattttatttcaaaattatctattaaagagttgtaatttaaatcatggcagcgttttcttcaatgaaccgcttaacagcatttgctgtcaattgagacaactcattccccggagccctacaaaccatctgattcttcccatacccaccaattaatcccggatcggttggtccataaaccgtgatattgggtctatccagtgccgccgttaaatggcttaaccccgtatccaccgacactacaaatttagccccggccagcacgcgggcaacgccttccagactcatcttcggcaatacttcaacataagcaaatccttccgccagtcgtttcgcccgttcttcctcatgcggcgcgccccacggaagtttaatccgtattcctgaatcagccagtaaaccaatcaattctcgccagtgttcttccggccagtgtttatcatcacgggtcgtcgcatgaagaaatacggcatattcgccagcatctgtaggcaggttcgtcagaaaatgctgtgcgatagcataatcgccctgggtttgcggtttgctatagcccaaacttttggcaaacagttcgcgggtgcgttctacggcgtgctgctgttttgcaatatgatgcttacgattgtaaaacaggctggctaaaggttcgcgagcggtttgccagtccatgccatgctttacgccatgcgccagacgcgtcaccagcgccgcgctttttaccagcccctgagcgtcgataactgcgtcatagttctctgcttgtagcgcttcacgaaacgctttgcgttcagcttttataggggccgagaaccaggctttacgccagcgacgtattgccacaggaataactcgctcaacggcagcgtgccaggaaggaatctgtgcgaacccttcttccaccacccagtcaaacttaatttctgggattgcctgctgggcatcagtgagtgcgggcaacgtatggagaacatcgcccatcgacgatgttttaacgatcaaaacccgcatccgtcaggcttcctcttgtaacaatagcgcgttgagttcttccagtacgcgctggggagtaatgtcgatcaagctctggtgataaccctccgcagcgtcacctttacgcactttgtgatagccggtaatcaggcggatcacgcgcgctttatgggatagcggcggtgtgaagtccgggctactcggaccatacagggcaaccagcggacgattgagcgccgccgcaacgtgcatcaggccagaatcgttagtgacaatggctttacaggctgcaatcaggataaccgcttgatcaagctgtgtttcccccgccaggttccgacaccatgcctgctgctcggtattcaaagcggcaagaatctcattgcctgcttcatgatctttcgccgagccaaacagaaccacctgataaccttcatcaatcagctgctttgccagctccgcatagtggtagtgtggccagcgttttgccggaccaaactccgcacccgggcaaaaaccaatcatcggacgttctgatgaaagcgaaaattgattacaggtatatgatttttcaccttcgctcacctgcaactgcggccataacaatggctgcggcagatcttgtgctgtgcgcataatgcctttgtcataggccagcgcgacatagcgttccaccattagcggccaggcttctttatcgagcacgcgtacatcgttgagtaaaccgtagcgcatctcgccgcgccagccggtgcgatgaggaatacccgcgaagaaaggcactaatgcggatttgaaggagttgggtaagacgtaggcgcggtcgtagcgcttttcacgcaggctatgacccagtttgcggcgttcgccgatttccagcgctccgtgaccgagaggcatagggatagcttcgttaacttccggcatccgcgataataatggacggcaccatgccggtgccatcacatcgattatcgcctggggatagcgcgcctggagcgtgcgatagagactttgcgacatcatcatgtcgccaacccaagacgggccgatcaccagtattttcatgcagagctcttatgcgtcgcgattcagccaggccatgtattccgttacaccttcagcaacggttttgaacggtttgtcgtaacccgccgcgcgcagatttgtcagatctgcctgagtgaacgcctggtagcggcctttcagcttatccgggaacggaatgtattcgatctggcctttcttgtgataagccagcgtagcatcagctacagcctggaaggattccgcacgaccggtgccgaggttgaagatgccggaaacgccattttccaggaaccacaggtttacatctgccacatcgccaacatagacgaagtcgcgtttaaagttctcgctaccttcgaacagcttcggtgattcaccgttattaagctgggtgttgagatggaaagcgacgctcgccatgctgcctttatggccttcacgcggtccataaacgttgaaatagcggaagccaacaatctgcgagttcgcttccggcaggatttggcgaacatattcatcaaacaggaattttgagtaaccgtagacgttcaacggtttttcgtactcgcgggattcaataaagtcggaggtgcgtccgccgtaggtggctgcggaagaagcgtacaggaacgggatttcacgctccaggcagtagtgcagcagctccttggagtattgatagttgttatccatcatatacttgccgtcccactcggtggtggaagagcacgcgccttcgtggaaaatcgcttcgacatcgccgaactcttcgccagccataatctggatcaggaagtcttccttatccatatagtctgcgatattcagatccaccaggttcacaaacttggtgccgtctttcaggttgtccaccaccagaatatcggtgatgcctttatcattcagggctttaacgatgttgctgccgataaagcccgcgccgccggtaacgatgatcataactgtaaccttcgaattatggagtcagagacaatctcagacacgaatacttctatcatatcactacacggcgttggcttcagccattcgccaaaagtgatattgatggacgttatttatcctgaattttgcagaagtgttaacgcttcatctcgtcgcgacctataagtttgggtaatatgtgctggaatttgccctgtctggagaatcgcaatgcgtggagaattttatcagcagttaaccaacgatctggaaaccgcacgggcggaagggttgtttaaagaagagcgcattattacgtctgcgcagcaagcagatatcactgtggctgatggaagccacgtcattaacttttgtgccaacaactatctcgggctggcgaatcatccggatctgattgcggcagcaaaggcgggaatggattctcacggtttcggcatggcttcggtgcgttttatttgcggcactcaggacagccataaagagcttgaacaaaaactggcggcattcctggggatggaagatgcgattctctactcttcctgctttgatgctaacggtggactgtttgaaacgctgctgggtgcggaagacgccattatctccgacgcactgaaccacgcgtctattattgatggtgtgcgtctgtgcaaagctaaacgctatcgctatgccaacaacgatatgcaggagctggaagcacgtctgaaagaagcgcgtgaagccggtgcgcgtcatgtgctgattgccaccgatggtgtgttctcaatggacggcgtgattgccaacctgaaaggcgtttgcgatctggcagataaatacgatgccctggtgatggtggatgactcccacgcggtcggttttgtcggtgaaaatggtcgtggttcccatgaatactgcgatgtgatgggccgggtcgatattatcaccggcacacttggtaaagcgctgggcggggcttctggtggttataccgcggcgcgcaaagaggtggttgagtggctgcgccagcgttctcgtccgtacctgttctccaactcgctggcaccggccattgttgccgcgtccatcaaagtactggagatggtcgaagcgggcagcgaactgcgtgaccgtctgtgggcgaacgcgcgtcagttccgtgagcaaatgtcggcggcgggctttaccctggcgggagccgatcacgccattattccggtcatgcttggtgatgcggtagtggcgcagaaatttgcccgagagctgcaaaaagagggcatttacgtcaccggtttcttctatccggtcgttccgaaaggtcaggcgcgtattcgtacccagatgtctgcggcgcatacccctgagcaaattacgcgtgcagtagaagcattcacgcgtattggtaaacaactgggcgttatcgcctgaggatgtgagatgaaagcgttatccaaactgaaagcggaagagggcatctggatgaccgacgttcctgtaccggaactcgggcataacgatctgctgattaaaatccgtaaaacagccatctgcgggactgacgttcacatctataactgggatgagtggtcgcaaaaaaccatcccggtgccgatggtcgtgggccatgaatatgtcggtgaagtggtaggtattggtcaggaagtgaagggcttcatgattggcgatcgcgtttctggcgaaggccatatcacctgcggtcactgtcgcaactgtcgtggcggtcgtacccatctgtgccgcaacacgatcggcgtcggcgttaaccgcccgggctgcttcgccgaatatctggtgattccggcgttcaacgccttcaaaattcccgacaatatctccgacgacctggcttccatttttgatcccttcggtaacgccgtgcataccgcgctgtcgttcgatctggttggcgaggatgtgctggtctctggtgcaggcccgattggtattatggcagcggcggtggcgaaacacgttggtgcacgcaatgtggtgatcactgatgttaacgaatatcgtctcgaactggcgcgcaaaatgggtatcacccgtgcggtcaacgtcgctaaagaaaaccttaatgatgtgatggcagaactgggcatgaccgaaggctttgatgtcggtctggaaatgtccggtgcgccgccagcgtttcgtaccatgctcgacaccatgaaccacggcggtcgcattgcgatgctgggtattccaccgtccgatatgtctatcgactggaccaaagtaatctttaaaggcttgttcattaaaggtatttacggtcgtgagatgtttgaaacctggtacaagatggcggcgctgattcagtcaggtctggatctctcgccgatcattacccatcgtttctctatcgatgatttccagaagggctttgacgctatgcgttcgggccagtccgggaaagtaattctgagttgggattaacacgaacaagggctggtattccagcccttttgcctgaggataatccgttaaatatgtaaaatcctgtcagtgtaataaagatatcgtaattgcgctgatctcttatatagctgctctcattatctctctaccctgaagtgactctctcacctgtaaaaataatatctcacaggcttaatagtttcttaatacaaagcctgtaaaacgtcaggataacttcagaggtcgtcggtaatttatgatgaacagcaccaataaacttagtgttattattccgttatataatgcgggcgatgatttccgcacttgtatggaatctttaattacgcaaacctggactgctctggaaatcattattattaacgatggttcaacggataattctgttgaaatagcaaagcattacgcagaaaactatccgcacgttcgtttgttgcatcaggcgaatgctggcgcatcggtagcgcgtaatcgtgggatcgaggtggcgacgggcaaatatgtcgcttttgtcgatgctgacgatgaggtctatcccaccatgtacgaaacgctgatgaccatggcgttagaggatgacctcgacgtggcgcagtgcaacgctgactggtgttttcgtgaaacgggagaaacctggcaatccatccccagcgatcgccttcgctcaaccggcgtattaaccggcccggactggctgcggatggggctttcttcgcgccgttggactcacgttgtctggatgggggtttatcgccgtgatgttattgttaaaaataacattaaatttattgccggattacatcatcaggatattgtctggacaacagaattcatgtttaacgcgctgcgtgcgcgatataccgagcaatcattatataaatattatctgcataatacgtcagtgagtcggttgcatagacaagggaataaaaaccttaattatcaacgtcactatattaagattacccgcctgctggagaaattaaatcgaaattatgccgacaaaattatgatttatccggaatttcatcagcaaataacttacgaagcattgcgtgtttgccatgcggtgcgcaaagagccggatattcttacccgccaacggatgattgccgagatatttacttccggtatgtataagcgcctgattaccaatgtgcgcagcgtgaaggtcggttaccaggcgttactgtggtctttccgcttatggcaatggcgcgacaaaacgcggtcgcaccatcgcattacgcgtagcgcctttaatttgcgctagcgttaaacttcgccgcttcgggctgtttgccccagccttgccactgatgctggaagtaaacgatcagcgtgctctggctgatgctttcgcttaatacttcaaagaagcgattagcataaacaggttctatcggtttcttcggtttgcacagcttcacgccacggaacggattacgcggtgcatcaggcacagcgtttttcggcggtgtagaagtatcaacctgcggttcattcagcaagctgctggctttcaccagcgtaatgtctggcggcaggttataaaccatctgttgtagcacgcgtaccgttgaagggtgaggatgcccaatggcaatggttgaaccgttgcgacgcgccagatcaattgcgcgattaaattgcacacggatgtccgcttcgttctgcgaatcgtcgaggaacaccttccgtttgatcaccttcacgccagtaccttgcgcggcgcgcatcgcctgggtattaccgatggttacgctgtcgaggaagtaaagattgtaacgctccagtgcctgcatcactttctgcataccaaacaggttagaggtcatcttgctacccatgtggttgttgatccccacggcatagggcacgttattgaccgcactacgaataatgcgctcaatttcgtcgctgctcatctccgggcgcagcgtatttttctccagcggctgtttactcagtggtgccatcgggagatgaatcaacacttcgtgcccgctgttatgcgctttggtcgccatctctctggcgtgcggtgaatcgggtaatacagcgacggagatagcggagggcatcgccagcacctggttttcgttgtgcgggcgatacccaaaatcatcaatgacgatggcaagtttgccagcaagtacgggggaggagagcgccaacagagcggcaaatgcaagaacgttacgacgaaatggaaacaaaacttatcttcccaaccacggctgtggattgaccgcctgaccctggcggcgaatttcgaaatagagtgaaggccgaccctgaccgccactgctgcccaccagtgcaattggctggcccgcgcgaacctgcgaaccaacgctcaccagtgcgctctgattatagccgtaaagactcatgtcgcctttaccgtgctcaaccaccaccaccagaccgtaaccttgcagccagtcagccagaatcacccgaccgtcggcaatcgctttaacttcagtaccttcagaggcaccgataaccattcctttccagcgtagttcgccctgtagctgttcaccatagcgatgcagcgtcggcccgcgaaccggccagaatgcctgaccacgcggcgcacccagaccaccggtacgggacatcagcgatttttcgctttcagtcggtttgtaggtggtgcctttacgcgtcgcttctttctggcggtcgcgaaccgcctgggcctcacgcgcttctcgttcagcacgcgctttcgccgcggcttccgcacgggcaatgctgttacgcagacgggattcgttggcacgcagttcacttagctgctgctgaccttgctggatggaagattccagccccgccagcgtctttttacgctcgttcagcgcctgagtcagtttcgcctgttgggcgcgctgttcatataacagcgtttgttgctcgctttgtttctcttccagttcagcacgctgcatggcgacttcttcacgcgtttgcttcaactgggcaatggtttcttgtcgcgcctggttgagatagccgaaataagcctgtaaacgctgtccacgctggctttcttcaccgctgagaattagctgaataccggtatgctcgccctgacggaatgcggcatccagttgcgcggcgaggctgcgctcctgggcggctttttgctgctccagtttggcaatcgacgcgttcatctcatcaatctgtttattgagttgattgagcgtgttttgcgtttcgcgcagcttacgggtggcttcagagatcgcttcttcctgctttttcaattgtgcgagcaggcttgcgcgttgttgttgcttttggcgtaccgcgcgctcttttgcggcgatatcggcctgaatagatttgagttggtcacgctcatccgcgtgggcggaaaaggcgcacaacaatacgccagcgctaagaacgctggcgtagatgatgggcctgattgcaaacctgcgcggtttcacggcccgtgtcatggtattaatcgcctttcccctcatggggagggattattccacgatgaacagcggcttaccagtcatctcttgcgggatttccatacccatcagcgacaacatggtcggcgcgatgtcagaaagtttgccgcctgcaaccgctttcacgttcttatcaccaacataaatcagcggaactggcaggttggtgtgtgccgtgtgtgcctgacccgttgccggatcgcgcatctgttcagcgttaccgtggtcagcggtgatcagcagttgtccacccacggactcaaccgctttcgcgacttcttccacgcagtgatccagtgcttcaaccgctttaaccgccgcttccatcaccccggtgtgacctaccatgtcgccgttcggatagttacagataatggtgtcgtatttgccgctcttgatggccgcaaccagtttttcggtcagctctgcggagctcatttccggttgcagatcgtaggtagccactttcggtgagttgatcagaatgcgatcttcgcctttgaacgactcttctacgccaccgttgaagaagaaagtaacgtgggcatatttttcggtttcggaaatacgcaactgagttttgtcgtttttcgccatccactcgccgaaggtgttaaccagggaagcgggtgggtaagcaaccgcagttttgatgtcagcggcgtattcggtcagcatcacgaaatcgacgttaaccactttcttacgcgcgaagccgtcgaaatctgcgtttacgaatgcacgagtgatttcgcgcgcgcggtcagcacggaagttcatgaaaatcagcgcatcgccgtcttccattgccgcatctggctgaccttctgcacgaataacggtcgctttcacgaactcgtcgttttcgtcgcgagcataagctgcctgcaaaccagcaacggcagtatcggcctggaactcaccctgcgccagagtcagcaggtcataggctttttcaacgcgatcccaacggttatcgcggtccatcgcgtagtaacgaccaatgatggacgctacgcggcctttacccagcgcagcaaatttctcttcaaattttttcagcgaggattcagcactgcgcggcggggtgtcgcgaccgtcaaggaatgcgtgcaggtagattttttctgcgccacgttcagctgccagttctaccatcgccatgatgtgatcttcgtggctgtgtacgccgcctgcggagagcagacccataatgtgtactgctttacctgcgtttttcgctttatctaccgcgccagtcagcactggattagcaaagaaagcgcgatctttgatttcaacgtccagacgagtcaggtcctgatacacgatgcggccggcacccaggttaacgtggcctacttcggagttacccatctgacggtcaggcagaccgacttccagaccggaagcgtcgatcagggtatgcggacgattggcccacagtgcatccattaccggggttttagcactaaaaatggcgttatcctgctgttcttcacgatagccatagccatccagaatcaccagtaccataggttttttagaaaccgacattgcgacaacctcatactcaagagtcaaaatttgcgtaattttactacagctgaatcgataaaatagcctctgaagatcaaaatatacgaccgctcgcggcaagccgatgccagatttgcgcttttttttcgtcgtgccccgcaaaattgcattccagttaacgcgctggctgtatttgccgcaccgcgcaggtatactcctttcctggtttttttaatcactacgtcgggagttgttaccccccatgcaagaaattatgcaatttgttggccgtcatcccatactgagtatcgcctggatcgcgttactggtggcggttcttgtgactacgtttaagagcctgacctcgaaagtgaaggtgattactcgtggtgaagctacgcgtctgatcaacaaagaagacgctgtggttgtggatttacgtcagcgtgatgacttccgtaaaggccatatcgcaggttctatcaatctgttgccgagcgaaatcaaagccaacaatgttggtgagcttgagaagcacaaagacaaaccggttatcgtgatagacggttctggcatgcagtgccaggagcctgcaaacgcgctgacgaaagctggttttgcgcaagtattcgtgctgaaagaaggcgtcgctggctgggctggcgaaaacttgcctttggtgcgcggcaaataatttacctgtcgtctttcatgatgcaggccgttagctgcaattaggcccccagcgacttattgttataagcttctggggacactccattttgcagccgccctgcaacatgaaatttcagggtaaaaaaacaggagctaaattatggccaatgttgaaatctataccaaagaaacctgcccgtattgccatcgtgcaaaagcactgctgagcagcaagggcgtgagttttcaggagttgccgatcgatggcaatgccgccaagcgtgaagagatgatcaaacgcagcggtcgcaccacggttccccagatttttattgacgcacagcacattggcggctgtgatgacttgtatgcattggatgcacgtggtggactggatcccctgctgaaataacgtgtgaacgttggcattacattgcgcagtatttaaggacaacacttaagggttttctacacatgtcagaacaaaacaacactgaaatgactttccagatccaacgtatttataccaaggatatctctttcgaagcgccgaacgcgccgcacgttttccagaaagattggcaaccagaagttaaacttgatctggatacggcatcttcccaactggcagatgacgtatacgaagtggtactgcgtgttaccgtaacggcctccctgggcgaagaaaccgcgttcctgtgtgaagttcagcagggcggtattttctccatcgcgggtatcgaaggcacccagatggcacattgcctgggcgcatactgcccgaacattctgttcccgtatgctcgtgagtgcatcaccagcatggtatcccgcggtacattcccgcaactgaaccttgcgccggttaacttcgatgcgctgttcatgaactatttgcagcagcaggctggcgaaggtactgaagaacatcaggatgcctgatgaaccaacgtaatgcttcaatgactgtgatcggtgccggctcgtacggcaccgctcttgccattaccctggcaagaaatggccacgaggttgtcctctggggccatgaccctgaacatatcgcaacgcttgaacgcgaccgctgtaacgccgcgtttctccccgatgtgccttttcccgatacgctccatcttgaaagcgatctcgccactgcgctggcagccagccgtaatattctcgtcgtcgtacccagccatgtctttggtgaagtgctgcgccagattaaaccgctgatgcgtcctgatgcgcgtctggtgtgggcgaccaaagggctggaagcggaaaccggacgtctgttacaggacgtggcgcgtgaggccttaggcgatcaaattccgctggcggttatctctggcccaacgtttgcgaaagaactggcggcaggtttaccgacggctatttcgttggcctctaccgaccagacctttgccgatgatctccaacaattgctgcactgtggcaaaagtttccgcgtttacagcaacccggatttcatcggtgtgcagcttggcggtgcggtgaaaaacgtcattgccattggcgcggggatgtccgacggtatcggttttggtgcgaatgcgcgtacggcgctgatcacccgtgggctggctgaaatgtcgcgtcttggtgcggcgctgggtgccgatcctgccacctttatgggcatggcggggcttggcgatctggtgcttacctgtaccgacaaccagtcgcgtaaccgccgttttggcatgatgctcggtcagggcatggatgtacaaagcgcgcaggagaagattggtcaggtggtggaaggctaccgcaatacgaaagaagtccgcgaactggcgcatcgcttcggcgttgaaatgccaataaccgaggaaatttatcaagtattatattgcggaaaaaacgcgcgcgaggcagcattgacgttattaggtcgtgcacgcaaggacgagcgcagcagccactaaccccagggaacctttgttaccgctatgacccggcccgcgcagaacgggccggtcattatctcatcgtgtggagtaagcaatgtcgtgtgaagaactggaaattgtctggaacaatattaaagccgaagccagaacgctggcggactgtgagccaatgctggccagtttttaccacgcgacgctactcaagcacgaaaaccttggtagtgcactgagctacatgctggcgaacaagctgtcatcgccaattatgcctgctattgctatccgtgaagtggtggaagaagcctacgccgctgacccggaaatgatcgcctctgcggcctgtgatattcaggcggtgcgtacccgcgacccggcagtcgataaatactcaaccccgttgttatacctgaagggttttcatgccttgcaggcctatcgcatcggtcactggttgtggaatcaggggcgtcgcgcattggcaatctttctgcaaaaccaggtttctgtgacgttccaggtcgatattcacccggcagcaaaaattggccgtggcattatgctcgaccacgccacgggcatcgttgtgggtgaaacggcggtaattgaaaacgacgtatcgattctgcaatctgtgacgcttggcggtacgggtaaatctggtggtgaccgtcacccgaaaattcgtgaaggtgtgatgattggcgcgggcgcgaaaatcctcggcaatattgaagttggtcgcggcgcgaagattggcgcaggttccgtggtgctgcaaccggtgccgccgcatacaaccgccgctggcgttccggctcgtattgtcggtaaaccagacagcgataagccatcaatggatatggaccagcatttcaacggtattaaccatacatttgagtatggggatgggatctgatgtcctgtgatcgtgccggatgcgatgtaatcatctatccggcatacagtaactaatctctcaacaacgctcccggatatcccagctgcctccaggcttcatacaccacaactgacaccgcattggacaggttcatgctgcggctgtccggcaccatcggaatgcgaattttttgttcagcgggcagggcatcaagaatgctcgctggcaggccgcgtgtttccgggccgaacatcagataatcgccatcctgatagtttacggcgctgtgagcaggcgtacctttcgtggtgagggcaaacaggcgctggggattttctgcttcgaggaacgcgcgaaagtcatgatgacgcgtaacggcggtaaactcgtgatagtccagccccgcgcggcgcaggcgcttatcgtcccaggcaaatcccatcggttcgatgatatgcagacgaaagccggtattagcgcaaagacggatgatattgccagtatttggcggaatttctggttcgtaaagtacgatgtttagcatactgcccccttagtgcgggggcaggatagcagaaaattggtgagcagtgcggccttttcccctcaccccggaggggcgagggagaaaaaaagagtgcggtgtcgtttcagagtgagggagtacatacagcgccgaacggtccccactccctgagggagagggttagggtgagggggctcaaacgactatgccgcattccctttcgccatcggagccagtgccgtaggcaactctttacccagcccctgcaccagcgaatcttgcgtaatttcactgatcgatttcgcgccagtcagcgtcattgccactttcatctctttctcgatcagatttagcaggttagctacacccgcctggcccgctgttgccagcgcatacaggaaagcacgacccagaagtacggtgtcggcaccgagcgcaatcatacgcacgacatcaagcccgttacgaattccgctatccgccagaatggcgatatcacctttcaccgcatctgcaatagcgggcaacgcacgagcggaagagagtacaccgtccagctggcggccaccgtggttagaaaccacaattccatcagcaccaaaacgtactgcatcgcgcgcatcttccggatcgaggatccctttgatcaccatcgggccatcccagaaatcgcggatccactcaaggtctttccatgagatggacggatcgaagttattccccagccagccgatgtaatcttccagtccggtcggtttgccgagataagctgagatattacctaaatcatgtggacgaccgttcaggcccacatcccacgcccattgcggatgcgtcaccgcctgcaagtagcggcgcattgccgcatttgggccgctcatacctgaatgcgcatcacggtagcgtgcgcccggtgtcggcatatccacggtgaaaaccagcgtcgaacaacccgctgcttttgctcgctccagcgcgttacgcataaagccgcgatcgcgcagtacataaagctggaaccacattgggcgcttgatggctggcgcgacttcttcaatcgggcaaacggaaaccgtcgagagagtaaacggaatgccatgcgcgtccgccgctttggctgcctgaacttcgccacgacgcgcatacatgccacacaaacccaccggtgccagtgctaccggcatcgacaatttctcattaaacagcgtcgtttccaggcttaagtcagacatgtttttcagaatacgctggcgcagtgccacttctgacaaatcttccacgttgcggcgcagcgtgtattcagaatatgcaccaccatccatatagtggaacaggaacggcggcagaatgcgttgcgctgcggcgcgataatcgctggctgcggaaataatcatgcgtttttctccctcgaatgctcataatgctcaccgggcaggcgggtaatccgtgcgtggcgagcctgatcttcatcgaatcgtttcatggtggtgtgaacaaaactaaggtgcgccatcattgctttacgcgccccgtcggcatcaccagcaaaaatggcgtcaatgacagcctgatgttgttcggtcagttgtgaaaaaaccggtggcaccagatacatccgctgacggctatgcttcactgaggattgcaggacatcgaagaaaccgcgcatggtttgcagcagcacgatgttatgtgaggcttcggcaatcgccagatgaaaacgaacgtccgcttgtgaggcgatatccgggtcttcacttagcgttgcttcaaagcaaagctgaatcttttctttgtcgccaggtgtggcgcgcattgccgcatgccatgcggtgctggcttcaatggcgtagcgggcttccagaatatcgaaactgtaatccggatcatcggccatcagcgtttttagcggctggacgatgttttgctccgaccatgtgtcatgacgccagcgaataaacgtcccgccgccgcgtcgactgagcagcacgccttcgctcaccagttttgccagcgcctcgcgtagtgaattacgtgatacgccgagttgcatcgccagttggcgctcagcgggcaacttcatgcccgcttccaggtttttttcatcaatcagcgcccgcacacgatcggcaacctcgtctgacaggcgtctgggtaaaacaatcattaaggaatcatccacgttaagacataagcctgaagcgtggtgatcacgcccaccatacaggtgaagatcaggctgtgtttgacagtaaagcggaacaaatcagactctttgcccaccaggcctaccgccgcacaggcgatagcgatagattgcggggagatcatcttaccggtgacgccaccggtggtattggcggcaaccagcaacagatcagagacgccaatttgttgtgctgcggtggcttgcagcgcggcgaacagggcgttagatgaggtatccgacccggtcaggaatacccccagccagccgaggaacggcgagaagaaggtgaatgcatgaccggtgtgcgccagtgctagtgccagtgttgatgacagtccggaatagttcgagataaaggcgaacgccagcaccatgccgatggagtagatgggtagagccagttctttcagcgtgctgccgaaggtgctgatagcgtcagacggtttcatcttcagccagacaatcgagagcagtgcagcaaacagaatggcggtgccggtggcagagaaccagtcaaacttaaacacggcggcataggctgtagcctcgctgaccactggtggcatacgggcaaccagtttatcgaggtacggcaccggaatgttgatcacccactcatacagcgcaccacccgatgcgaacagggctttaaacggcgggatactccacagtgttacggtagctgtcaggaacaggaacggtgtccaggcacgtaacacctgacccgcagtgtaaccggtgtgggccagcgtcatatcaacctgtgacgcccccaaatcaccaaaacggaatacgcgcactggctgccagcgtttgaggaacagcgtcaggcagagcagtgataccagcgaagagataatgtccggcagctccggcccaatgaagttagagctaaggtactgagcgatggcaaacgagccgcccgcaaccacgaccgcaggccacgtctccttgataccgcgccagccgtccataatcgccatgatccagaacagcacgataatggtcataaacggtagctgccgccccaccatctggccaatctcaaagctgtcgatgcctgttacttgtccggcaaccaggattggaatgcccatcgcgccaaatgccactggcgcggtgttaacaatcaggcacagtccggcggcgtacagcggtttaaaacccaggccgaccagcaatgcggcggtaattgctaccggtgcgccaaagcctgcggctccttcaaggaaagcgccgaaacagaaaccgacgatcagcatttgcagacgctggtcaggggttatcgaaagaatagacgagcgaatgatgtcaaactgcccggttttcaccgagatcttatagacgaacactgctgcaataatgatccacgcgatgggccacaaaccatagaagaagccataaaccaccgaggccagcgcgttagcgaccggcattttatagaacagcaaagccacggcaagggcgattgctaccgtccatgaggcggcgacgtatcctttcagtttgagcttaatcagcgcaaagaagaaaaacaggatgggaagcgatgctatcagactggaaagccagatattcccggcgggatcgtagttttgttgccagagattcattgcaggtctcctggagtccacgcacatcgtgtaatgagtctgttgctcatctccttgtcacacgttgtgtaaaagtggcactgccaattgtgttgtgtagggataatgacaatgaatggttaactaaatgttatgtattggcaatattgatgtgagttttaattggggaattgtgaaccagaggtcagataagcgaagaattggtagggccaattcttgtggggggagatgtctggtaaagaaaaagggcaatcctcatcagagaattgcccttagattgttgacccggagcgccttatcttgcctgatgcgcgtaacgcatcaggcaatttggcgtttgcccttagtcacactaacttaatggatcattaccactgaataccggcaccgagtgcggcggagtattcaccctggctattggtactaccttgtaatttgtagacccaacgaccattggcgctcaccatcgatacacctaaagcaactgccgattcaccgttgtaagtaccgccaccaatagaagccatgctggcacccggtgtataagcctgcggcagaccggtcattgccattgcagaagcgataccaccgctcaacttgctttcagttttagacagtttgttatccatctcaaccattcgctgatcggtgtattgcttcgtttcctgcacgctttgcttcaactgcgcgtaattcaccgcgtcgttgttgttgacgccagcggagacgttgctgatacgagtcgtaccgccgttgccgccaccgagggtgatattgctatagtcgatagaaccatcagctttggtgtcgtaacgcacaccgccagcttcggaagacttcaactgtgccacgttaacagcatcggtgtcgtttttacctgcggctacgttggtgatacgacgttgattagtagatgagcctacagagatcgtattttcttcggttgccacagaccctgtacccagtgcgacgctgttatccgcggcagcaatggagccagaaccaatcgcgacgctatctttaccctgcgcgctggcatctacaccatcggtattggtcttgaagtacttggtgctaccggtggtgacgatatcgccaataccgttttcgatattggtgacgcgtgaatcaagattcgttacccgattatccaggttagtaatgctctgggtattctgggaaacctgcgcatccgttactttcaactgacccacgttgaccgcatcggtatcagccgaacctgctgcgacgttagtgatctgacgttgaccatccgcactaccgactgagaattcaccgacagagttctgcggtgcgtccatgttgtaggcggtataattggtttgagcgccacgagtggtcgtagaaccattacctatcgcaatactgttgacatgaatgacttgcgcattgctaccaatggcaatgccgttaagtgcattcgcgtccacgtaggcaccataaccgataccaatacctttatcgccattcacgatggttttcgcacccattgccagcgagtcagttcccactgccagtgaatcttcttccgttgaattagcgtggaagtatttagtcggcgtggttgcgaccgcaccaatcgcattctgcaattgacgaaccgtaacggcgtcatgggcttcggaaccatcggctacgttgatgatttgacgatatttaccgtcatcaccgatagacaatgcaccgagcagttcgccatccgtggtgtcgtaaccaataacaacgccattttccgttatgctggtgtcacgggagcctttggcaatcactcggctggaaacagagctgctacccagggcgatacccgtatcaacgtcgctgtagctgccctgaccaatagctacgctgctatcgcctttggcgacagagttataacctatagctgtagcgccaacaccctgtgcgctggcgtcgttgaacgctaagccgtcgtcgttagtacgcacatagttaatacccgcaccgttttcttggatataggttgcgtcggtgttaccagcgagctgattgataatttgggtgttctgctcaatcatcatattcgtcgcattcaactgagaaccgttcactgcatcggtactgtcctcactaatactgccattagcgacattagtgatgatgctggctttaccgtcatggctggcattgtaggctccagcaccgccattggcagtctcatcccacagcagggcgttatcatcaagcgcatccagggcgtcaccgacgttgttgtactcggcgttcgcaatggtgtaagtcggtgcggtgatggtgccgtcagcgttgacttctgcgtcaccacccagcgcatcagcgatgtacttattggtggtatagagttgtgagccgttaatcgcgtcgctgctggcagcagagattgcaccgttagcgacgttagtgattacactggcagttttatcttttccgtgagcggcgctaaatgcaccattttcaccggcgtccgcatcccagagcagagcgtcgtcaagagtggtatcgatagcattcagggcatcaccgacattatcgtaatcagcattagcaatggtgtacgtcggcgcagtgatggtgccgtctgcattgacttcggcaccaccccccagcgcatcaacaacataactgctcacgccgtggagttgtgagccgtttactgcgtcagaactggagtctgaaatttcaccatctgcgacatcagtgatcacgcttgcgtcaccattagtaccgtgtttggcactgaatttacctgcggtggcatcccaaagcagagcatcgccgagagacgtgctaaatgaggagttaatcgcagccagtgcatcgccgacgttataataatttgtttcaccgattttgtaggttggaccggtaaacacaccgtcagtattcacagaagcattgccgccgaagtaggtggcgatattgctgcttaagtcataaagctggctaccgttaatggcatcggaactggttgcagtgactgtgccgtccaggatattggtgattttgctggcggtattgttgccatgagctgcagtgaagacaccattgtccttatcccatttcagcgcatcctcaccaagattagtcaccgtctcagtcagattagagatgttggtggtgttagtggcgatattggtggtattcgtcgccacggcatcgttggtggttttcagctgagagccgttaacggcatcggtgctgccagtcgtcaggtcgccatctttaacgttggtgattttgctggtggtctcggtgccatgagctgccgtgaatacaccattgtccttatcccatttcagcgcatcctcaccaagattagtcaccgtctcagtcaggttagagatgttggtggtgttagtggcaatattggaagtgttattggcgatattggtggtattcgtcgccacagcatcgttggtggttttcagctgagagccgttaacagcatcagtgctgtcagccgtcaggtcggcatctttaacgttggtgattttgctggtggtatcctggccgtgagctgcactgaatgcctttttagtttcgttccagagcagggcatcagcctgaaggtcaccaacggaatccgtcaggttggtgatattggtggtattggtggcaatatttgccgtattcgtggcaatgttgctggtattagtagcgatattggcggtgttggcttcgacatcgtcattggtagctttcagttgggaaccgttaaccgcatccttactggaggctgaaatcgtgccatccgcaacatcggtgattacgctggcagttgggctactagtaccatgagcagcgctgtatttgcctttggtttggtcccattgcagggtgttttcatcaagtacagcgagcgcagcccctacgttatttttgctaccattttttaaattgtaggttggtgctgtaacagtaccgtcatcaacatctactgcagcccctcctccaagcctttttgctaccgagtcgctaatggcataaagctgtgaaccattaatggcatcgtaactgtcagacttgatcgcgccatttttcacattaacgatcttgcgttttaatgaactattgccgacagagacggtattgtctaaatccgcaatggaatctgcgcccagcgcgacagagttaataccgttggcactgctattactaccaagcgcaagactcttatcaccagttgcattactggctgtgcctaaggcaatggtgtttaagcctctcgactggctaccattacccagagcgatggcatccacgccatcagctttgttgccctggcctatggcgattgcattatctgccagagcctggctgccatttcctaatgcgatagtattgactttatcggcaaggcttccgaaccccattgccatgctattagtcccttttgccttcgcattattgccaatagcagttgcattttcagcggcttcggtctcagcacctatcgcaatagcgttcgctgcgctggcaagtgattgtctgccaaatgcgaggctgtcagtaccgctagctacactgctacgccccagggcaattgcgttttcttcagatgcgacgctacttgctcccagcgccattgaatacgcttttgacgcattggcggtgtcgccaagagcaatactcataatctcagtagctttagtggcatttcccagggcaatggcgtttgctccttccgctttggaagagtcccccatagcaatagacaatttacccaatgcttttgaataacggccgagggccattgagtattggcccaatgaatacgaagaggcacccagtgctatacttctatcgccttctgatattgcactaaccccaaaggccattgatgcaccgccaatcgcatgggtttttgacccgatggcagagctatattggccttcagctatagcgtcataacccacagcagtactggaaccactggtgttcataaaagtatttgctttcgcccctttgcctatagcaacccagccgtcgccagctgatccactaccgtaatcaacaccctgaccgttgtcattcccggcattcgccaatgccccaaacgacgacaacattccacccgcaaccagcgcagaaattaacagcttactgcgcccagatttcttgccacggctttttgccgtttcgctggtaacagtataattccctgtcgcagggttccagataactttaaatattttgttcattaatgatgctcgctattccttgttataagcgtactaactgcatttattttttgcttcttttctgccgattttcagcagagggaagattgtcgaactgaatattttccatgttgatggctaacttcagatatcccaggttattgggcgatacacccttcagggtcaaattaatgtcttgccattgacctggtaataatttcaatgtggatttcattgatgtgttgaaaagtaattgttgccaccgggcaaactctttggcatcgacaggtttttcaccaccccatgtcgcattaaaaccaatgtttgagataggtgtacttaataagttgaccagtgagatatgaataacactaccattctctgtggcgtcaatggataacactcgacccgctaaagccaccgaaccgttgttcagaatgaaatacttcgtttttgctgggttaaactcggtaaaaataaaagtattttgttggtctttaacggatttaattacgtgagttaaagtctttgtactgtttattatgccagtttgttgtttttgaatagtttcgagttgactctttagctgtgcttgttgtttttcaagtagcacaattttattattatgttcttcttgttgtttcagtaaactactttctggcttgccttcttcaatgtagtcacatcccgttaatgcgcagagaactgaaacagtgacagcactgaaaaaaatcttcttcaagttcatgtaaaaatccttatttcctccgaccagcgatcaatgccggtagagttgtccattgtattattggtgagctatgttgctttacattaatgacagtgatgtgtgtcgattaaatattgttttaagcattcatcataaaaatgtatcattcgtttcaaaagatgtctgtgtttgtatgaatatattattttcgtggattctaatgatgattattaataaatgtcaaatatgaaagaaaccatgtctgggaaaaaatttacagataatttattgtatgaatatgatgattaaaatttcacaattaaatccgaaaaaaagagacgtaaatgcttgttaattaataaatgatatcttctatatatttttattgtttataggtggctatttcggtaaaaatgcattttcagaatatcaaccagcggtaaatcgacgtaaagggagtgaattgtttggtaattaggcgagtagacaggagagtccccgcattgaccagctaaggcaagccagatgcgggttgatatgatcgaaccagtcgtctgaggcgcttaaaacgcagtcttagagaatccagtcatctcctgcaggcccatttcacggcccagcgcggtcattgggtgcacaaccaccagtccgcgaacacttttcttcagcttgcccatatcagcctgctcttttttggtaattgcgcgctgaaacggcatcttcatcagcttctgtgcttctttactcagtttttggctatgaacttcacgcaggcgagcaatttctgcttccagcgtggctttctctttttccagctcggcatatttgtctgcggcttcaaccagcgacagatcggcctgctggtggcggatggcgtccagacgatcgctgagacgtttgatttcgtttttttcgacttctttcatgtgatggcttctgataaagataaatttatagcccctagtatgcgcgaccaggtgctttgttcacaactgatgacattgcaatagttctataacgtaatcattaacatgcttaaaaactacgcaatttattgattaattaagaaatctatagaaaaaagataataaacagcagcggatgattattgaggattcagcacgttttccttaatgtcatctttaccgggaacctaaactaaaattggcggccgcgcattcccggcgcggggtaatacggagatatcatcatgggcaaattaggtgaaaacgttccgcttcttatcgataaagccgtagatttcatggcatcaagccaggcgttccgggagtatctgaaaaaacttcctccccgtaacgcgattccgtccggaatacccgatgaaagcgtgccgttatatctacaacgtctggagtattatcgtcggctttatcggccgaagcaggtagaggggcagtaagcagacgttgcttacttttgaaaggctttttttaagctgattctggaaatcagctcagtcagtgaaaggaccattgttgatcgcacagcctgttgatagcgctgaatttgcattgcatacaaactggagtctgctggttcaaactgtggcggcggtggtaacgccgccacgcagtgcagttcaccaaagggtccaaggatctcgtcgtcggtaaaggcgtactcgttgccgtcgtgatttagttcttcacgcaatgccatcagcagctccgcatcttcgtattcctggcggttaatgacgcccaacccgtaaatgagttttaaacgcacagaaagatcgcccagcggaccgtcgccgtcgagtaacggttctacagcatacttcaccgcgtaatcgtctttgcggaatacctgaagcaccagaagatttaccgcctcggtcaaaagctcgacggcggtgatcagaaagcttcgcacggttttgccagcattcagacgctcaagcacacggttttcaaaggcctgggtttgttccattgttgcctgcatatctgacaatctgttattcgggcgcagggtgtcctgcgcctggtccaccattattgcattgctttataagcggttaccgcctcggatacaacctcgctgttggcatcaagaccggaaatctgtgccagcgccgcctgcggacctttgtcagcgatcagtgctgccagttcctgagcctgcggatcatcttcactgcggaagtgcattgcaccagcaatcccctgaatcagattcttgtgcggaaggctgtattccagcgtaccgagcagtggcttgatcagacggtcgccagcactcagtttacgcagcggctgacggcctacgcgctctacatcatctttcagatacgggttctcaaaacgaccgaggattttctggatgtacgccgcatgtttgtctgcgtcaaagccgtagcgcttgatcagtaccgcaccactttcttccatcgcaccttttaccaccgcgcggattttctcgtcgagaatagcgtcacgaatggtctgatgaccggccagttttccgaggtacgcggttatagcatgacccgtgttcagggtgaagagtttacgttcgacaaatgccatcaggttgtcggttaactccatgcctgggatgttcggcagtgcgcctttgaactgcgttttatcgacaatccattcgctgaaagtttctaccgtcacttccagcggatcgttagttgccgaagccgaaggcggtacgatgcggtcaacggcggaatcgacaaagccaacgtgttcttctacccacgctttggcgtcttccggcagggcgttcatcacatggcctttcagctgcgtggtaccgcgtaccatgttttcacaggcgatgatgttcagcggggattcattaccttgttctttgcgtttcaccagccctttggcgatagccggagcaatacgttccagcacaaccgggccaacggcggtagtgactaaatcgacctgagcaatcagatcaacgacatcatcaccaatgctgctgacagcattgacgccggaaacggtatctacctgctcggtttcaccaaccacatgaacctgatagctatgacgggcattcagggcatcaagtaccacctgattgacatcggcaaacgtcagttggatacccgcgtctgccagcagtttaccgataaagccacgaccgatattacctgcgccaaaatgtaatgctttcatagtattaaccttcatcaatgtttttacccgagagggctggggtgaggcttttccctcacccaaaccctctccgtgaggagagggtaggattggattacttacgacctgccaacagttccagcacttcatccacgctggtggtgtgtgccagacgctcgatgacggactcatcatccagtgcattggtcaggctggtgataacctgaatgtgctcgttgttacgggctgcaataccaatcaccagacgggcaatgtcatcttcttcttcaccgaagcgcacgccttccgggtactggcagaacaccacgcccgttttcagtacgcgatctttcgcttcaaccgtaccgtgtggcaccgcgatagactcacccagataagtcggggtcagtttttcacgatccagcatcgcctgaacgtattccggctcaacgtaaccgcctttcaccagctgctcgccagcaaaacgaatcgcttcttctttggttgctgctttgcgaccgaggaagatgttctccgcgcccagtttgaacaggttagcactggaatcgtcaaagctgtctttcagactgtctttcactttcacttcgttttcagtatggcgctgggcagcaaccagacgttcggttaggctggtgtacaggccgctgtcgaggaagttggtcagcgaaatatgctgcgcctgcggaacctggcgcatagcgcgttcggtcaggtcacggtgagtgatgacgaggtccacatctggcggcaggttgttgatcgcgctgttagtgaccgaaatctgtgacagacctgcatcctgaattttcttacgcagcacgcctgcgcccatcgcactggaacccataccggcgtcacaggcaacgatgattttacgtacgtggctcaggtcgttagtcacatcgcccgcagacagcggagatgtgcctttagactcagctttcatgtcctgcatacgacgagttgctgcttcaatatcatcttcttctttcactttgctggttttcagcaaaatagcagagacaacgaaggagacagccatcgccgcacacacacccgcgatgttagcgaaataagcaccttttggtgtcatcgccagtacagcaaggatagaacccggagatgccggagaaaccagaccaccgcccaggatagtcagcgtgaacacgccagtcataccgccgaggatgactgcgaggatcagacgcggattcatcagcacatacgggaagtagatttcgtggataccccccaggaagtggatgattgccgcaccgcccgcagactgtttagcgctaccacgaccaaagaacatgtacgccagcagcacgcccatacctggacctgggttagcttcaatcaggaagaagattgatttacccagttcatgggactgctgaatacccagcggcgagaagataccgtggttaatggcgttgttgaggaacaggattttcgccggttcaacaaagatagacgccagcggcagcatgtcatggacaaccatgaagttaacgcccgcagccagcattttggacagggcttcaacaatcgggccaatgccgaggaatgccagaatagcgaggatcatcccgatgatgcctgcggagaagttattcaccagcatctcaaaaccggatttgatcttaccgtctacccagcggtcgaagtgcttaatgcaccagccgcccagcggacctgcaatcatagaaccgaggaacatcggcatgtctgcgccgacgataacgcccatggtggtgatggcaccgactacgccgccacgttcgccgcctaccagcttaccaccggtataaccgatcagcagcggcaggagataagtgatcatcggcccgaccagcttcgccagcgtctcgttcggtaaccaccctgttggaataaataacgcggtgatgataccccacgcgataaacgcgccgatatttggcatcaccatgttgctgaggaaacgaccaaagctttgcactttgatcttaatatcggatgacataaaaacaccccttcttatgtttgctgtcgcgcaggctggaagcccgaggttttttgttaatgtggcggcagaggtagccggaccttgtagatactgcgaaatctggcactgaatcggttaactgtccagtcgacggccttttgtgtgatatcagtcacataaatatagggggtagagaggtaattgacgtgatactcatcacaaaacgcttgtgtaaaaaagcaacaagacggcgattttcgctaaaaatggcatttaaatgtgagtagtgtcacatttttgttttgatggtttgttgaatctttgtgatctgaatcacaagatattttcttacggcgttcacctgatgtgatctacagcatgttatgccttcgtcatacaatcgttatgtaactaagcaactcatcacctctaaaaattattctttggtgttatggcgagaatcgcgaacccggattattgtcaaaatatcagcctgactcccttctggctgccagcccaaaaacaacactgataaacgtgaatccgaggcagatatgtttctaaactatttcgcgttgggagtgctgatcttcgtctttctggtgattttttatggaatcatcgcgatacatgacatcccttatctgattgccaaaaagcgcaatcacccccatgccgacgctattcatacggcgggctgggtgagcctgtttactctgcatgttatctggccgtttctgtggatctgggcgacgctctatcaaccggagcgtggctggggtatgcagtcacatgttgcgtcgcaggagaaagcgactgacccggaaatcgcctcactttctgaccgaatttcccggctggagcatcaactcgccgccgagaaaaagactgactattccacgttcccggagatctaattatggatctattgattgttttaacttacgtggcgctggcgtgggcggtctttaaaatcttccgcattccggtaaatcagtggacgctggcgacggcggcgctgggaggcgtgtttctggtgagtggtttaattttgttgatgaactacaaccacccttacacttttaccgcgcaaaaggcagtgatagcgatccctatcacgccacaggtgacgggaattgttactgaagtcactgacaagaataatcagcttattcaaaagggcgaggtgctttttaagctcgacccggttcgttaccaggcgcgagttgacagacttcaggctgacctgatgacggcgacgcataatataaagacgctgcgtgcgcagctcactgaagcgcaggccaacaccacccaggtttcagcggagcgcgaccgtctgtttaaaaattatcaacgttacttgaaaggcagccaggcggcggtgaatccgttctcggaacgtgacatcgacgatgcgcggcaaaatttcctcgcgcaggatgcgctggtgaaaggctcggtggcggagcaggcgcagatccagagccagctcgacagtatggttaacggcgagcaatcgcagattgtgagcttaagagcgcaacttactgaagcaaaatataaccttgagcagactgtcattcgcgcgccgagcaatggctacgttactcaggtactgatccgcccaggtacatacgcagctgccttgccgctgcgtccggtgatggtcttcatccccgagcaaaaacggcaaattgtcgcccaatttcggcaaaactcgctgttacgtctgaaacccggcgatgatgcggaagtggtgtttaacgcgctacctgggcaggtgtttcacggcaaactgaccagtattttacctgtcgtgccaggcggttcttatcaggcgcagggggtattgcaatcattaacggtcgtgcccggcacggacggtgtgctgggaaccattgaactggaccctaacgatgatatcgatgccttacccgacggcatctacgcccaggtggcggtttactccgaccatttcagccatgtttcggtgatgcggaaagtgctgctaagaatgaccagctggatgcattatctttatttggatcattgagggggaggggggagattatggaactttgctccttgtaaggactaattatttttgcatattacttcattagctgcgatgatttttctttaatattcattatgttaataagttctggatgagtgtgctctcattggattttttatccgtcttgttctgccgcaggatgagactatacatcgtcgagatcgcaatgatgatatgagttgttcctcctgcgacggctctaatcaaaaaagagcaggagtgcttttccatctattgcgatgatggctttattatctgaaggatgacagtcacatttaaaaaatatttaatctatagatcacaatgtagggtcatggaatatatgtatacaactattttcttcttcacttttaattatcgtattcattataaaactaagttaaaaaaactcctggagagtgagttattaatatatttttaaataaaattaagttatcattcatcgatgcactttatagaatcatcaatggccataatagtactattaactctcaattttatatttttatcatcactacaaatattaactgaatttatatcaatgatttttttattcttatcttttattttatttactgtttcaatgcaatcagcggcaagttggagtggatttagatttttcagatatggtcttatgatctttcccttacttaataaatagcatgtataggattcggaaagtccagcatctattttgtacctcattatattagataaggatgtgagaaattccttgttatcattcgcagccatatatgccagtccgagttcagcctctgcggccttacaggcaaaatagcttagtgaacacgcttttcgtccctctttagtactggctgatattagtgcccataatattgctttgtctgccaaatctaactctctctgaaattgtcttgcagtaactgcactcgcagaaatagagaaaaaaatacaatttttaataaccttgccatattttttagtccgtaactgttaatgtgctatctggctctgaaaatattaactcatttaatttttgcatgtcattagataaaccagttatacaaccctcggaacagaatcgaggtcctaaagacggaccaaaagcgtttaaacaactatgtattgaaaatccattgcgattataagttcctgtattaactgacggtactaatcgtatgccgtcaggttttctattgcttgctcccgggtcattaacattctaactccataggccttgaggtattggccatctatttataaatgtgtacaacggggattatttttacattgcatattattaccagaagcgactggaatactaagcacatcataaaaattatcatcacatggtatatctgaaacacacgaaagcatacctaaagttatactgtataaacaggtggctaatcccaaggggatcgattccagaaatcgggttcaacggatactgataaaaattccacctaccttccagcccaatcggagcctgagtgttataccgcccctgctgcggttaatgttaccgataatagttatagtacagccctgattcatcatcatactactgctgcggcagtctgatgaactattgcttttacggattctccttattcttccttctatccattcgctttagctttttgagctcttgaagtttgctctttgcatcaatattaccgttatttacagcgaattccatccaataaatagctctattcaaattataatattctgataatgttggatttgtatctgataaaaagaccccataattaaactgcgctgtaacattcccctgagatgctgatctttccaagaatcgcaattgtttatcaatattatttttagtaaagcagtaatattgatatagtcgaaatgatgcctctgaatcaccatgttgtgatttatacttcagtttcatcagcttttcttcacttaaatcataggtcattgctgtagatcccatcacactttcgttttcttttattttcacatcagcaccatgcaattgaccaataagagaaaaataaaaaaatagtaacaagcatgctttcatacatctacaacctatcttatatcactgggtttttctggcgtaccttgcatattagaaatggggtgcccagatggcccatatgttatccaattaccaaggtcttttgttgttatagccattagatccttatttgaattaaggttcgttggtgctgttagcactgtatccatttttaacttaccattagttcctcgcccccaccacgtccatagcgtgtcaggtcctattacatttgtatgtaactctttagctaattggctagcaaatgaattttgtcctttacctgtattacaagaaaataaccaaactgtcatcccatctttataattcccatcaaatttaattagatatgctagatctttagctgtcatgatactgcgcgttgcggattcaatagatgtgggggtaccatgccccccgattgtgaaaacgcctgggatattaatctcatcagctacagaatggataagatcactttcggggtataaatttatatcaaccaaaccttgcggatctacatttatgaccggattcaacggatactgataaaaattccatccccccttcagcccaatcggatcctgagtgatataccgcccctgcagcgggtcataatagcggtggcggttgtaatacaggccggactcctcatcatactgctgacccggcaggcgaatgagctgctgcagatgatgcgggttctcatcactcagcaggttgccccattcatcatattctgcgcaccacgctgttgccccttccgtgctgatgagcgccagcggcaggccgcgatggtcgcagtggtacaggtggatttttcgcgccggcgtgtacaccgggtccatctggtttttcatctgctccacggtcaggccgcacgatgccagccagcggcggctttcctcactcacccggtcagccaggatttcactttccagccggtcgagcatctgcaccgtgccggcgggaatcccccactgtgcataggcaactcacgctatgaacgcttcagcttatcaatagcggaagttataatttcattgtcatcaaacttgtacaacatagtatctaaaacaggaagtagcgttttatcacctaattcacccgcagcttcaatgatatcatcataaacagtatttttttttaactcatcgcataaaacagataaaacccttttatcttttctgtaggaaagtccgattattgcttcaatacggacttcctcatttttatcctgaagcatctccacaaaacaatccctaatatcactattatcatatttattgatatttattgcaaatgcggcccagtttctgacatctccatttggatcttttaacagattaatcaatagtggaattgttgctttatcattgataacagaaatagcaaatgctgtagcacgtctgacattagtcgatttatcaaaagcagtaatttgagattgttctactattttaggtgaataaattgggtttttcttgcatcgctgagccgttgactcgattgccgtagctcgaacgcaagcgctcttatcattcaatgccatattgttcaaaatattaaaaacattatcttcgcattttttgcaaatttttatttgcccgagtataaatgctccgatatctctacggatataatttttatcagagcagaactcaattgccaatctaacagcgtcttgcccacctcttaactgtaatactctggcagatgaaatccttttcaaggaattgtgatcatcaagtaagcgaaataattcatcatcatttagtttcttacattgattatataaaccatactctttacttgcctttcttttctggtatgtatttgacattgcaggaacctccataaaggctatctttttctatcgtttgactgtctggagtcctccacctactctgccatcagcgcacacgatgtttgattatccttacatacttattttccgtggccaaaattcagaattctcccatcatttttgcctatttctataataaaaaccccaccagcaatttggtctgagtgaatggtaccttcaacaacccaacttgttgttaactcagtgatttcgtatggtttttcttcttctgcggcatcctgtccataacgattcttaacatatatctcagctaattccaatgctatagctttatttttaaccaaatttctaacggtatatttaccttcactttcatacttgcgcattattttaatattattattacactgcgcccatgtgttgtatgtaaaaacaaacaaagatacaatgacacagttcctaaacaatatttttttacatattaccatgaactctgcagacattaggtaatccttttctgtttgttatttccttcccgtggttatctattgctttaaaattaccactgggcgtacctaaataaaatgacttgatattgttatctttacttttaactattttctcatctttacctgaaaatatttcgtcccaatattctccatgactatctgcaccatgagtatgataagctgatactttctcagtaccattagggcaagggctattgaatggatatgatccttttctttctcctcggttaggtgctgttgagaaatatctgccactattatccttacatattaaaccagcgaactctttatcttcgcaaatagattggctatttattttatttaaggcgtcatatgcggtgctatctatagaatcaaatttatctggacctatcatagcggatagtgtgccgcaaagaccattagtacatgcccccgattttgcatcctcccacatagataaacccagggggtcgatgtctgatatcggattcaattgatatccatacaggttccatccccccttcagtccaatcggatcctgagtgatatatcgcccctgcagcgggtcataatagcggtggcggttgtaatacaggccggactcctcatcatactgctgccccggcagccggataagctgctgcagctgatgcgggttctcttcattcagcaggttgccccattcatcatattctgcgcaccacgctgttgccccttccgtgctgatgagcgccagcggcaggccgcgatggtcgc

SEQ ID NO: 37 - DNA, 77587 bp, Escherichia coli
  source 1..77587: mol_type = genomic DNA
ggtgcttttgccgttacgcaccaccccgtcagtagctgaacaggagggacagctgatagaaacagaagccactggagcacctcaaaaacaccatcatacactaaatcagtaagttggcagcatcaccacctacgggcatttaatcggcgatgtagtattacgcaccctggcaacttacttagccagttggacgcgtgattacgaaacggtttatcgctacgggggcgaagaatttatcattattgtcaaagcggctaatgatgaagaagcatgtcgtgcaggtgtcagaatttgccagttagtcgataaccatgccatcacacattctgaagggcatatcaacattaccgtgacagcaggtgtgagtcgcgcatttcctgaagagcctctggatgtggtcattggaagagcagaccgggcaatgtatgagggtaagcaaaccggaagaaatcgctgcatgtttattgacgaacaaaatgtgattaaccgagtttaagctccgtttaacattcattgagaaaactgatgctactgtgtcaacgatccgttatcagtgcaggaaaatgcctgttagcgtaaaagcaaaacacaaatctatccatgcaagcattcaccgccggtttactggcggttttttttcgccgtcataaaaatcaggccccttgtacacaactgtaacaaggggccggttaggtgagggattatctccgttcattagtcatcccatttgtggctgaaatacgcggccagaaaaccagaaaataaaattattcccagtacggccataaaaacattcatattacccagcattatttgcctccgtttatggtgtggtgtgtttcctcgcttaccttaattttcatctcaatgagaaagatattagcagaggtaacctaaacgaaggctgaattaaatttttattgtgttcgacttaaatcaacaaagcgcgggctgcccccacggtcttgcacgaatcccttttaacatcagcacccacgcagcaatgatcaccaacgctaagatgacaaacagcgaggaaggcggcaggctggttagcactacgccactcactaatgggttaatcgcggcaccaagccagcctaaagactgggcggaaaaatagctggctttcattcctggcggcgcaatatggtcaatcaacatatactcgcccggcgcataaatgatttcaccgacagtaaataccgcagctgacataccccacaatagcaggctgttgccggaaaaaataaaaccgaccagaccgatgacgaaacatagggtgcctgctgtcatcagcgcgcggatgttagccgggttaagtcggcggcccacggaatattgcaacgtaaccaccatggcagcattcaccggaagaacaaccgcgaccaccttttcggcaaaatccccatcagcaatcaccatcacatattgtgaaatgcatgaagcaaatgcgccgcttacaaaagaagccagaaaaccagagcaggtaaaccacaacagtgctttatcttgtaataaaactttcggcgaccagacactgcctgtttccgtggcgatgattttctcgctgcgctttacccaaatttgaatgaaaagtatgggaaacgcggaacagatagctgccagccagaagggcagattgatgctctgcatcaccaacagcgtgccgagcggcggaccgatggtccagccaatgtttagcatggtgtagttgattgagaagattttcgttttgctggtggacgaaagattgtcggcaaaccaggctttcagcacggtagcaaaaacagaataggcgcagttaatgagggcaaaaaagagcaccaccagcgttacgttattcactaaaggaatggcaataaaaccgctggcgaaggcggtaattgccagtaacatatagcgtttcttgtcgaacttatccgccaggataccaaaaccgaggctaaaaacgacgccaatagtgagcgcaattgtcatcgcataaccgattagatcgacactcaggctgtactggcgactcaagtaaatggtcataaatggcagcgtagcgccgcgtccgatggttaataacaacgacgaggcaagaagggcgctggtagagcgtcgtagggataagttcatttgtctgtccggcagtgcgtttcgttatgttttgttttagagatgtaaagaaatagcatggcaaaaatccgaagtatagcgacttatttgcgcattaatgccgtcgtaaccggcgactaacgaatcaactgttaaagaaaagtaaattcagctaagttgattgcttacaaaagatgaaattcagaggcggtagaatgtcgcgaaaagatggggtgttggcgctactggtagtggtcgtatgggggctaaattttgtggtcatcaaagtggggcttcataacatgccaccgctgatgctggccggtttgcgctttatgctggtcgcttttccggctatcttttttgtcgcacgaccgaaagtaccactgaatttgctgctggggtatggattaaccatcagttttgcgcagtttgcttttcttttttgtgccattaacttcggtatgcctgctggactggcttcgctggtgttacaggcacaggcgttttttactatcgtgcttggcgcgtttactttcggggagcgactgcatggcaaacaattggcggggatcgccttagcgatttttggcgtactggtgttaatcgaagatagtctgaacggtcagcatgtggcgatgctcggctttatgttgaccctggctgcagcatttagttgggcgtgtggcaacatcttcaataaaaagatcatgtcgcactcaacgcgtccggcggtgatgtcgctggtaatctggagcgctttaatcccaatcattcccttctttgttgcctcgctgattctcgatggttccgcatccatgattcacagtctggttactattgatatgaccaccatcttgtcgctgatgtatctggcgtttgtggcgacaattgttggttatgggatctgggggacgttactgggacgctatgaaacctggcgggttgcaccgttatcgttactggtgcccgtagtcggactggcaagtgcggcactattgttggatgaacgcttaacgggtctgcaatttttaggtgcggtgctcattatgaccgggctgtatatcaatgtatttggcttgcggtggcgtaaagcggtaaaggttagaggctaaaccatacgcacagaatgtgatgtcagcactctgtgcgtctgcttttatcgcgggaaaaagtactttacctggaactcgaaaatattgctgtaaagtaacgaataatccagcggaatagagttactgtccacagcctgggtctgaattttaagtatgggatcccgtgggctgatccgtaaaatactggcgatttctggggtaggaaaagtaggggagaaagtttcaaaggtgccaatgattttgatcccgcattcattctcaatatatgaaaatttggatttttgcatatgtgacacggttaaatcaggaaaacgtgctactgacatccacgtttcttctaattgtgctgcattatcctcaatgaatcgcagtctctttatgtaataaacctgctcaccagtcactaaattcagctcagtcgcaatagtgggtgaagcatcctgcacttcaaatttcataatctgactccctgcctctttgccgcttttatgcgcaatttcactgaaactgttcatgtgatcaatgtgtgcaacaaaattctttttttgaatgtatgttcctgaaccatgctttctgtgaataattccttcgccttccagcaaggataatgccttacgcagggtattacgcgaaacattataacgaacagcgagttccgcttctgacggcaacaaatcaccaacatgccatgaattgccattgatttcggatttaagtaagcgggcaatcttttgaaaaatcacttttgcaccttttaagagccattgaaaacaaggagttgagtcctgattggtttatcgtatggccgagtcgtttaataatcaccctgatgttgaacaactttatcactgtattactgtgatcaatgtaccaggacgtatagctactgcgggatatgatatttaaacaatgtaatctgttatataccagtaagggaaaatatgaaaaaaatattgttagtttgcgctgcgggcatgtcaaccagtatgctggttaaacgtatgattgatcatgctaacgctatttcacttgaagttaatatttccgcattggcgattgcagaggctaaagggaaaattaaaaataacgaagttgacgttgttttacttggcccgcaagttcgctttcagaaaccagagattgaagccgttgcacaggggaaaatgcctgtagccgttatcgagatgaaagactacggcaccatgaacggacaggcagttcttgaatttgcgatgaaactactgcaagagtaagaatctaatattattaaactattacctgaactaacttttcacacatcataaaatggatatggcatacatgctttattgggatgtataaatatccaaaacaacaggtataaaaaaatgggattaatggcctcattcgaacgtggaatggaacgttttcttgttccagttgctatcaagttaaactcacaaaaacatgttgcagcggtgagagatggattcgtttttacgtttccaattatcatggcaagttcattaattatattaattaactttgccatattatcgccagacggttttattgccggattactgcatctgaatagcattttccccaaccttgaaaaagcacaagctatttttactccggtaatgaatggttctgtaaatatcatgtcaattatgattgctttcctggtcgccaggaatatggcgattagctatgagcaagatgatcttttatgcggattaacggcaataggagcattttttattgtttatacgccatatcagatgatagatgggcaagcattcctgacgaccaaatatctcggcgcgcaggggttgtttgttgctgttatcgttgcattgatcaccagtgaaatattttgtcgcttagctcgaaacccaaaaatcaccataacgatgccggcagctgtaccgcctgcggtagcgcgttcatttaaagttttattgccaatattttttgtcatggtgttcttttccgcacttaattattgcctgacactgatatccccggcaggactaaacgatcttatttacacattaatccagacgccgctcaaacatatgggaacgaatatctttgcggtaattatcctgggggctgtgggtaatttcctgtgggtgctggggatccacggacctaataccacatcggcaattcgagaaaccgttttttctgaggctaatctggagaatctctcctgggccgctcaacatggcactacctggggcgcgccatatccgattacctggacttctattaatgatgcattcgccaactgcggcggttcaggtatgacgttggggttattgttggctatttttatcgcttctaagcgtgcggaataccgtgatctggcaaaaatgtcatttatccccggtattttcaatatcaatgaaccgataatgtttggccttcctattgtacttaaccccatcatgatggtgccgtttattatggttcccattgttaactgtgccattggttacttctttgtttcgatggaaattattccaccggttgcttatgccgtgccctggactacgcccggacctttaattgctttcctcggaaccggggggaactggctggctttactggttggttttttatgtttaggtgtggcgacaatgatctatttaccttttgttattgccgccaacaaagtcaataacatgacaactaacggataattccatttacccaggaaggagattgtgatgtttgcagatgaagaacttgttatggagttactggtcaacgcggggcaggcacgttctgacgcgatggaagccatacgttgtgccgggcaaaaagactggcagggcgcaactcagctaatggccagttctgaatctgcctgtcttcaggcacataagattcagaccgcattaattagtcaggatgaaggctgtggcaaaataaaagttaatttaattctgattcatgcacaggatcatttgatgaatgcaatattatgccaggatttagccagggaaattatttcattaagaaaagaactccatgcctgattttttcctccagtgcgatagctggaggaaattattatactcttaaggataagtcatgaatataaagacgcttaacgtcagccttttgtctttttctattattacagcattgtttccattgaacgcgatggcaacaaaattaaccatagagcagcgccttgaattgcttgaaaatgaattgtcgcaaaataaacaagagctgaaagcaacacagaatgaactgggagtatataaatcccgactttcgaccttacaaaaaagcatcacggaaaacaaatataaatcagcctcgcttgctgaaatatcagcgacatctcccgtcgctgataacatcaaaaatgaaaacggtgaacagaactcgtctgccgcagcgcatactataaatggatcgcagcaagttgccgttattgaaagtaaaggcgacaaaaccactatcgaaagcgtgaccctgaaagatatcagtaaatatataaaggatgatattgggttcagctatcaggggtacttccgctcaggctggggtactggtaatcacggctcaccacaaacttatgcagcgggttctctgggacgttttggtaatgagatgagcggttggtttgacctgaccttaaatcagcgtgtttataatcaggacggtaaaacggcaaatgcggtcgttacctatgatggcaacgtgggtgagcagtataacgatgcctggtttggtgacagtgccaatgataatatcatgcagttcagcgatatttacctgacaacgcgaggttttttacccttcgcaccagaggcagacttctgggtcggcaaacataaactcccgcaatatgagatccagatgctggactggaaaaccttaaccacggatgtcgccgcgggtgtggggattgaaaactgggcacttggtgtagggctgtttgatatgtccttaagccgtgatgatgtcgatgtttactctcgtgatttttcgcgtaccagccagatgaataccaattctgtggatgttcgttatcgcaatatcccgttatgggatgatgcgacattatcattaatggctaaatattccgcacctaataaaacggatcaacaacaagataacgaaaatgacaacagttattttgaaatgaaagatagctggatgctgacttctgttttacggcaaaacctgcaacgcgatacgtttaatgaatttacgttacaggttgccaataattcctatgccagcagttttgccagtttctcagatgccagtaatacgatggcgcatggtcgctattactatggtgatcataccaatgggatcgcctggcgtttaatctctcagggcgagatgtatcttactgacaatattattatggctaacgcgcttgtctattctcacggcgaagatgtttatagttatgaaagtggtgctcatagtgattttgacagtattcgcactgtaataagaccggcctggatctggaatacatggaatcagacggggcttgaattaggctggtttaagcaacagaacaaaactcagcagggtgtaacactaaatgaatcggcttataaaacgacactctggcatgcattgaaagtgggtgaaagcattttaggttcacgaccagaaattcgcttctatggaacgtatatcaatattctggataacgaattatcgaattttaagtttaatgagaacagcaaagacgagtttatggccggcatccaggcggaagtctggtggtaatctattttagttaaggagttgtgtatgtcaggatttaaaaaaggttttttatggggcggtgcggtagccgcgcatcagttggaaggtggctggaatgaaggaggaaaaggcatcagcatcgctgatgtgatgactgctggcgctcacggggtgccgcgtgaagtgacagaaggcgttatcgacgggcttaattatcccaatcatgaagcaattgatttttatcatcgctataaaacagatattcagttatttgccgagatgggattcaaatgctttcgaacttccattgcctggacacgaatctttccgcaaggtgacgaacaggagccgaatgaagagggtttacaattttatgatgatctgttcgatgaatgccttaagcagggaatggaacctgtggtgacgctttcacattttgagatgccttatcatctggtgacaaaatatggtggctggcgaaaccgtaaactgatcgacttttttatccgcttcgcatcaacggtcttcacgcgctataaagaaaaagtaaagtactggatgacgtttaacgaaatcaataatcaggtgaatttcagcgaaagcctgtgtccatttactaattccggtatcttgtattcgccagaggaagatatcaatgagcgcgaacaaataatgtaccaggcggtacattacgagttagttgccagtgccctggcggtacagactggaaaatcgatcaatcctgaatttaacattggctgtatgatcgccatgtgccccatctatcctctgacgtgtgcacccaacgatatgatgatggccacgaaagcgatgcatcgtcgttactggtttactgatgttcatgctcgtggatattatccgcaacatatgctgaattactttgccaggaaaggattcaacctcgatatcacaccagaagataacgcgattcttgccagtggttgtgtcgactttatcggctttagctactacatgtcttttacgacacaattttcgcccgataacccgcaactggattatgttgaaccacgagatttggtcagcaacccttatatcgatacatccgaatggggatggcaaattgatccggcagggctacgttattcactcaactggttctgggatcatttccagttgccgctgtttattgtcgaaaatggatttggtgcggttgaccagagacaagctgacggcacggtgaacgatcactatcgcattgattactttgcttcccatattcgggaaatgaaaaaagccgtagttgaagatggtgttgacttaattggctacaccccgtggggctgcattgacctggtttctgccggaacaggggaaatgaaaaagcgctacggaatgatttatgtcgataaagacaacgaagggaagggaacgctggaacggatacgtaaagcgtcgttttactggtatcgggatctcatcgccaacaatggcgaaaatatttgagacttgaggaagatattacggagatgtcaggctctgtgatcagagcctgacaataactacatagcgtgttgattataatagggcacgccgagcgcatccgacttatcactgccagtacccatgtgatttaaatcaaacggtggttgttcctgcgatgggggaacaaccacgacattggcacaagaagtaacaactggctgcgtggtttgttccgcaacgccctgcgcggaaaagagaataagcgcagctgctattgcggatgaaagtggtttcatgattgcctcagtgacgttgtcacgttatcaactagctgttgtaatgatttaatggatgtaaaaagcgcgattcgccctgcatattggtcatccggtatttatgcggcggaacatcaaagtaatttttgaaggttcgggtcagagtttgttgcgactcgaagccatatcgttctgccagatagagtatcggctcgttactttccttcagcttttgcgcgatttccgtcatcttacggctgcggatgtattggcctaatgaatgaccggtttcttttttaaacatccgttgcaggtgccatttagagtaacctgaacgctctgacactttctccagtgacagtggcgattccaggttgtcctcgatccagtccaaaatgctatgaatggtaatagcgtcagtattgcgtctggacatcgtcatacctcttttttgtttacggcaggactttcttaagcaaatgctcaagtgttgccacttcgtccgccgtcaggttttttgttaattcttgatgcaggtcctggccaactaattgatggcattgttcgcatattgccgcgccgctggtggtaagttttaccagtacgccgcgcttatcattcgggttcggcaacctttcaacccagcctttacagaccaggcgatccagcatacgggtcagtgctccaaggtcgacagacaacacttttttcagttcaaccggagtaatacacgccgcgcagcggatagagcagagcaccttaaactgtgccgcggtaatatccagcggagacagatactcgttaagcagacgatctttcttctgattaaccatatggattaagcgacccaatggaataatttcattgaacagatcgctggtacttttcacattagttgccctggcaagtaattagttgcaggggataatattgcccaggcaagtataagtcaaataaatgaattgaccgatgccacgttttgctaaatcggttcaagttttggtcaatgcgatgcaaggttagctaaagagtgacactttatccttgtttaccccttatacttttcgctgataacccagatacacaggataacaaccaccaatgttagatttgtttaaagcaattggcctggggctggtggtgttactgccgttagctaacccattaacaactgtcgcgttatttcttggcctggcaggcaacatgaacagtgccgaacgtaatcgtcagtcgttgatggcctcggtgtacgtatttgccatcatgatggtggcgtattacgccgggcaactggtgatggatacatttggcatttcgattcccggtctgcgaattgcaggcggcttaatcgtcgcgtttatcggttttcggatgctctttccgcaacagaaagcgattgattcaccggaggcgaaaagcaagtcggaagagctggaagatgaacccagtgccaatattgcctttgtgccgctagcaatgccaagtaccgctggtccgggaaccatagcgatgattattagctcggcgtccacagtgcgtcagagttcaaccttcgctgattgggtactgatggttgcgccgccgctgatctttttcctggtggcggttattttgtggggaagcctacgcagctccggcgcaattatgcggctggtgggcaagggtggcattgaagcgatctcccgtctgatgggattcctgctggtatgtatgggtgtgcagtttattattaacggcatcctggaaatcattaaaacgtaccattaaaaaaggcccgaatgggcctttcaactattgcgtctgttcttcgagtgtcactggccagcggcgaaatataatgattgaccaaattaacgcggcaaaagcaggcaccgcgcccacataaccaatcatcgacattgaccagtgcaaactcacctgattacctaccaacgcacccgccccgattccaatattaaatatcccggagaatagcgccatcgcgacgtcggtagcatctggtgccagcgccagcactttaacctgcataccaagcccgatgatcatcatcgcgatcccccagaaaatactcagcaccccgaggtgtatttcactgttcgtcgcaggtaacagcaatgccaggcacaccagcaacagcgcaatcgccgtactcaccaacgcagacgcatactgattacccagtttaccgaaaatcacgctgccaataatgcccgcaccaccgagtaataacagtaatgccgtggcaaagttggcgctgaatcccgcaatgttttgtacaaaaggctcgatatagctgtatgccgtgtaatgggcggtgacaaccaccacagttaacaaataaatgctcatcaatgccgggcggcggaacaatagcgggaggcttttcagtgaaccggaatgctcactgggcagtaagggaagtaacttaatcaggcacaaaagggtgataagcgccccaataccaatcgcgaagaaggtcattcgccaaccgaaatactggcccacaatgcgcccgagaggtaaacctaagaccatcgccagtgctgtaccggtggcaattaaactcaatgcctgtgctcgcttcccggccggagccatacggatcgccagagacgccgtaatcgaccagaaaatcgcatgtgcaaaagccacaccaatgcgactgatcaccagaacggtaaagctccacgacaaaaacgacagtacgtggctggcaataaacaccacaaacaggcagatcagtaatttgcgccgttcaacctgactggtcattaacataaaaggcaatgacattagcgctactacccatgcgtaaatggtcaacatgatgccgacctgagcggtttgcatgtgaaaactttgcgcaatgtcagagagcaggccaacagggacaaattcggtggtgttgaagatgaaggcggcgactgccagcgtaacgacccgtagccacgccactttgcgggaaacagtgtttgttgtcataacagattatcgggtgagttgcgaaaaagtgatgaaatgatcttaaaacggttaatgatgtgaatacaatgcatttgtgatctggatcgcgttttccgtttctctgacgctgattctttcacgcgtcagagagtcggtaacatcacggtttaatgacgttcagggaggtctggcgttttggaggttgcgggtataggtggtctgacaggggagcgaggcctgtttttcaccaggtcttcgtgagtaacttttggcggcgtttcattttttacaaaaagtttgagggtcctgcgcgccatatgtttgataattttatcatcacttaatgatgctggcatcaacacgtcattcaaatcactttcattgggattcataaattggtgatagtgcaataacatattggcgaaaaataaaaacaagtcctgaaaatgaggagattcttgttctgctaaaagggataaaaagcagatgcagacttcgggtagtacatgtttgttagaacctaatgaatccatcaggctttgcaataaatcctcttttaattcgctgtccgttatgtcgagaatggcggtgttcaagttaggatctttattgacgaaccatctgtgaacctcagagttattccataatcgggggagtatgacaaaattaccgcgagagataaaattcaggacaagcaaatcaaactggcgtaagtaatctgcagcggtatggtgatccggaggcaggggttcaatatgtggtgtatgcgctcttttgatgggagcgccagggttgatcatcggaaattgttcaataaaatcattcagaaacagaaagggcacacgctcgacgccggtctgaaatacgcgccccatagtgacaggctttgggttgggagcgcaaaaaatattaatttctccatcatggcgaaaattatctaaataaatagggcttaaatttattactacctgaaattcaatattttctttgtgtcttccattcttgacgggataagtgagtttaaactgaaccttttcattgtatagcgtgtcgttaccccggaaagaagtcctctgaatatatgataagttatcaaggttattaaatatcttttttgtggctgagttgatgtttaaagacgtgcgccactcttcatcacatattatggtactgagtgcatcaataaaatcctttaaaacttcttttacctgaggtgcaatattacgagcgggaaaatcatcaggaagagatatataattgctgatgcttactggcgtaaccatatttgccccatatagtcataagtcatcggaacatcactatatagggcatttgagctgcaagaactatcaaaaatagctcattggtaaccctgttttgccgagtcaggcacatccagtagttgaataaatgcctcaagcggacgcgttttcgcaccgcgacgccagaccagccaggttgttaaccaacgccattgctcagctaacggccacgcttcaacctggtgatgccccggcatactttccagcatagagcgtggaataagcgcaatgcctgctcctgcggccacacaggccaacattccgtgataagactccatttcatggatagttcccggagcggcaccgtcagcatgaaaccagctctcgaagtggcgacgatacgaacaattggcgcggaaggcataaatgttactgccgttaacctgactggcgcggattactggcgcatgaccttgtggcgtgacgatcatcagctcctcgcggtataccggtatcccgtcaatggcagtatggttaatgggcccatcaataaatgccgcattcagttttccctccagcactccttccagcatagtgccggaagggccggtggaaagtgaaaactgaattttgggataacgatggttgaattccgccagcgtggccggaatgcgcactgctgcggtgctttccagcgaaccaagagaaaataaaccttgcggctcatcgccagcgacaacgctccgcgcttcatccactaacgcgagaatttgttggctatagcgtaaaaagttatgcccggcaggagagagacgtaaacgctgattctcgcgaataaacagatctacccccagttctgtttccagctggcgtagacgggtagtgagattcgacggcacgcgatgcacttttgctgcagcctgggttatgctgccagcttcggcaaccgcgttgaacatctccagttgggtcagatccataatattctcgattcgtgaataagtggcttaatattattcattttaaagcaagagtaaatctgcgtatcttcataccatgactcataaaggagataccccgatgaccattactccggcaactcatgcaatttcgataaatcctgccacgggtgaacaactttctgtgctgccgtgggctggcgctaacgatatcgaaaacgcacttcagctggcggcagcaggctttcgcgactggcgcgagacaaatatagattatcgtgctgaaaaactgcgtgatatcggtaaggctctgcgcgcccgtagcgaagaaatggcgcaaatgatcacccgtgaaatgggcaaaccaatcaatcaggcgcgcgctgaagtggcgaaatcggcgaatttgtgtgactggtatgcagaacatggtccggcaatgctgaaggcggaacctacgctggtggaaaatcagcaggcagttattgagtatcgaccgttggggacgattctggcgattatgccgtggaactttccgttatggcaggtgatgcgtggcgcggttcccatcattcttgcaggtaacggttacttacttaaacatgcgccgaatgtgatgggctgtgctcagctcattgcccaggtgtttaaagatgcgggaatcccacaaggcgtatatggctggctgaatgccgacaacgacggtgtcagtcagatgattaaagactcgcgcattgctgctgtcacggtgaccggaagtgttcgtgctggagcggctattggcgcacaggctggagcggcactgaaaaaatgcgtactggaactgggcggttcggatccatttattgtgcttaacgatgccgatctggaactggcggttaaagcggcggtagccggacgttatcagaataccggacaggtttgtgcagcggcaaaacgctttattatcgaagagggaattgcttctgcatttaccgaacgttttgtggcagctgcggcagccttgaaaatgggcgatccccgtgatgaagagaacgctctcggaccaatggctcgttttgatttacgtgatgagctgcatcatcaggtggagaaaaccctggcgcagggtgcgcgtttgttactgggcggggaaaagatggctggggcaggtaactactatccgccaacggttctggcgaatgttaccccagaaatgaccgcgtttcgggaagaaatgtttggtcctgttgcggcaatcaccgttgcgaaagatgcagaacatgcgctggaactggctaatgatagtgagttcggcctttcagcgaccatttttaccaccgacgaaacacaggccagacagatggcggcacgtctggaatgcggtggggtgtttatcaatggttattgtgccagcgacgcgcgagtggcctttggtggcgtgaaaaagagtggctttggtcgtgagctttcccatttcggcttacacgaattctgtaatatccagacggtgtggaaagaccggatctgacgcgacatattcagctctgatatactcgcaggtcttttcagacctgcggtccaggagtagaaagtggcagtcgccatggataatgcaattttagaaaacatcttgcggcaagtgcggccgctcattggtcagggtaaagtcgcggattatattccggcgctggctacagtagacggttcccgattggggattgctatctgtaccgttgacggacagctttttcaggccggagacgcgcaagaacgtttttccattcagtctatttccaaagtgctgagtctcgttgtcgccatgcgtcattactccgaagaggaaatctggcaacgcgtcggcaaagatccgtctggatcaccgttcaattctttagtgcaactggaaatggaacagggtattccgcgtaatccgttcattaatgccggtgcgctggtggtctgcgatatgttgcaagggcgactaagcgcaccacggcaacgtatgctggaagtcgtgcgcggcttaagcggtgtgtctgatatttcatacgatacggtggtagcgcgttccgaatttgaacattccgcgcgaaatgcggctatcgcctggctgatgaagtcgtttggcaatttccatcatgacgtgacaaccgttctgcaaaactactttcattactgcgctctgaaaatgagctgtgtagagctggcccggacgtttgtctttctggctaatcaggggaaagctattcatattgatgaacctgtggtgacgccaatgcaggcgcggcaaattaacgcgctgatggcgaccagtggtatgtaccagaacgcgggggagtttgcctggcgggtgggactaccggcgaaatctggcgttggtggcggtattgtggcgattgttccgcatgaaatggccatcgcagtctggagtccggaactggatgatgcaggtaactcgcttgcgggtatcgccgtccttgaacaattgacgaaacagttagggcgttcggtttattaatgcagtctctcgatccactcttcgcgcgtttatcccgttcaaaatttcgctctcgctttcgtctgggcatgaaagagcgtcagtattgcctggagaaaggcgcgccagtcatcgaacaacatgcggcggattttgtcgctaaacgtcttgctccggcattaccggctaatgacggtaagcaaacccccatgcgcgggcatccggtgtttatcgctcagcacgccaccgcgacctgctgtcgcggttgtctggctaagtggcataacattccgcagggtgtttcgttaagcgaagaacaacaacgttatatcgtggcggtaatctatcactggctggttgtacagatgaatcagccatgagaattgcggaaaacgataaaatagcattcccagggtacctttatttgccgccgctgttagcgaacatgctatcctttatgtgaatttacttattacgttgagataattgccacccgcaattgtatggacagataattaatgcatgtacaccccatttcaactttccgtttgttccaggaaggtcatctgctacgtaatagcatcgctatttttgcgctaaccacgctgttctattttattggtgcagagttacggctggttcacgaactttctcttttctggccgctgaatggcgtaatggcgggggtgtttgcccgctatgtctggcttaatcgactgcattactatgcgatcagttatgtggcgatgctggtttatgatgccataaccaccgaatggggactggtttcactggttatcaatttctccaatatgatgtttattgttaccgtcgccttactggtcgtgcgggataagcgtctggggaaaaataagtatgagccagtaagtgccttacggctatttaattactgtctgattgccgcattattatgcgctattgtcggggcgattggttcggtcagtattgatagtctggatttctggcctttgcttgcggactggttcagtgagcaattctcaacgggcgtgttgatcgtgccttgtatgctgacgttggctattcctggagtgctgccgcgctttaaagcagaacagatgatgcccgccatcgcgcttattgtgtcggttattgcctcggtagtcattggcggagcggggagtctggcgttcccgctgcctgcattaatctggtgtgcagtgcgctatacgccgcaggtaacatgtctgttgacctttgtcaccggtgcggtggaaatcgtactggtggcaaattcggtgattgatatctcggtcggttcgccgttctccattccggaaatgttctccgcacgtctcggtattgccacgatggcgatatgcccaattatggtttcttttagcgtggcagcgatcaattcgctaatgaagcaagttgcgctgcgagccgactttgattttctgactcaggtttactcacggtccggtctttatgaggcgctgaaaagtccatcgctgaaacagacacaacatctgacggtcatgctgcttgatattgactatttcaaaagcattaacgataactatggacatgaatgtggcgataaagtgttaagcgtgtttgcccggcatattcagaagattgtcggtgataaggggctggtggcgcgcatgggcggcgaagaatttgctgttgcagtgccgtcggtgaatcctgtcgatggtctgctaatggcggaaaaaatccgtaaaggcgttgaactgcaaccattcacctggcaacaaaaaacgctttatctcacggtaagtattggcgtcggtagtggtcgcgcatcgtaccgaacgctgaccgatgattttaataaattgatggtcgaagccgatacgtgtctgtatcgctcgaagaaagatgggcgcaaccgtaccagcactatgcgttacggtgaggaagttgtctgacatctttattcattccgcgcgatttgaatgcaatgtgttctaccactttatgatccaggaaaaggcgtatttcctcgattaaaccatgatccgcgccacacttttctcataaaactgctcattaatcatcaggagttgatcaaaataggggttcggcgtattaaagtttgctaacctgtcgtaccaattcaaacaggttgtatgactaatcagaagggaacccattgtgaaaacactaaatcgtcgcgattttcccggtgcacagtatccagaacgtatcattcagtttggtgaaggtaacttcctgcgcgcctttgttgactggcaaatcgatctcctgaatgagcacaccgatctgaattctggtgtggtcgttgttcgtccgattgaaacttcattcccaccgtcactgagcacgcaggatggtctgtataccaccattatccgtggcctgaatgagaagggggaagcggtcagcgacgcgcgtctgattcgctcggttaatcgtgaaatcagcgtctacagtgaatacgatgaattcctgaaactggctcacaacccggaaatgcgctttgttttctctaataccaccgaagcgggtatcagctaccatgcgggcgataaattcgatgacgcgccagcggtaagttatccggcaaaactgacccgtctgctgttcgaacgttttagccatttcaacggtgcgctggataaaggttggatcatcatcccgtgtgagttgatcgactacaatggcgacgcgttgcgtgaactggtgctgcgctatgcgcaagagtgggcactgccagaagcatttattcaatggctggatcaggctaacagcttctgttctacgctggtggaccgtatcgttaccggttatccgcgcgatgaagtggctaaactggaagaagagctgggttatcacgatggttttctcgacaccgctgaacacttttacctgtttgtgattcagggaccgaaatccttagcgactgaactgcgtctggacaaatatccgctcaacgtgctgattgttgacgatattaaaccgtacaaagaacgcaaagtggcaatcctcaacggtgcgcacaccgcgctggtgccggtggcgttccaggcagggctggataccgtaggtgaagcgatgaacgatgctgaaatttgcgcattcgttgaaaaagctatctacgaagaaattattccggtactggatttgcctcgtgatgaactggaatctttcgccagtgcagtcaccgggcgtttccgtaacccgtacattaagcatcagctgctgtctatcgcgctcaacggtatgaccaagttccgcactcgcatcctgccgcagctgctggcagggcagaaggcaaaaggcacacttccggcgcgtcttactttcgcattagcggcattgattgccttctatcgtggtgagcgtaacggagaaacatatccggtacaggacgatgcacactggctggaacgttatcagcaactctggagccagcatcgtgaccgtgttatcggtacccaggaactggtagcgattgtgttggcagaaaaagaccactgggagcaggacctgacgcaagtgcctggtctggtcgagcaggttgctaatgacctggatgcgattcttgaaaaagggatgcgcgaagctgtacgtccgttgtgctaataacaccgttacttctgaacccggtttcgaccgggtttcttatttcactatattagttacaacatcctatgtgcctttatcattaacagatgccacatgcagcgcctgttaatgttgtaagcttgtaggtaatttgtaaatagcgtcttgagaatgtgatcgtaatcacgtttaatagggcgactttttcacgcctgaagataaccatgattgttcgtccacaacaacactggctgcgccgtatttttgtctggcacggctcagtattatccaagatatcatcgcgcttactactcaattttctctttctatcgctgttattttcatgctgccctggtacacgcatctgggcatcaaattcaccctcgcaccgttcagcattctcggtgtcgccatcgccatttttcttggttttcgtaataatgccgggtacgcccgttacgttgaagcgcgaaaactttgggggcagttgatgattgcctcacggtcgttactgcgcgaggtaaaaacgacattgccggattcggcaagtgtaagggagtttgcccggttgcaaatcgccttcgcccactgtttacgcatgacattacgcaaacagccacaggcggaagtgctggctcattatctcaagactgaagatcttcagcctgtactggcttcgaactctccagctaaccgtatcttgttaataatgggggagtggttggcggttcagcgccgcaatgggcagctttcagatatcctgtttattagcctcaacgatcggcttaatgatatttcagcggtcctggcaggatgcgagcgcattgcctatacgccaattccctttgcctacaccctgattttgcatcgtaccgtttatctgttttgtatcatgctgccgttcgcgctggtcgtggacctgcattacatgacgccttttatctctgtgctgatttcctacacttttatttcgctggattgtctggcggaagaactggaagatccgttcggtactgaaaacaatgatttaccgctggatgccatctgcaacgctattgaaattgacctgttacagatgaacgatgaagccgaaattccagcaaaaattcttcccgatcgtcattaccagctgacgtgatatttactccgtacggcgggcaacaataaaaagacgcggaaatgccagcagtatctgtccgttctcttgcagtggatactgctcttccagcatctgatggtagcgcttaagaaaaagctgctgttcgctctcggtcagatcctgtaaccacggacgtaatccagtggcggtcacccaatcgataatcgcctggtgtgacggcatctggtgatagtaggtggttcgccagatatcgacctcacatccggcttcgctcaaaatatcgtagtaagcatgaacgccagccaacggctcacgcccgcgatccgggtagttttgttcccaggcaacttcgcgcatgagcacatgggtcggctccagccagttatctggcatctgtactgccagcacgccctgcggattaagtaaagaaaccagatgaggaaacaattcgtagtggtcgggcagccattgcagtgaggcattagcaaaaatcagatcgagtgcctgtaccggttgccagttgcggatgtctgcttccacgaactggcagtctggcaaagcactgcgcgcttcagcaatcatcgccggagacgagtcgatgcctgttatcctggcagcaggccaacgttggtttagaagggcggtgctgttacctgggccacagccaagatcggcaacgtattcgatattctccagcggtactctggcaagcagctccaccgccggacgcgatcgttcagcggcaaagtgcagatataaagaggggttccagtcagacatttatttactcccgtcagcgcgttaccccaattgtagataaaactgatgaattcgcctcacggcatcaacccattgaacagacgttttttacgcggcccggtcattaaagattccagtttcgcgacacaggttttgtagtggggcgtggttttatggaatgccactgcgtcttcatctttataggcttcgtagatataaaagcgcgaattcacttctgggtcctgtaagacatcgaagcgcaaattgccttcttcctgtacagagcccaggtggttctggcgaaaaacttcgataaactcgtcaatcttgtcttcatgaacgttaatttcaaccagtgtgacgtgcataattcttctccttaaatccgcagttactgtttttcactcagatagagttcatatgcccgatcagccgtttcgttatggtgaaccaccgcctgtacggctttcatcatcgccaccggatggtcagactggaaaatattacgccccatatccacaccagaagcgccctgatcgatagcctgccagcacatttccagcgcctcgcgctccggtaattttttaccgccagcaataacaatgggtaccggacatccggcaacaatccgttcaaaacctttttcgacataataggttttgataatttgcgcccccatttcagcggcgattcgagtcgcgagcgagaaataacgctgatcgcgcaccatatctttgcccacgccagtcacggccatggtcggcattcccactttcattccggcatcaaccagctgaataatatttttgatcgactgatgttcatattcgctgccgatataaacctgcgccgccaccgcgcaactgttcaggcgcacggcatcatccatcgataacgccacggcttcattacttaattccgccagaatagagttcgcacctgacgcccgcagtaccaccggcttattggtcgctgggggaactacgctgcgcaaaatgccgcgcgtacacattaatacatcggcatgttcaaacagcggggcgatatttatatcaatgcgttcaagtccggtagtcggcccctgaaaataaccatggtcaaaggccagcatcacggttttacccgttttcggattaaatatccgcgataagcgtgactgcattccccaatccagcgcaccgcaacctttcaggataaaagggatattttgttgcggttgatcggtacgaaaatctttaccatctttaatatcgtctaaatctgccataacttactccggttaagtaatgcacatcagaaatcgtatttgccgatattctctttgttgaatatcacgcgctccggtaacagtacgatgccattaccatccgcttcgtagtcatagccctgaacgctgtttggcgagacttccacctgacctacgccctggatatccagcttgtcgcccgttttcattgatccttttttcaataatgcatccgcgacatacactgaaattttgccttgctgaaccacatcccacaggccaaattctttcaccgtgccgcgttccacatatggacgcatcacgtttggcgtactgaatccgacaatcgcaactttgtcatttttcaggttttctgcggcttgtgcggcagcgggcagggcgttggcgtcgggggcgataatggcgtcgagatcgctatacgcttttaatattccttctgcggtttgtaatgatttagtggcatcgttatagccaaactgcgtagtgacaatttcccagccaggatgctctttggcgattttcgctttcgcttctttcacccactggttttggtccgtaacggtggggcttgagtagaaaaacgcgactttggctttgtctttattcacctgacgcgccgccatatccaccaacatacctcccaactgggcgggcgttccctgattaatgtagtaagagcggcactccggtttagtatcagagtcccaggtcagcactctcacaccacgttgcatggcgcgtttcagtgccggacacaagccatcaggcgaaaccgcagaaacgataatggcgttataaccttgattgacgaagttattaatcaactgtacctgaccagaaacactgggttctgtcggcccgtcgtaggtcacatcaacgctcagctctttacccgcttgttgtgcgccgttgccaccgctggtaaaaaatcccacgccaaccagtttgggaataaatgcaatacgctctgcggcctgcacattcatagagattgcggcaatgccaagagcgctaagtaaggcgattttcttaaagcgatgaagtgtcatgaagatatcctttatggcaatgggttattggcccgacgcgccagccactctttaatttgctggcgatgcaggctaacggaacgacctacgacaacgacgataagtagcgcaccggaaagggcgctggacacctgatttggcactcctgccatttgcaaaccttgttgcaaatatcccactaataaaaccgcaatggcggtgccgataatggaaccggaaccaccataaatattggcaccgccaagcaccacggcggtgatggcgggcatcagaaacgacgcaccgagatcggaacgtgctgaaccaaaatacgataccagcagcacagcggcgaccgcagacgccagccccgtcatggcatagagcgcacataaggtgcggttaactggaatcgcgctataaagcgccacgcgcgggctttgcccaatcaaaaacacattacgtccggcatgggttttatgcagccagagccagaaaacgaggagacatatcaggaagataatcagcggaacggggagtcccagcacatccaggttagcgaaatctgtaaacgccatcgggaatccaccaataccttcgtaccccgtcgctacggccataccggaaagcagcagagcgcttccggcaaacagatacagcgtgccaagcgtaatcaccagcgggttaactttggtatagataattaatccggcgttgatcagcccgcacaatgcgccgagcagtaaggtcaggagtatcgccagcggcatcggcacaccactttgaaacagtacgcccaatgcaatggcgcagaggccgatggtcgaaccaaacgaaatatcgatcccgccactgacaatcaccatcgtcagcggtagggcgacaatgccaatgcagataaagtcactggtgctgaacagcaacatattgagatctaacattcgcgggttaattgcaccaaatgcgacaatctcaataacgagcagtgcggcaagagccagttcccaaccgtagcgaatacgcattatgcggcctcccgttttttacctgacgaagcgggtttaacggatggcggtggcgtcataaagcgggcatatttttgccgccgtagattacgttccagcgcacaacgcaggcgtccatcaaacaccagcaccgccagcagcacgaggcccgcgataaaatcgttccaccatgccggaatgcgcaacagcaccagtacgctatcgatctgcgtcaggaaccatgcgccgagtaccgcaccgatgatcgcaccggaaccgccgagcaaactaatgccgcccagcacgcaggctgcaattgctttcatctccagcccggtaccggtctggttggggataaaaccaatctgcgaagcaaacacaattcccgccagtgccgccatgcagccgttcaacgaaaatgccacaatgcgaatggcttccgtacgaacacccagttgacgagcgccctgtaaattatcgcccgtggcataaaaactgcgtccaaacgccgtctttgccagcagccaggccataaatgccaccagaattatcgtcaaccaaccaatcgcggaaacgccaaacagcagcggtgcggagagctgtttcagttcggcgggtaacccttcaatccatttaccgccagtccacagcaacatgatgcctctgtacaaccctaacgtgccaagggtggcaacaatggcagggatttttagccacgcgaccaggacaccgttgaaaaatcccgcgagcaaaccaagcagtaaagtcgcgacacaagcaacaggtagtgaataccccgcgttcagtaacatccccaacagcactgcgcacattccggtaatcgaacccactgaaacatcaatattgcgcgtaagcattaccagcgtcgcgcccattgccagcaggatcaggatttgcgcgctgctataaaccatggtcagcgtttgcacacttaaatactggcggtcgagaaaaccgggtaatgcaaacagcagcaccaccgccagcagtgccgtgatttcacggttgttctgaataaacttcagcatgacacctcctgacgctgactatcgccgaaggcaacgcgcataatagtctcgacattaatatcgcgcccggtcagtgcagagtgggcaatttcgccctgatgcatcacatacacgcgatctgccatcagttcgatctcttccagatcggaggagataagcagcactgccacattttgtgcggcgatgctgcgcaacagctggtagatatcattacgggccgagacatccacgccgcgcgtcggctcatcgacaatcaatgcttgcggcgaagcttccaggcatttggcaatgaggattttttgctggttgccaccggataatgtccgtgcagcttgttccggttggttaaatttaatattcagcgcccgacgataacgttccagggtggcattatctttcgcggttttcgcccagaatccacgaaggttatgagtaagggcgcagacgttccaggcaagcgaagcatcgagattcagtccggatgactggcgatcttccggcagataaaccagaccgcgcagtaaacgttctccagtggataatttattgatctctttaccattcagcataatacgtccgccacgcaaagtacgcagaccatagagcgtctcggccagttctgtgcgtccggcccccaccagcccagccaggcccagaatttctccggcattgagcgtcatgctgacattcctgaaaccttcgccggtcagattttccagtgtcagcaccggcgttccggcagcatgttgtgggcggttaccaggtaactccagccataatttttggctggcagagagcgatttttcccgtaccgctggggtgatggcctgaataatgtcgtcggtagacagttcgctggttttgccgcttaaggcgatggttccgtcgcgcatcacgctaattcgatcggcaatctggcgaatttccggcagcttatgcgagataaaaacaatacccacgccagtagcaagcagctcttgcaagcgactaaacaagcgttcggtttccgcaggggtaagcgaggcggtaggttcatcgaggatcagaatccgcgagtcgcgcatcagcccgcggaggatttccaccatttggcgatcggcgacatccagcgatcctgccagactatgcagatcaaactggcagcccagcgccgccagcaagttcttcattttttgcatggagagctgtttttttgccatcccaaacaggatgttttcttttatcgacaggcttgggaaaagcagcggttcctggggaacgagataaatgcccagctgatgagcatgaactggcgttaatctggcgtagttgttgcccccaatctccagcgtaccgctatcagcaggggtaataccggcaataatcttcattaacgtcgatttaccggcaccattgccgccgagcagggcgtggacctccccctgatgcaacgtaaaatcgatgcctttcaggacattgacccctgaatactgtttataaaccgagcgggcgcaaagtagcggtaacgcgcgggtatcactcgtttgcatatttcccccgttcagttttgcaggtgagttttgaacaaatgtatttctgcttttaatttgttcataaccttaggtggacattgcacatatttccgacgaatagatcacaatttatgctattttgattttcacggttgcgtttgttcatgctcgtagagtcaaactgtggctgccatcacagatataaatgcgcaagaactgaacaattgcattaaagatttaaatatgttcaaagtgaagaatgaattatgacaatcaacgattcggcaatttcagaacagggaatgtgtgaagaagaacaggtcgcgcggatcgcgtggttttactatcacgacgggctgacccagagcgagatcagcgatcgtctcggcctgacccgtttgaaagtgtcgcgcttgctggagaaagggcatcagtccggcattattcgcgtacagattaattctcgctttgaaggctgtctggaatatgaaactcaattacgtcgtcagttttcgctgcaacatgtccgggtgatccctgggcttgcggatgctgatgtcggcgggcgactggggataggcgcggcgcatatgttgatgagtttacttcaaccacaacagatgctggcgattggttttggcgaggcaaccatgaatacgctgcaacgcttaagtggttttatttcgtcacagcaaattcgcctggtcacgctctccggtggcgtcggttcttatatgacgggtatcgggcagcttaacgcggcgtgcagtgtgaatattattccggctccgttgcgggcatcctccgctgacattgcccgtacgctaaaaaatgaaaattgcgtcaaagatgttctgttagccgcgcaagcagccgatgtggcgattgtcggcattggggccgtcagtcaacaggacgacgcgacgatcattcgctccggttatatcagccagggcgaacagttaatgattggtcgaaaaggggcggttggcgacattttaggctacttttttgatgcaaaaggtgacgttgtcacggatattaaaatacataacgaactgattggcttacctttaagctcgctgaagaccatacccgtccgggttggcgtggcagggggagaaaataaagccgaagcaattgccgctgcaatgaaaggcggttatatcaacgcactggttaccgatcaggacacagcagcggcgattttacgtagttaaatttgcatgaccttattaccgggaatgatggagaacgtatagaggaacagacagaacgcataagccgaggataatctaatggctcgactctttaccccttcagaatcaaagtattacctgatggcgctggatgcaggtaccggaagtattcgggctgtgatattcgacctggaaggcaatcaaatagcagtgggacaggcggagtggcggcacctggcagtaccggacgttcctggttctatggaatttgatctcaacaaaaactggcaactggcgtgtgagtgtatgcgccaggcgctgcacaacgccggcatagccccggagtatatcgctgccgtttcggcatgttcgatgcgtgaaggcattgttttatataataatgaaggagccccgatctgggcctgcgccaatgtggatgccagagcggcacgcgaagttagcgaacttaaagaactgcacaacaatacctttgaaaacgaagtttatcgcgcgaccggacaaacactggctttaagtgccatccccagattactttggctggcgcaccatcgttccgatatttaccgtcaggcatcaaccatcaccatgatcagcgactggctggcctatatgctcagcggcgaactggcggtggatccctctaacgctggcaccacgggacttcttgatctaaccacccgtgactggaaacctgcattgctggatatggctggcctgcgtgccgatattctttctcctgtcaaagaaaccggcacattgctgggcgtggtaagttcacaagcggcggaactctgcggtctgaaggcgggcactccggtggtcgttggaggaggcgacgtgcagcttggttgccttgggttaggcgttgtgcgtccggcacaaaccgcggttcttggcggcacattctggcagcaagttgtaaatttagccgcgccggtgacagacccagaaatgaacgtgcgcgttaatcctcatgttattcctggcatggtacaagctgaatctataagcttttttaccggactcaccatgcgctggttccgcgatgctttctgtgccgaagaaaaactgattgccgaacgtttaggcatcgacacctatacgctgctggaagagatggccagtcgggtgccgcctgggtcgtggggcgtaatgccgatcttctccgacagaatgcgctttaaaacctggtatcacgctgcgccttcctttattaacttgtccattgacccggataaatgtaacaaagcgacattgttccgtgcgctggaagaaaatgcggcgattgtatcagcgtgtaacttgcagcaaattgctgatttctcgaatattcatccttcatcgttagtctttgcaggcggaggttcaaaagggaaattatggagtcaaattctcgctgatgtctcgggattacccgtcaatattccggtggtcaaagaagccactgcattaggatgtgccattgcagctggcgtcggtgccggaattttttcatcaatggcagaaaccggagaacgcctggttcgctgggaacggacgcacacaccagacccggaaaagcatgaactttatcaggattcacgcgataagtggcaggcagtttatcaggatcagctggggctggttgatcatggactgacgacgtcgttatggaaagcgcctgggttatagtttcattgacagccacatcatgatgaccgtggctgttagtttttgagtatagttattcttatttcccttcttttagagctggcttgttaaaagccagcttgcagattcatcgttccatcaccagtactatattcaaggggaaattgctatttttcttaaagcattaagcacaacccttattttatagcgaatattcctaaagacactaatggatgcaaaaggggtttaataaacttcgatttttagcaattagtgctattctttgttaaatatgatgatgataattttcctattgaaagaaacagttttcttattaatcaacaataactcatagttcatttttaaataaaataagaactatgcattttttaatctatcaattcgaaagtattagcaaattagccaaattgacaccttcccacctccaactaacactcaatacagacctctgacaatttaataagtttcatttttaatgtctgacgactcatctctttcgtggctgtattgtttgtatatggagcgtttatatgaatagaatctatcgcgtgatatggaattgcactctacaggcatttcaggcctgctcggaattaactcgcagggcaggtaaaacatcgacggttaatttgcgtaaatcctctggactgacaacgaaattcagtagattgacgctgggtgttttgctggcactaagcggttcagcgtctggtgcaagtctggaagttgataatgatcagattaccaatattgatactgatgttgcttatgatgcctacctggttggctggtatggcactggagtgcttaatattttggctggcggtaatgcctccttaaccactattactaccagcgtcattggcgctaatgaggactcagagggcaccgttaatgttttgggtggcacctggcgattgtatgatagcggaaataatgcaaggcctttaaatgtgggtcaatccggaacggggacgctgaatattaaacagaaaggtcacgttgatggaggctatttaagactaggttcctcgacaggaggcgtcgggacggtcaatgttgagggagaggactctgttctgacgaccgaattattcgaaatagggagttacggtacgggctcattaaatattacggataagggttacgtcacgagttcaatagtcgccattttaggctatcaggcgggcagtaatggccaggttgtcgttgaaaagggcggtgagtggctaataaaaaataacgattcctcaattgaatttcaaattggtaatcaaggaacgggggaagcgactattcgcgagggtggactgattacggctgaaaacacgattatcggtggcaatgctaccggtatcggaaccctgaatgtgcaggatcaagactctgtcatcacggtacgcagactctataatggatatttcggtaatggcacactcaatatttccaataatggactaattaataacaaagaatattcattagtgggcgttcaggacggttcccacggtgtcgtcaacgtgaccgataaagggcattggaatttcctcggaacgggcgaagctttccgctatatctatatcggtgatgctggcgacggtgaacttaatgtctcgcgtgaaggtaaagtagattcgggaattatcactgcggggatgaaagaaacaggcacaggcaacattactgttaaggataagaactccgttatcactaatctcggaactaatcttggttatgacggccacggcgaaatgaatatcagtaatgaagggcttgttgtcagcaacggaggaagctcactcggttatggagaaaccggcgtcgggaatgtcagcatcaccacgggggggatgtgggaggtcaataagaatgtctataccaccattggtgttgcgggcgtcggaaacctcaatattagcgatggcggtaagttcgtatcgcaaaatattacttttttgggcgataaagcaagcggtatcggcacactgaacctgatggatgcgacatcatcgttcgatactgtgggtatcaatgtcggtaattttggtagcggtatcgtaaatgtcagtaatggtgccacccttaattcaacgggctatggatttatcggaggaaatgcctccggtaaggggatagttaatatttcaacggacagtctctggaatttaaagacatcatctactaacgcacaattgctacaggtcggtgtattaggcaagggtgaactgaatattaccaccggaggtatagttaaagcgcgtgatacacagatagctctcaatgacaaaagtaagggcgacgtgagggtggatgggcagaactctcttcttgaaacattcaatatgtacgtagggacatctggtacgggtacgttaaccctgacgaatagcggcacgctgaatgtcgaaggtggagaagtttacttaggtgtttttgaacctgctgtaggaacgctaaacattggtgcagctcacggtgaggcggcggcagatgccgggtatataaccaacgcgacgaaagtagagtttggttctggcgaaggtgtttttgtctttaatcatactaataacagtgatgccggctaccaggtcgatatgctgattacaggtgacgataaagacggaaaagtgatccatgatgcaggccatacggtgttcaatgcagggaatacttatagcggtaaaacgctggtcaatgacggcctcctgaccattgcgtctcatacggcagatggggtaacgggcatgggttcgagtgaagtcaccattgcaagccccggtacgctcgacattctcgcatcaacgaacagtgcaggagattacacgctgaccaatgcgctcaaaggcgatggtttgatgcgagtgcagctgtcatcctccgacaagatgtttggctttacccatgcaacagggactgaattcgccggtgttgcccaactgaaagacagtaccttcactctggaacgcgacaacaccgctgcgcttactcacgcgatgttgcagtctgacagtgaaaataccacatcggtaaaagtgggagagcaatccattggtggactggccatgaatggcggtacgctcattttcgatacggatattcctgctgcgacgcttgcagagggatatatcagcgtcgatacgctggttgtcggcgcgggtgactacacctggaaaggccgtaactatcaggtaaacgggacgggcgacgtgcttatcgacgtgcctaaaccgtggaatgatcccatggcgaataaccctctgacgacgctcaatttgctggaacacgacgatagccatgtcggcgttcaactggtgaaggcgcaaacggttattgggtcgggtggctcattaacgttacgtgatttacagggcgacgaggtggaagcggacaaaacgttacacattgcgcaaaacggaacggtggtcgccgagggtgattatggattccgcctcacgaccgcaccaggtgatggtttgtacgttaactatgggctgaaagcgctgaacatccatggtgggcaaaagctgacgttagccgaacatggcggagcctatggcgcaacggccgatatgtcggcaaaaatcggtggtgaaggggatctggcaatcaatacggtgcgacaggtttcgctttccaacggtcagaacgactatcagggggcaacctacgttcagatggggacattacgtaccgatgcggatggtgcacttggcaacacccgggaactgaacatcagcaacgcggccatcgtcgatcttaatggatcgacgcagacggtagagacattcaccgggcagatgggttcgactgttttgttcaaagagggggcgctgacggtaaataaaggtgggatcagtcagggtgaactgacaggtggcggaaacctgaatgttacagggggaacgctggctatcgaggggcttaatgcacgctacaatgcgttaaccagcattagcccaaatgcggaagtcagcctcgataatactcaggggttaggcagaggaaatattgccaatgacggtctgttaacgctaaaaaacgtgactggcgaactgcgtaatagcataagcgggaagggtatcgtgagcgcaaccgccaggacagatgtagagctggatggcgataatagccgctttgtggggcaattcaacattgatacaggcagcgcgctcagcgtcaacgagcagaaaaacctgggtgatgcttccgttatcaataatggcctgctcaccatctccactgagcgtagctgggcgatgacgcacagtatcagcggtagcggtgatgtgacaaaactgggtaccgggatcctgactcttaacaacgattccgcggcgtatcagggtacgacggatatcgtggggggggaaattgctttcggttccgactctgccattaatatggcaagtcaacacattaatatccataacagcggtgtgatgtcgggaaatgtcaccactgcaggtgatgtgaacgttatgcctggggggacactgcgtgtcgctaaaaccacaatcggcggcaacctggagaatggcggcacggttcaaatgaatagcgaaggggggaaaccggggaatgtactgaccgttaacggcaactataccggaaacaatggcctgatgacgttcaacgcgacgctgggcggcgataattcgcccaccgataaaatgaacgtgaaaggcgatacccaagggaacactcgcgttcgggttgataacattggcggcgtcggtgcacaaacggtcaacggtattgaactcattgaggttggcggtaattctgcaggtaacttcgcgctgaccaccggaactgtcgaagctggggcttacgtctacacgctggctaaagggaaggggaatgacgagaaaaactggtatctgaccagtaaatgggacggcgtaacgccaccggatacgcccgaccccatcaataatccccctgttgtggatccggaaggcccatcagtttatcgcccggaggccggaagctatatcagcaacattgccgcagccaactcgctgtttagccatcgtttacacgaccgtctgggtgagccgcagtatatagattcactgcattctcaggggtcggcaagcagtatgtggatgcgtcatgtcggagggcacgaacgttcaagggccggtgacggtcagctaaatactcaggctaaccgctatgtattgcagctaggcggcgatttggcgcagtggagtagcaacgcgcaggatcgctggcatcttggcgtgatggcaggttacgctaatcagcacagtaatactcagagtaatcgtatgggttataaatcggatgggcgcatcagcggttacagcgctgggctgtacgcgacctggtatcagaacgatgcgaataagaccggcgcttatgttgacagctgggcgctgtataactggtttgataacagcgtcagttccgataaccgttctgctgacgactatgattctcgcggtgtgacggtctctgttgagggtgggtatacctttgaagcgggaacatttagcggcagcgaagagacgctgaatacctggtacgtccagccacaggcgcaaatcacctggatgggtgtgaaagattccgaccatacccggaaagacggaacgcgcattgaaacggaaggcgacggaaatgtgcaaacgcgacttggggtgaaaacctacctgaacagccatcaccagcgtgacgatggtaaacagcgtgagttccagccttacattgaagcgaattggatcaacaacagcaaagtctacgccgtgaagatgaatggtcaaaccgtaggccgtgaaggtgcgcgtaatctcggtgaagtacgtaccggggttgaggcgaaagtaaataacaaccttagcctgtgggggaatgtcggtgtgcaactaggtgataaaggctatagcgatactcagggcatgctgggagtgaaatatagctggtaaaccgtataagccgcatgtcgagatggcatgcggcttaatattgccgacttcaaaggctttaaagcctcccttttatccgcgatcgcggatatcgcagcgtttatcccgtagagcggataagacgtgtttccaaattgacttatcctcactaaaggataaaactgataatatcctcttatgcggataaatttgctgtggacgtatgacatgatgagctttcagaagatctatagcccaacgcaattggcgaatgcaatgaaactggttcgccagcaaaatggctggacgcagagcgagctggcgaaaaaaattggcattaagcaggcgacaatttccaatttcgaaaacaaccctgacaataccacgctcacgacattttttaagattttacagtcgcttgaactctcaatgacactatgcgacacgaaaaatgcctcgccagaatcaacagaacagcaagatctggagtggtaatgcctaaacttgtcacttggatgaacaaccagcgggtaggcgagttaacgaagttagccaacggcgcgcacacctttaagtatgcaccggagtggttagccagccgttatgccagaccgttgtcactttcgctgccattgcagagggggaatatcacctcagatgccgtatttaacttcttcgataacctgttacccgatagcccgattgtacgtgaccggatcgttaaacgttatcatgctaaatccagacaaccgtttgatttattgtcagaaatagggcgagacagcgttggtgccgtaacgttattacccgaaaatgaaaccataacgcgcccgataatggcatgggaaaagcttactgaagccaggcttgaagaagtattaacggcttataaagcagatatccctctgggcatgattagagaagaaaatgactttcgcatctcggttgctggcgcgcaggagaagacagcgctgcttagaataggcaatgactggtgcattccgaaaggaataacgccgacgacgcacatcattaaattaccgattggcgaaatcaggcagcccaatgcgacgctcgatctcagccaaagcgttgataatgagtattactgtctgctgctggcgaaagaacttgggttgaatgttccggacgcagaaatcattaaagcgggaagggtgcgcgcgttagcggtcgaacgttttgacaggcgttggaatactgagcgaacggttttacttcgcttgccacaggaggatatgtgtcagacattcggtttaccttcatctgtgaaatatgaatcagatggaggcccaggcatcgcgcggatcatggcgtttttgatggggtccagcgaggcgcttcgcgatcgttatgattttatgaaattccaggtcttccagtggttgattggcgcaacggatggccatgcaaaaaacttctccgtatttattcaggctggcggcagttatcgactcacgccattttacgacatcatttcagcatttccggtccttggcggtacgggaatacacatcagcgatctcaaactggcaatggggcttaacgcatccaaaggcaaaaaaacggcaatcgataaaatttatccgcgacattttttggcgacagcaaaggtgctgagattcccggaagtgcagatgcatgaaatcctaagtgactttgccagaatgattccggcagcactggataacgtgaagacttcattaccgacagattttccggagaacgtggtgacggcagttgaaaccaatgtgttgaggttgcatggacggttaagccgagaatacggtagtaagtgagatatggggtttggtcgttgttaatgagcacgacaatcatgaccgccaacgactggattcttccttggtttatactggtgcgcataatgtatattatgttaaatcacctactgtggtaaataagttcatatgacactcccactaactgataaatcaatacgttaggatttctgatctccctctcgtttcttgcattaggtacagagtacattctcttcatatccatgataattttgaggtaaatattgtgtattcactaaagcagttggttatctcaggccgtaaaaggcgatggatcctgatggacttggaaacctctctgccgttgctgtatccccttaggtaccatattgaccatttggctttccgctcattgtccacacagtcagcttcacttcaatctgtgaagtttttttacgaattctggaggcaaaagtatggtgtctcgttttgctacagcttctattcatctgaccacaatccagacattgctgtcggtgaaatgcccgcattttggatgtatctagaaaatggccacaacgtccagtcaaatgtgttgtctttaacgagagtcacaaaagccaatagcttaactcatacagttagagttcgtgctgtgatccatttcatttcttttttgattaacacctacatatcacctgcataccgggatgactctcccaaagcattatcacttttggcttcgcgtttacacacccgtttacagctttgccgggagaattatcgaacgcttacatcaaacaaattttcgcaacatagtcacagcagccaaggatttcagagtttgtctggggcaatggtgctcagcctgtatggaataataaccccctcttctgcccaaaagcataacccgctaaatcctttcccttccgggcatcttcagttccgcaattttttgattattcgtctgttgttaaattatggtttacgaacaggtgagctattgttgttagagtgcagctcaattaaacctaatttaaaaggtgataagtttagtttgattgtgacaactgtcgacgaggcatacgaaccaagaaagaatgcgccatctctcaaaaatgcatgggctaatcgtgtgttggagctcgataagcaggattatatttttttaagcatttatatagcaaagcttcgaccaaaaactgataaacacgatttcatctttacatcgagtcaacagtcagcgaagcctttgtcctacacatcagttcattctattttttcgaaaatagatcaggtcttcactaaccaatatccagagtacaaatcaccgttgtactctgactcgttgcaacgattgactccgcatacaacccgacatacttgggcctttttgacattgcaaaaaatatggcatttaaaatatttgaaaagccagcaaaataaaacacactttattgctgaagttccttccctctcagggataatggaagaagccaaagatgaactacgactgatggggggatggagtccgacaagtcaaatgcctgatctatatgcaaaacgtttcctgtctgagcaggctaatgctgccaatgtccaacgaattattcaagacaatgcagcgctacataatacgttagatactataatggatagatataacgatgacatcatttgataatgcattaaaatctgacgaagggaactcagtttaccctcctgatttagctaaggctatctttgaactcgatattcctgatcgaatttatctaaaaacggcaatggagtttgatgataaatatattattaacaaaggaaataaatggaccttcgattattcaggcagtcggcgatatcttgttttcaatcaagattatatctcaaataaattaaacaagtatatctgtttcaaatatgcatcgacgagatttccaaccaaacttccagcgttgcaccttgattggaggaatatcatttcatattgtcgagaacatggtgggttttcgcttagtacgctccgattatttatcgaaaaagaggatattgataatgctactttttattccgtgttattcggattaaaaatactttgtgctgaaacattcccaggtttcaatcttgaagattacgatgatcttgagttcgtccctcgaccgtatctcgaacattggggggtttaccaagaaatcgataatattcttgaccctcttgaaaaaaacatgatttgcaatggactgtttgaaatggcttcgttgttacgcgatggcaaaagtttcagtcacagcgaagtgcgcaatgcagctatccttgggttggcttatgtaacgggtgcacgcccagtacaactcgctaggctggcggtcaaagatgttcgtatcgatacacgaaatcaggaatctggtctgattcgatacagtgtttttttaccatatgctaaacaaagacgagtgacgacagagcggttatttctggcgatccccccagaaattggggagttaattatgaactataccgtgagatataagaaaaaccccgaagataaactattcgatttcagcgtttcagctccgcattatgtgtctcaggcaattaatcaggcaatcctaaatttctgtcctcctgaatatcaagccgccgtagcatgtggcgaagctgcattgcccacaattacacccactgatttacgccacaatgttgggcactctttggcgatgcaaggtgctagcgctgaagagatagcacatgtactggggcacacctctcttgccgtagctaaatactacattatggcaactcccgcgttggccttgatccgtgctaaagcgcttgggtcgaatcccgtttggcaaaatatggtggctatgatgctcactggggaactggtcgactcagcacattggaaaggccatccagtggtgggactcgttggtgacgagttgcatgataaaattggtggttgctccaggaacagtagtacatgccctttcagcgaagtgcgttcttgttacggctgtctgtattatcgcccttttacggatggtgaacatcaggctctacttgaatgcgtcaaaaaagaagtcgatgaactaatcgctatttcagacggtgtaggtaattcccgaaatccgctcattttaatccatgaaaccacacagtttgaaattgagtctgttatcgcccgctgccgttttcatcaggaacaggtgaagtccaatgaaaaatcactttgagcattttcaggcttttattgaagagcaaaaaaaatggttcgaacagcacctgtctgctgattttgcccaaacatggaatgatcatatctgggtaagtggtaaccagggaagtggatggttgcgagggaacggcagaaatacattacgttttgatgagatgaacagattcaaaggtattgtagaacatctgcccatcgacaaagaatatagtcagttcatgaaagctatgctggtagtggtttaccgacagggaaataggagtatgtcgccagcggtggcaaaggcaactttgatgattctgaaacgatggtaccatgcgatgctttatgagacaggacagacccatccatcttacctgagcacagttgtcattcaacgagcgatggatcttctcagtagcgtttcatctcctagtgaccccaatacagctaactataaagggcggtgcgttagccttcaaaaattggtcaatcacttcacatttacgttggttaaactgcaatacaactctgatgtgaagtataccaacaaaaccaacttgacccgcaaagcccgggaaaccatggcgctgaaacagcaggccaagctgtctgataccactaccgatggtgaagatgcgttgattaccattcgcggatttctgaacatagttgcattaatccagcgggtggaaagtgatgctgagaaaatcgcgttaaattgcctgttgttattggttattaccggctttcgctccattgaagcgtttaatctcagacaggatgccctgtttaaacgccagattgatgatccggcaatctgcaaacgatttcaggacaagggattacccgattattttcttggtatccgttatgttggtgtcaaaggtgctggggagcgaacgcattgggtagaaccgctggcagtaccgctggtcgagagtatattcagtaccgttaaaatgttgaccgcaccaatacgcagccatcttacctatctacgggcaaaatcttttgctgattacctgccacaggccatcagcaacatgcccggtgaacgagtcgaactggacgatgtggtgaagtacatcacccaaactacctcaagttttcggggccgggcaggacaacgggacaaaacatccaaagcccttagcaaaagaggtgtgctgcccgttcaagaaataccaggcccgaaaaacagcaaatctatctattattccaagactgctctcaatcattacattaagaccgaatttggcctggcgaatgccaacgaaccctgtacacacgcctggatggaaaatggcaaacgctaccaagttaactacgaggatctgctatttctacacgagaagggttcgctggcattaaagcgcacactggctttgctggctacaccgatacccttcactaacacacttatgaataaattcttaggcaacgttgagcctgatggatcagtattcagcaaatatcaattactggaggaggatggcacctcgacgcggatgcgtacccacattccccggcacaacatcaatacctttcttgctattgcggatatctctgaccacttacaggcaatgttgatgggtcgagtggacatcacgcagaatcagcattatcaacatctggcgcttgcagaacggcgaaaagccgcctcgttggtgcccttgcagccgatttcgacagcactaactgtctcgccctcttcgtcctccattgctacgccactggatatcgtcaaacggaccggccaactggcggtcacggaacacatgactttggacaataccatcaaagccaacctgcatacttttgacgatcgggatgatgtagccaggtttgtcgaggcgtcatttgctaacggcctctttgaagatgttgctgccgcctttgaagaaatccgcgacgcagaaggaccagagcaagcctctgacatggtggcaagacatgccgtgctgtatccgctgaaatttggctcctgtatgcgggaagttaacctctggggatgtccttatcgactgaaatgccagagtgctgccttttgtgaacatttcacgctgacaggccggatagatgagctaccaaatctgattgccaaaaaacaggctttacagcaagcacattcgaagttgacccaacttactcaacatcagcctgattaccagaccagactggccgacatcgaacgacggttacagcaactcgaggcaatacaagcacaatggcatcgtcgtgccaagactcaacaactggttgctgctgagagtgtgttgtctggtggagtaatcaccgagggcaaagtccgtacactggcccagctttttgcacttgaataccaacaattgatgcaggagaatgattgatgcgcggcaaggaactgaacacactgattgagcacgaattacaactgatgctggttgaaggctttgacaagtcccctatttccgccaaggccctgcatattaggctcaaggcaaaaggtatcgttaacggtggtttaagtacgctgagcagcctagagcgtaaacgcctaattgctgcctatgttgaccagcaacttggcccattgaatctacgcccaaaagaaaaacagcaatacgtcaaccgcaaaacccgtcaggctttgctggccagaaaccagcagttgcaggctgaagtaagtgaattgcgagaccaattagcgcaaaataccctttcgttgatagaaattgtcaaagcggtaaaaatcaattcggttataccggtggaaagcctgttggccaaccatatgattcgggaactacataagtcgtcataattctgacatggaagatttagccgacagcttcccggttgtcggcagaatgctggttgtattgataaacatatatttatggctccctcttttgagtttgttatctgagagggcgtctcccactgtaatgtcctgcttggttcattgcatcagtgtaatgctacactttcgttaccttcaaaaagttcagtcgctttatatgtaatatcattttttgtcagcatgcttttcgcctggatgccttttgagtgcttcgataaaattacttcgctcttcctctgtcatccgggatatgagttgacctgctccccgttgattagtacaccccgatgttagtaatgtcttcataagccacatgaggacatccccatgaagaagcgtttttccgacgaacagatcatcagtattctccgcgaagccgaagctggggtacccgcccgtgaactctgccgcaagcatgccatttccgatgccacgttttacatctggcgtaagaagtatggcggtatggaggtgcctgaagttaagcgcctgaagtcgcttgaggaagagaacgccagactcaagaagctgcttgccgaagccatgctggataaagaggcgcttcaggtggctcttgggcgaaagtactgacgacagaccagaagcgggaagccgtgatgttgatgtgtgatgcgaccggtctgtcgcaacgtcgtgcctgcaggcttacaggtttatccctgtcgacctgccgctatgaggctcaccgtccggctgctgatgcgcatttatcagggcgcatcactgagctggcactggagcgcaggcgttttggctaccgtcgtatttggcagttgctgcgccgtgaagggcttcatgttaatcataagcgcgtgtaccggctttatcacctcagtggcctgggcgtaaaacgcagaagacgtcgtaaagggctggcaacagaacgtctgccgctgctccgtccggcggcgcccaatctgacctggtcgatggatttcgtcatggacgcactttccaccggtcgcaggatcaagtgccttacctgcgtcgatgatttcacaaaggaatgcctgacggtcactgttgcctttgggatttcaggcgttcaggtcacgcgtattctggacagcattgcactgtttcgaggctatccggcgacgataagaactgaccaggggccggagttcacttgccgtgcactggatcaatgggcctttgagcatggtgttgagttgcgcttaatccagccgggcaagccaacgcagaacggatttattgagagctttaacggacgatttcgcgatgaatgtttgaatgagcactggttcagcgatatcgttcatgctagggaaggtgcgaacaagttcctgatatgagatcatcatattcatccggagcgcatcccagagggacatcatgagccatcaactcaccttcgccgatagtgaattcagcactaagcgccgtcagacccgaaaagagattttcctctcccgcatggagcagattctgccatggcagaatatgaccgctgtcatcgagccgttttatcccaaggcgggcaatggccgacggccctatccgctggagaccatgctgcgtattcactgcatgcagcattggtacaacctgagcgacggtgccatggaagatgccctgtacgaaatcgcctccatgcgcctgtttgcccgattatccctggatagcgccctgccggatcgcaccaccatcatgaatttccgccacctgctcgagcagcatcaactggcccgtcaattgttcaagaccatcaatcgctggctggccgaagcaggcgtcatgatgacccaaggcactttggtggatgccaccatcattgaggcacccagctctaccaagaacaaagagcagcaacgcgatccggagatgcatcagaccaagaaaggcaatcagtggcactttggcatgaaggcccacattggtgtcgatgccaagagtggcctgacccacagcctggtcaccaccgcggccaacgagcatgacctcaatcagctgggtaatctgcttcatggagaggagcaatttgtctcagccgatgccggctaccaaggagcgccacagcgcgaggagctggccgaggtggatgtggactggctgatcgccgagcgtcccggcaaggtaaaaaccttgaagcagcatccgcgcaagaacaaaacggccatcaacatcgaatacatgaaagccagcatccgtgccagggtggagcacccgtttcgcatcatcaagcggcagttcggcttcgtgaaagccagatacaaggggctgctgaaaaacgataaccaactggcgatgttattcaccctggccaacctgtttcgggtggaccaaatgatacgtcagtgggagagatctcagtaaaaaccggaaataacgccagaaatggtggaaaaaatagcctaaataggctgattcgatgtgtttgcgggaaaaaaatcggcccagatccgcgaaattttaatcaacgagtcagcttgggaagaaatgacctgcttattcgcaccttccttagccatcaccggcaattcatggaacggtaagtaacaaactacagatcagccaacagcatcccggccatcccgtccaggcgtttttttaccttttcccatccgggcataacctgccccattagccgataaaattcctcgctgtgattgtgctcagcgacgtgacataactcgtgcagcaatacatagtcgatgcattctgaggtcgcttttaccagccatgggttaagtgtcaggcaaccttttgcagagcaatttccccattgtgtttgcatggctcgcaaacggatcggcggacgctcacttacccataaggtttgcggtaccaataaatccagtctgcgttgaaaaacatctctggcacgttcccgataccactcagtaagcaacgccttcacgcgttccgcagatttttgtctgactgtgacttccagacgtccccgcagcatttttactcgctgcggaacagtagcgtcttcagtgactttcaactggtattgcttaccaagatagtaatggctttcgccactcacgtactggcgcgggacgatatgcgtctgttgttctctgaaatcgcgcagttgctggtatatccagcgccctcgttttttcagcgcagacagcacttcctgctccggcgttccgggtggtacagatgcgactacccggcagtccggatgaaccttgataagtatcctgcctttaacaaccttccgtgggacacactgaaccacgatggtttcatcaccataaacaaaacgtacagcattcatagatagtgactttttctcactcatgatttcatcaaaccaacgcgcaggatctggatgatggtttcaacgatacggtttacctggttcattccagcaccgatctctcgacaggcagtaaacagccgcggcaacaggcttgtcttaacggctttctcaatatcctgaggattgagggaattttccgcaaccgctttgacaataatagtgtccacttcgaaagccagcttcgtccatttatgctgaacctgatcatcgtttaccgcgaaaacctcaggtagctcttttttaaatactccgtagtatgcttgcgcatgtttgtttacggccagcgcatccgggatgtcgctgagtttgcgggcttccacctgcgcctcaaactcgcggaaaaggagatattgcttcagcggatggtcgaacagtttttcagtctcttcaataaccatacgcaggagttttgagaatgcctcctgagcatagggatcgtcgcacagttcatgttcaatcatcttcgtgacgcgggttttaatgatgtcggtctcattgcgggttttgttgttatcccactcttccggcttttcagttttacccatcttgcccacttcatatacgccatccggttcacgaaccgcgacaccagtaacatgcttatccagcagttttttcacctgttcagcgtagtcgtcataattgacctgctcaccactgacctgcatcgcccactggcgcaggctggacatctgttttacggtttctttatagagatttcggtcttgttccgtaaagctcttgtcggtgaagaaggtggcggactgcagcgctactttcaggcatccagcaaaagcggttaacgcttcaaagaagtcatcgcgagttttctgatgaatatccagcatctctccgtcacgttcttccattttaggcaccagtactgcacgtaactgctcagtatcatttttgtttttaacaccggcaaatatggcccacaactggttatacagatgcggcagacgtttatattcagaactcatggcgctgtacaacccgtcaatatccttgatgtcgtatcctccctgagttcgggaggcgagatcctgatatttaccgatcgtcgtgtccagttcagccagaatgccgcgataatcaatcagcaggccaaactttttcagtggatgcagtcggtttacccgggcaatagcctgaataagattatgggatttaagcggtttgtcgatatacagcacggtattcttcggttcatcaaacccggtgagcagtttatcgacgacaatcagcaatttaagcttatcatcggtatcgaaacgactgatgatatcgcgggtgtatgcggattcatcctgcgtaccgacattatccttccaccatttcgttacttccggcagcttactttcatccacctcggtattcccttcccgggtatccggggggcttatcaccaccgctgattcaaacaaaccggcttcatcaagatactttttatatttaatggcagagattttgctgtcgcaggcaagttgtcctttcagaccctcatcaatatttttcgagaagtgtgtggcgatatccagcgcaatcaggcgaatacggtcatctgcgctgtaaacctcacctttacgggcatacttacgcttgaggtcagccttttgcgcatcgctcagaccatcggtaatgcggtcaaaccaggcgtcaatcgcgcggtcattcacctcaagatccggaatacgttcttcatagagaagcggtgtaacggcctgatcttccaccgcccgttgcatggtataagcatggacgatcgggccaaatttattggtggttttatcttttttcagcagcggcgtgccggtgaatgccacaaaggcggcattcggcagcgccagtttcatccgcacatggttttcgccaccctgactgcggtgcccttcatcaatcaggacgataatatcggggctggtattaacgcattcaggcagttttgtcgctgagttaaatttctgtatcagggtgaagataatacgttctttgccggagccgatctgtttcgccagcatctgcccggacgtcgccattgcattagctttgtcttttttcccggccaattctccgccggacgcaaaggtaccgctgagctgttcctcaagatctatgcgatctgtcaccaccacgatacggcactgcttcaggctgtcatgtagaatcagcgccttactgagaaacaccatggtgtaagatttgccggaacccgtggtatgccagatgacaccaccttccctgccgccgtctggtctgcgggtactgatgcgttccagcagtcttttaataccgaatacctgctgatagcgggcgacaattttgccgttctttttgtcgaacagggtaaagaagcgggtcatctccaacagacgctctggcgacaacagactgatcagcagtttgtcctgcccgctgagggccagttcaccggcagcaattaactgctgataccagttgcgatcggcaggcgggcgatgggcaaacaacgcatcaatttgctcagtagatagcggatgattgcggatggcgtacatctgcgcatcggtaatatcttcttcacgccatgctgcccagaatttcatcggcgtatgacaagtgccatagcgtccgtcatgcccgttaatagacagcagcaactggctgtaggcaaacagttgtgggatttcatcgttgagctgattgcggatactctgtgatatcccctcgtcaatggttggcccctttttaccgtggccgaccgggcttttcgcctcgataaccgccagcgggataccattcacaaaacagacgatatccggtctgcgggtttcaacaccacctgagcgcagcaccgagaactcctcggcaaagtggaactggttattttgcgggtgttcccagtcaatcagcgcaatggtggggttcactttcttgccgtcgacaaactccgtgacggcgataccgtagagcagatgattatacatccgttcattggctttcagcagcccttcgttcagcgccggggaacagacctgcgatagcaggttatccaacgctttttccgataagcggcaggttttaccgcccgccataaaggaacgcttcgacaacacttcacgcagaatcgggcgtagcaccacctcatcctgtttatagccccggtaatccataatctgtttcggggataaaaacgtccagccgaggctggtcagtaacgtcagcgccgggattttggcgctgtattcttcctggaattttggtgtgtacgactgattcatgagcgttccttgttcgcctgttatgcgctaacggtttcttcaacttctgttttgacacggcgtttcccggtcagtaactgctgcatcagggcttttttctcatctttcaggcaagcgagttttttctccagcacggagatttcggcgtcggctgcggacagaacggcagcgattttttgctgttcttctatttttggaatactgaagtgagcataatttatgccaccaactgataagccaaatcttgttgcgcccgttgctaaggtgaagaagtagtagcgagttttctgcatagaaaaaagataattcaagaatgaaccaacaacaattttatttttcgggcgaattattgcgaggtggtaaccgcaaactacaccatttaaatcttctgaaaccaaagcagggatagcgatatcgcctggcgtttcagaatctttggttataattacatcaccttttttaagtgtatatttttcaatttcattcttagtagcagtagccttcatgaaattaatgttattggtaatatagttattgtaataaacatctgtataattgcagagttctacaggaatttcattggcctcagtttttttatcaacagggcttacaatcacctcggccataacctttaatggaaactgttcccactccccactaaacctcaccccattctcatccagcaagcgtttcttcccggtaactaattgctgcatcagggcttttttctgctgctgactattggcgagcagcttttccgtcaccgaaatcgccttatcccaggttgacaggattttaacgattctcttttgttcagacagtggggggatattaaatggccacttaaaccaactatctaacttaaaaatcattttctctatgtgcacaccaatgctagagtggaagcaggtttgctggaaatatagagactccgatagaaattccatataaggaagataaaaaccggacttccctgtaagcacacaatattcattcgatacaattgagccagaaagttctttaggtacaagaccgcaagcaccgtgcacaatttgtcgttttgatatgagaaagtcgccttctttaatatagaattgactttttacggagatatcttttcctttaagatgctcacgtcttattacgccacctctggagcgctttactgtaactaagtcatactcttgattatcttgtatatatgcctttcttgcctctatatttaagcacttttctaatgataacttttgccatcctgtaggtagcattccaaggatcggttttccagctttaacgctcactgggtaaagcgaatcacgagccataacccaactccttcaaatatccagccatctccgtttccagcttcgccaattccgccttcagttgctcgcgttctgctcgcaccgccagcaggtcaatctcatcctcttcttcaaaggtatcgacatagcgcgggatattgaggttatagtcgttgtcctgaatctctttcaggctggcgagataggcgtatttctccacgttatcgccatcacggtaggtcttgacgattttcttaatgttttcttcgctaagctggttctggtttttacctgccttgaattcacggctggcatcgataaacagcaccttgtcatcaactttctgctttttgaaaatcagaatcgcagccggaatccccgtaccgtagaacagtttttccggcaggccaattaccgcatccagcaaattttcgtcgatcagtttctggcgaattttaccttcgctggagccacggaaaagcacaccgtgtggcacaactacgcccatacggccagttcccggtttcagggtttcgatcatatgcgagataaaagcgtaatctcctttagtcttcggcggtacaccgcgacgaaaacggccaaacttatcgttctcggcctcgtcatggccccacttatcgaggctgaacggtgggttagcggtcacgatatcaaacagcatcaggtcgccatttttatcgagcagcttcgggttacgaatggtatcgccccactcgattttatggttgtcttccccgtgcaggaacatattcattttcgccagcgaccacgtagaaccgatcgcttcctgaccgaacaatgcatagttacgactatcatgcccggagacaattttacgcccacacttcatcaataatgaaccggaaccacaggctggatcgcagatggtatcacccggttgcggatcgagcagttctgcaatcaggtccgaaacttccggcggggtatagaattccccggctttctgcccaccgctggcagcaaagtttttgatcagatattcgtaggcattaccgataacgtccagcgtaccgacacggctcggcttcaggttaagatcttgaccggcaaagtcttccagcagctgacgcaggatggtgttcttctgtttttcttcacctaggcgatcggtgttaaacgaaatatcctggaacacgcttttcccggcgtctttcagtttggtgccattagcttcttcaatcgcatgcagagcctgatcgatacgctcaccgttacccggctcatggcggcgttcgtacagcgcataaaagctggcactttttggcagtacaaaacgctcgttggccatcatggcttcaatgagttctggtgcatcaccatactgttttttatattcatcgtaatgatcctgccagacatccgaaatgtacttaaggaacagcatggtaaggataaagtctttataggtatcggcactgatggtgccacggaaggtatcgcacgcggcccacagggctttgttgatagtgtcctgattgattttgtcgttcatgaatcatcctgctatgaagaaaaccttacgatgtgttgtattcatcgtagaaaatttggtgcagataataccttaaggtgcgtcttcaggcacgtcaaagccgcatcgtgcgaagtggatttttcctgaggggaataggactctttttgcccgtaatgtggtggactggtcgatgaaacaaacactaacgcgcggcttggtactggattgacctactccccgtgatatcaatacaccctaccccagtgacggtaaaacgcattttacaaccttttattacattgggaatggtccatgaactgaagcagattaagctgtcaggaaatactcataagaggtgcatttcctgttagttcatgaagttctcttgaagtgatttcatctttctattaaaaatatcttttaaagcaatgagatatgtaccatatggtttatgaactgaactctcgcacaacataagttaaatcatgtctgagtgatgcgaagtgcttttctggtagtcgttattcgttcagggttcaagaacttaagcctctcctctttcataattggcctgtgcatggagaaatagcctggttattccctgccccatgctaagagcgcagtgtctgtcgcatagacactgcatacgaaaacaccagagggtgctgttacttatttaaggacggatcaagcgggaatgagtccactccggtatcagaaatggctacgtctcaatgaagtcaggcgaccgatgctgaatgaacattacgatgtcaccacagcagcctatgctgtcggttacgaaagctatcccatttcagtcgggaatattcgcggatgtttggagagtcacccaagagagatattaccaggttaagaaagtctgtcggtcagctttaataaaccctgcacttatctgtttagagcaattcggtgttagtttcagcaagcaaacattaaccatagctaatgatttatagccatattaaccattggtagcccttgacctttcctgacacttcccttgttcgcaataatattctgtttagtcacggtttataaataacatgcataatgaaatcgtcatgttatttagcgacataaaatgtttttgcaaatactctcttcaacaagtgcacaataaacttgttgtgattaggtgtccttgtgatttaaagatattatcgttcttcgtgaaatgtaataaccctggaaactatattctcagggcaacaaccaatcaagaatgattcttgtttttaagcaataacagaatgacttaattgttaaccctctttattcagctacttaaatataaattttggagaattatgaaactcaaacatgttggtatgattgtcgtttctgtgttggcgatgtcgtctgctgcggtaagcgcagccgagggtgatgaatcagtaacgaccactgttaatggcggtgttattcattttaaaggtgaagtggtaaatgccgcttgtgcaattgattcagaatcaatgaaccaaacggttgagctgggtcaggttcgttcttctcgcctggctaaagcgggtgacctcagctccgccgttggcttcaatatcaagctgaatgattgtgataccaatgtttccagtaatgcagctgttgcattcctgggtactactgtcaccagtaatgacgatacgttagcgctgcagagttcagcggcaggctctgcccaaaatgtcggtattcaaattttggaccgtacgggtgaggtattaatacttgatggggccacttttagtgctaaaaccgacttgattgatggcacgaatatactgccattccaggctcgttatattgctctcgggcagtccgtagctggtactgcaaacgctgatgcgaccttcaaagttcaatatctataattcaatcttaaggtggctatacgtcatctgaaattgaaacagggtgtgtgtggcatggctacgcacacccgagcaatttaccaatattcatctcatttttaatgagaaatggtttgtatttggagcgctatgaaaaatcacataatatctaaactatcaataaacaacagtagttaaacttactgttatttaaaatatttactttgtagcaaggttttcctattaaaagagaaccaacatttattacaaacgcattaagtctggaaacccggcgactcgccaatgtattagcaacattaatcgattgtctgatgtaacggttttcccgcttatcctcttaacacatggagaatgcatcagatgcaaactacgcgtaccccctactctatttcctttatggcgacagtgttacttttattgctctttgcttgccatagcaccgttgccaacgcagctgtcgcactgggtgcgacgcgggtaatttatccggcaaaccagaaacaggttttattgcctgtcacgaataatgatcctgccagtgtctatctcattcagtcatggatagaaaatgcaggtgaccaaaaagacacccagtttgtcattaccccaccgcttttttccatgcaaggtaaaaaagagaatacgctgcggataatcaacgctactaatcatcagttaccaggcgaccgtgaaagcctgttctgggtgaatgttaaagctattcctgctatggaaaaagaccagaagaatgagaatacattacagctggcaattattagccgcataaaaatgttttatcgccccacgaacctggcaatggcacctgaagaagcgccagcaatgcttcggtttcgtcgcagcggtagcaaactcactcttattaatccaacgccctacttcattaccgtaacaaatatgaaagcaggaaatagcaatctcccaaacaccatggtgccgccaaaaggtgaagtatcggtggatatcccgcatgctgcaaccggggatatcagttttcagacgatcaatgattacggtgcattaactccgcgtattaaggcaaccatgcagtaagccagtgacttaattaataataaactcaatcggaattaataatgacagcctttcgtgccgcatttaaggcatatcgtatgcatcaggtgttaatactaccacgctttgcacggcttaccattgcccttggcttagcaactgcggtttttcccgttgatgcagagtattattttaatccacggtttttaagcaatgatcttgctgaatctgtcgatttatccgcctttactaagggacgcgaggcaccacctggtacatatcgggtcgacatttatttgaacgacgaatttatgactagtcgggatattacttttattgcagatgataataacgcagatctcatcccatgtctgagtacagaccttcttgtcagtcttggcataaaaaaatctgcgttattagacaataaggaacattctgcagaaaaacatgtgccggacaacagcgcatgcacaccacttcaggatcgtttggccgacgcatcaactgagtttgatgttggtcagcaacatttgtcactctccgttccgcaaatttatgttggcagaatggctcgcggctatgtttctcctgaactgtgggaagaaggaataaatgctgggcttctaaattatagttttaatggtaattccattaataatcgtagtaaccataatgcaggaaaatccaactatgcatatttgaatttacagagtggcatcaacattggtagttggcgactgcgcgataactcaacgtggagttataacagtgggagtagcaattcatctaacagcaataaatggcagcatatcaatacgtcggctgaacgtgacattattcccttacgctcacggttaacggtaggtgatagttataccgatggcgatatttttgatagtgtgaactttcgtggcctcaaaataaattcaacagaagcgatgttgcccgatagccaacatggtttcgctccggtgattcatggtattgcccgtggcaccgcacaagtgagtgtaaaacagaacggatacgatgtttatcagactactgttccacccggcccttttactattgatgatatcaactctgccgccaatggtggtgatctgcaagtaaccataaaagaggcagacggcagtattcagacattatatgttccttattcgtctgttccggttctccaacgtgctggatatacgcgttatgcgcttgccatgggggaatatcgtagtggaaataacctgcaaagctcccccaagttcatacaaggtagcttgatgcatggactggaaggaaactggacaccttatggcggaatgcaaattgcagaagattatcaggccttcaaccttggtattggtaaagatttaggactttttggtgccttttctttcgatatcacgcaggccaatacgacacttgcagatggcacccgtcacagcgggcaatcggttaaatccgtctacagcaaatccttctaccagacaggaaccaatatccaggtcgcaggatatcgctattctacgcaaggtttttataacttatccgacagtgcctacagtcgaatgagtggttacaccgtcaagcctcctaccggagacaccaatgagcagacacaatttattgattattttaatctgttctacagtaagcgtggtcaggaacaaataagcatctctcagcagcttggaaattacggtacgacatttttcagtgccagtcgccaaagttactggaacacgtcacgcagcgaccagcaaatatcatttggattaaatgtgccgtttggtgatattacgacttcgctgaattacagctattccaataatatatggcaaaacgatcgggatcatttactcgcttttacgcttaatgttcccttcagtcattggatgcgtacagacagtcagtcggcatttcgtaattcaaacgccagttacagtatgtcaaacgatttgaaaggcggcatgaccaatctatcgggggtttatggcactctgctgccggataataacctgaattatagcgttcaggtcggtaacacccacggaggtaatacatcgtctggcaccagtggttacagttctcttaattatcgtggagcttacggtaatacgaatgtcggttacagtcggaatggtgacagcagccagatttattacggaatgagtggtgggattattgctcatgctgatggcatcacctttggacagccgctgggcgacacaatggttctggttaaggctcctggcgctgataatgtcaaaatagagaaccagaccggaattcataccgactggcgtggctatgcaatattaccatttgcgacagaatatagagaaaatcgtgtcgctcttaacgcgaattcccttgcagataatgttgaactggatgaaaccgtagtcactgtcatcccaactcacggtgctattgccagagcaacatttaatgcacaaatcggcgggaaagtattaatgacgttgaagtacggtaataaaagcgttccattcggtgcaattgtcactcacggagagaataaaaatggcagcattgtcgcggaaaatggtcaggtttatctgactggacttccacagtcagggaaattacaggtttcatggggcaatgataaaaactcaaactgtattgtcgattacaagcttcctgaagtctctcctggaaccttgctgaaccagcagacagcaatctgtcgctaaggaacaatagattatgaaatacaataacgttattttcctcggtttatgtctggggttaaccacctattctgctttatccgcagatagcgttattaaaattagcgggcgcgtcctcgattatggctgcacagtctcatcggattcgcttaattttaccgtagatctccaaaaaaacagtgccagacaatttccaacgaccggtagcacaagtccagccgtcccttttcagattacgttaagtgaatgcagcaaagggacaacgggggttcgggttgcatttaacggtattgaggatgcagaaaataatactctgttgaaactggatgagggaagcaatacggcctccggtttaggtatagaaatactggacggaaatatgcgtccggtgaaactgaatgaccttcatgccgggatgcagtggatcccactggtaccagaacagaacaatattttgccttactccgctcgtctgaagtcaactcagaagtccgtcaatccgggactggtgagggcttcggcaacctttacccttgaatttcaataatcagagtcagatatgaaaagacttcacaagaggttcctgttagctacgttttgcgcgttattcacagcaactctccaggccgccgatgtcactatcactgttaatggtcgggtagtcgctaaaccctgcactattcaaaccaaagaagctaacgttaatctcggggatctttatacgcgcaatctgcaacaacctggttctgcatctggctggcacaatattactttgtcattaaccgattgtccggttgaaacaagtgcagtgacggcaatcgtgacaggttcaactgacaatacgggttattacaaaaatgaaggtactgccgaaaatattcagatagagctgagggatgaccaggatgcgacgttaaaaaatggcgatagaaaaacggttattgttgatgagatcactcgtaatgcacagtttccacttaaggcaagagctatcacggtgaatggaaacgcaagccagggaacgatcgaggcgctaatcaatgtgatctacacctggcaataacgtcgattcgattttcttagccttctttttaaatcaattttttaaccttaggatatatcatgggtaaaacaatcagtataaaggtcctgttcggtatttatcttctattaatggcaggtaaagtttttgccttcagttgtaatgtcgatggcgggtcaagtattggagctggtacaacctctgtttatgttaatctcgaccctgtaatacagccgggccagaatctggttgtagacttgtctcagcatataagttgctggaatgattacggcggctggtacgacactgatcatataaacctggtacaaggctcagctttcgcaggctctctacagtcatataaaggatcgctgtactggaataatgtgacctaccccttcccgttgacgacaaataccaacgtattggatattggtgataagacaccgatgccattaccgttaaaactctatattaccccagtcggggcggccggtggagttgtcataaaagccggggaagttattgcccgtattcatatgtataaaattgcaacattaggaagcggaaatccgcgtaattttacgtggaatattatttcaaataacagtgttgttatgccaacaggcggctgcactgttgatagtcgtaatgtcaccgtggatctcccggactttcctggaagcgcagaaatacctcttggcgtatattgctcaagcgaacaaaagctctcattttatctttcgggtgccaccactgacagtgcccgacaagtgtttgctaacacagcacctgatgcaacaaaagcatcgggagtgggtgtctctctgatgcgtaatggaaaaatactggctacgggagaaaatgtctccctgggaacagtaaataaaagcaaagtacctctgggtttaagcgcaacctatggacaaacaggaaacaaggtttcagccggaaccgtccagtcagtcattggtgtcacttttatctatgaataattgtgattttgatcttagtctatgcgctccattcacgaaaattgcgcggataattattttgtaaaggctattatcctacacctgtaagaaaatccgcgcacaattgaagccagagtcttatttttcatattgaaaaatatgttaatttaaacactatgagagatgatgcttaacttatcgtatttaatctattgtttaacgataatagattaaaaatagaaagagagtagtcccctactcttatatatccatgttggcgataatccctttgtatatactgtgcatcatcgctattacaaatcctaataattcatttccacacaggataagtagatgaagaaaaaaattgaatcctaccagggtgctgccggtggttggggtgctgttaaatccgtagcgaatgcagtacgtaagcagatggatatacgccaggatgttattgccatgtttgacatgaataagccagagggctttgactgtccgggttgtgcatggccagatcctaagcacagtgcgtcattcgacatttgtgaaaacggcgcaaaagcaatcgcctgggaagtcacggataagcaggtaaatgcctctttctttgctgagaatacggttcaatcattacttacctggggagatcacgagcttgaggctgcgggacgtctcactcagcctttgaaatatgatgctgtcagcgactgttacaagccattaagctggcaacaagctttcgacgaaattggcgcacgccttcaaagctatagtgatcccaatcaggttgaattctatacttcgggccgcacttccaatgaagctgcctttctttatcagctttttgcccgtgaatacgggagtaataactttcccgactgctccaacatgtgccatgaaccgaccagtgtgggtttggcagcgagtatcggtgtaggtaaagggaccgtgttgctggaagactttgagaagtgcgatttagtcatttgcattgggcataaccctggtacaaaccaccctcgcatgctgacttcgttgcgcgctttagtgaaacggggagcgaaaatgatcgccatcaatcctctacaggaacgtggcctggagcgatttaccgcaccgcaaaacccgtttgaaatgctgacgaactctgagactcagttggccagtgcctactataacgtgcgcattggtggcgatatggcgttgctcaaggggatgatgcgcctgttaattgagcgcgatgatgctgcaagtgccgcaggtcggccctcattgcttgatgacgaatttattcaaacgcataccgtcggctttgacgagctacgccgtgacgttctcaattccgagtggaaagatatcgaacgtatttctggactaagtcagacacaaatcgccgaactggctgacgcatataccgctgccgaacgcaccattatctgttacggaatggggatcactcagcacgaacatggtacccagaatgtacagcaactggtcaatttgctgttgatgaaaggtaacattggcaagcctggtgcgggtatctgcccactacgaggtcactctaatgtacagggcgaccgaaccgtcggtatcaccgagaaaccgtctgcagagtttctggctcgccttggtgagcgctatggcttcaccccaccttatgcacctggacatgctgcaattgccagcatgcaagcaatatgtacggggcaggctcgagcattgatctgcatggggggcaattttgcgctggcaatgccagatcgggaagcgagcgctgtaccgttaacgcaattagatttggcggtacacgtagccactaagcttaaccgctctcatctgctgaccgcacggcatagctatattctgccggttctggggcgtagcgagattgatatgcaaaaaagcggtgcgcaggcggtaaccgttgaggattcaatgtcgatgattcatgcctcgcgtggcgtgttaaaacccgccggtgtaatgctgaaatcagagtgtgctgtggtcgcgggaatcgcccaggcaacactaccccagagcgtggtagcctgggagtatctggtggaagattatgatcgcattcgcaatgacattgaagctgtgctgccagagttcgccgactataaccagcgcatccgtcatcctggaggttttcacctgataaatgcagctgctgaaaggcgctggatgacgccgtcaggtaaggctaatttcattacctgcaaagggctgttagaagatccctcttcagcgtttaacagtaagctggtcatggcgacagtacgcagccacgatcagtacaacacgacgatttatggtatggatgatcgctatcgaggggtattcggtcaacgagatgtggtctttatgagtgctaaacaagctaaaatttgccgtgtaaaaaacggcgaaagagttaatcttattgcgcttacgccagacggtaagcgcagctcacgccgcatggatagattaaaagtggtcatttaccctatggctgaccgctcactggtgacctattttccagaatcgaatcacatgctaactcttgataaccacgatccattaagtggcattcctggttataaaagtattccggttgaattagaaccatcaaattaattcgcctcctcatttcttctgctgtcatccgcacagcagaagaatttctcattgactattatcgcgcaatttgctcacattgattaaattaaaccacacactataagatataaacctctgcctacagctgtaagaaactccgctcagtactgaagtgccagtcctatttcctcttttctccagcctgttatattaagcatactgattaacgatttttaacgttatccgctaaataaacatatttgaaatgcatgcgaccacagtgaaaaacaaaatcacgcaaagagacaactataaagaaatcatgtctgtaattgtggttgtcttattactgacccttacgttgatagccattttttcggcaattgatcagctgggtatttcagaaatgggtcgcattgcaagagatcttacacatttcattatcaatagtttgcaagactgaaaataaacagcaaattataaatatgaaatgttaaaaaagtatcgataaaaactttattgttttaaggagataaaatgtcgctcgtttgttctgttatatttattcatcatgccttcaacgctaacattttagataaagattacgccttctctgacggcgagatcctgatggtagataacgctgttcgtacgcattttgaaccttatgagcggcattttaaagagatcggatttactgaaaataccattaaaaaatatctacaatgcactaacatccagacagtgacggtgcctgttcctgcgaagtttttacgtgcttcaaatgtaccgactggattgcttaatgaaatgattgcttatctcaactcggaagaacgcaatcatcataatttttcagaacttttgcttttttcttgcctgtctatttttgccgcatgcaaaggtttcattacactattaactaacggtgtgctatccgtttccggaaaagtgagaaatattgtcaacatgaagctggcgcacccatggaagctgaaagatatttgtgactgcctgtacatcagtgaaagcctgttgaagaaaaaactaaagcaagagcaaacgacattctcacagattctattagatgccagaatgcagcacgcaaaaaatttgatacgcgtagaaggttcagtcaataaaattgccgaacaatgtggttatgccagtacatcttattttatttatgcgttccgcaaacatttcggcaacagtccgaagagagtttctaaggagtaccgttgtcaaagtcacacgggtatgaatacgggcaacacgatgagtgctttagctatttgattatttgctaacgagtagtcaaccacgcacgctacgtaagaattatatggggcagccattccctgccccgcgttgtttttaggcgatatatttattgaaataaataagtgacatccatcacatatttatgcacttgcataacctgttgcatgattatttatgatctcaattcggcattttgtcagtaaaatgcaataatttattaaatatcaataaattagttgtttatcggcgagaaattacttaatagaacagaaagtaatgtcaacgctttatggactgttatttccctttttttagctaaatctgctatctctttatgtgactaacttcacttacatccacttatttctcttcgtaaaattacttcggaattaagtacaataagaagaggaacatttatgaagtctgcattaaagaaaagtgtcgtaagtacctcgatatctttgatactggcatctggtatggctgcatttgctgctcatgcggcagatgatgtaaagctgaaagcaaccaaaacaaacgttgctttctcagactttacgccgactgaatacagtaccaaaggaaagccaaatattatcgtactaaccatggatgatcttggttatggacaacttccttttgataagggatcttttgacccaaaaacaatggaaaatcgtgaagttgtcgatacctacaaaatagggatagataaagccattgaagctgcacaaaaatcaacgccgacgctcctttcattaatggatgaaggcgtacggtttactaacggctatgtggcacacggtgtttccggcccctcccgtgccgcaataatgaccggtcgagctcctgcccgctttggtgtctattccaataccgatgctcaggatggtattccgctaacagaaactttcttgcctgaattattccagaatcatggttattacactgcagcagtaggtaaatggcacttgtcaaaaatcagtaatgtgccggtaccggaagataaacaaacgcgtgactatcatgacaacttcaccacattttctgcggaagaatggcaacctcaaaaccgtggctttgattactttatgggattccacgctgcaggaacggcatattacaactccccttcactgttcaaaaatcgtgaacgtgtccccgcaaaaggttatatcagcgatcagttaaccgatgaggcaattggcgttgttgatcgtgccaaaacacttgaccagccttttatgctttacctggcttataatgctccgcacctgccaaatgataatcctgcaccggatcaatatcagaaacaatttaataccggtagtcaaacagcagataactactacgcttccgtttattctgttgatcagggtgtaaaacgcattctcgaacaactgaagaaaaacggacagtatgacaatacaattattctctttacctccgataatggtgcggttatcgatggtcctctgccgctgaacggggcgcaaaaaggctataagagtcagacctatcctggcggtactcacaccccaatgtttatgtggtggaaaggaaaacttcaacccggtaattatgacaagctgatttccgcaatggatttctacccgacagctcttgatgcagccgatatcagcattccaaaagaccttaagctggatggcgtttccttgctgccctggttgcaagataagaaacaaggcgagccacataaaaatctgacctggataacctcttattctcactggtttgacgaggaaaatattccattctgggataattaccacaaatttgttcgccatcagtcagacgattacccgcataaccccaacactgaggacttaagccaattctcttatacggtgagaaataacgattattcgcttgtctatacagtagaaaacaatcagttaggtctctacaaactgacggatctacagcaaaaagataaccttgccgccgccaatccgcaggtcgttaaagagatgcaaggcgtggtaagagagtttatcgacagcagccagccaccgcttagcgaagtaaatcaggagaagtttaacaatatcaagaaagcactaagcgaagcgaaataactaaaccttcatgcggcggaattttccgccgccttattgagcgagatagcgatgcacgttacagccaagccctccagttttcaatgtaatctcaaatgtgattactgtttttaccttgaaaaagagtcgcagtttactcatgaaaaatggatggatgacagcactctgaaagagttcatcaaacaatatatcgcagcgtctggcaatcaggtctattttacctggcaaggcggtgaacccactctggctggcctggattttttccgtaaagttattcactatcaacaacgctatgcaggccaaaaacgtatttttaatgcattacaaacgaatggcattttattgaataatgaatggtgtgcttttctcaaagcacatgagtttctggttggtatctcgatcgatggcccccaggagctacatgaccgttacagacgcagtaattcaggtaacggtacttttgcaaaagtgatagcagccatcgagcgtctgaaatcatatcaagttgagtttaatacgttaaccgtcattaataacgttaatgtccattaccctcttgaggtttatcattttttaaaatctatcggcagtaaacatatgcaatttatcgaattgctcgaaaccgggacgccgaatattgatttcagtggtcatagtgagaacacattccgtatcattgatttttctgtgcctcccgcggcttatggcaagtttatgtcaaccatttttatgcaatgggttaaaaacgatgtgggtgaaattttcatccgtcagtttgaaagctttgtcagccgttttttagggaatgggcataccagttgtattttccaggagtcctgcaaggataatctggttgttgaaagtaatggagatatttatgaatgcgaccattttgtctatccacagtacaaaattggaaacattaataaatctgaactcaaaacgatgaacagtgtacaactgacagcgcaaaaaaaacggatttcagcgaaatgtctgaaatgtgcatataaacctatctgcaatggcggttgtcctaagcatcgtattactaaagtaaacaatgagactgtttcttatttttgcgaaggttataaaatccttttttcaaccatggtaccttatatgaacgccatggtggagttagctaagaacagagtaccgctttaccacattatggatgttgcaaaacaaatggagaataattaataacgctctcttttaactccattcttagcctccttcttatgaccttaacaaggcacccgacataaattcctgtcgggtgtttcgtcatcatcatcttcccttgcgaaaatcctggcttacgtggtatgcatcagggcattagcaatatccttgattatcaatagcataaccataaccactgaaaatgaaatattcctttatatttcatattgttaaatgatacttaaataaatttcatcagtaaatcattgccatagataatcattggatggcacaatcaattttcgctaatgataaccattcccattacgttttgtatgttgatagcaaagtatctctgtctgttgaagcccttttggctgcgtaagaataataaaacttcagtgctgttaatcattattatcctcgccatgatccttggcgtggttaaaattcaggtctggttaaacgactggaataatgattttttcaatgcgctaagccagaaagaaaccgataagctttggcagcttgtcctttggttccctgccctgctggggatctttgtattaatatccgtaaacaaaacatggttaattaaactactgactattcgctggcgcgaatggttaacagattactaccttaatcggtggtttgcagataaaaactactacttcacgcagatctacggcgagcataaaaatacagataaccctgaccaacgtatcgctgaagacattctcttactgatcagcaaaacgctcagcctttcatttggcttcatccagtcacttagcatgctgatcacctttaccgttattctttggcaaagcgcgggtacgctctcattcactgttggtggaacagaatggaatatccaggggtatatggtctataccgttgtgctcattgtgatcggtggaactttatttacccataaggttggtaaacgtattcgtccgcttaatgtggaaaaacaacgtagcgaagcgacatttcgaactaatcttgtgcagcataataagcaggcagaactgattgcgctaagcaatgctgagtctctacaacgccaggagttgagcgacaattttcataccattaaagagaactggcatcgtttaatgaatcgtcagcggtggcttgattactggcaaaatatttattcgcgctcgcttagcgttcttccctactttctgttattgccgcagtttattagcgggcagatcaatctgggcggactgatgaaatcgcgccaggcatttatgctagtatcgaacaatttaaggtggtttatttataaatatgacgaacttgctgaactggctgcggttatcgatcgcttgtatgagttccatcaactcactgaacagcgccctacgaataagcctaaaaattgccaacatgcggtacaagtggctaatgcgagtattcgtacgcctgataataagatcatattagagaacttgaactttcatgtttcgccaggcaaatggctattactgaaaggctactctggtgcgggaaaaaccacactgcttaaaacattatcccactgctggccgtggtttaaaggtgatattttttctcctgctgacagttggtatgtgtcacaaacaccgttaatcaaaaccggcttactgaaagagattatttgtaaagcacttcccctgcccgtagacgataaatcgttgagcgaagtactgcatcaggttggtcttgggaaattggctgcgcgtattcatgaccacgatcgctggggagatattctttccagcggcgaaaaacaacgtatcgccctggcacgattaattttacgacgtccgaaatggatatttcttgacgaaactacctctcatcttgaggaacaagaggctatccgcttactgcgtttagtgcgtgaaaaactacccacaagcggcgtcattatggttacacatcaacccggtgtctggaacctggccgatgatatttgtgacattagcacggttttataacaacaataaaagccctgctgtacggagatataaataaatgaagcgagttcttattcctggcgtcattttatgtggcgctgatgtggcgcaggccgtcgatgacaaaaacatgtacatgcatttttttgaagagatgacggtctatgctcctgtccctgtacccgtaaacggcaacacgcattacaccagtgaaagcatcgagcgtttaccgaccgggaatggcaatatcagcgatctgctgagaaccaaccctgcggtacgcatggattcaacgcaaagtacctcgttgaaccagggagatattcgccctgagaaaatctctattcacggtgcgtcgccctaccagaatgcctatttgattgacggtattagtgcaactaataacctgaacccagcgaatgagtccgatgccagtagtgcaaccaatattagcgggatgtcacaggggtattatcttgatgtcagcttactggacaatgtgacgctttatgacagttttgtgccggttgaatttggtcgcttcaatggcggggtaattgatgcaaagatcaaacgcttcaacgctgatgatagcaaggtgaaattgggttatcgcactacgcgttcggactggttaacatcgcatatcgatgagaataacaagagcgcatttaatcaaggctcttcaggaagtacttattactccccagattttaaaaagaacttttataccttgtcgtttaatcaggaactcgctgataacttcggcgttaccgccggtttatcgcgccgccagtctgatatcacccgcgcggattatgtttcgaatgacggcattgtcgccggtcgggcacagtataaaaacgttatcgatactgcattgagcaaatttacctggtttgccagcgaccgctttacccacgatttaaccttaaaatataccggctccagccgtgattataataccagcaccttcccgcagtctgatcgcgaaatgggtaataaatcctacggtctggcatgggatatggatacgcagctcgcatgggccaaactgcgtaccaccgttggttgggatcatattagtgattatacccgtcacgatcatgacatctggtacaccgaactttcatgtacatatggtgatattacagggcgttgcacccgtggcggattaggacacatttcccaggctgtagataattacaccttcaaaacacgcctggactggcaaaaattcgccgtgggtaatgtttcgcatcaaccctacttcggcgcggaatacatctattccgatgcgtggactgaacgccataaccagtctgaatcctatgtgattaatgctgcaggaaagaaaactaaccataccatttaccataaaggtaaaggcagcctgggaattgacaactacacgctgtatatggcggatcacattagctggcggaatgtgtcgttaatgcccggtgtgcgttatgactatgacaactatctgtcaaaccacaatatctccccgcgctttatgacggaatgggatatttttgctgatcaaacctcaatgattaccgccggttataaccgttactatggcgggaatattcttgatatgggattacgtgatatccgcaatagctggacggaatcggtatcaggtaataaaaccctgacgcgttatcagaatttgaaaacgccttataacgatgaactggcaatgggattgcagcaaaaaatcggtaagaacgttattgcacgcgcaaactatgtttaccgtgaagcgcatgatcaaatcagcaaaagcagtcgtaccgacagcgcgactaaaaccaccattactgaatataacaacgacggcaaaacaaaaacgcattcgttcaacctcagttttgaactggccgaacccctgcatatcagccaggtagatattaacccgcaaattgtctttagctatatcaagagcaagggcaacttgtcgttaaacaatggttatgaggagagcaataccggtgataaccaggtggtttataacggtaatctggtttcttacgatagcgttccagtggcagattttaataacccattaaagatctccttaaacatggatttcacgcatcaaccgagcgggttagtgtgggcgaatacgctggcctggcaagaagcgcgtaaagctcgcattatccttggtaagacaaatgcgcaatacatcagcgaatattcagattacaagcagtatgttgacgaaaaactggatagcagcctgacctgggacacccgcttgtcctggacgccacaatttctgaaacaacaaaacctgacgatcagtgccgatattctcaatgtattggatagcaaaaccgctgttgatacaacgaacaccggtgtggcgacctacgccagtggccgtactttctggcttgatgtcagcatgaaattttaatagttcggattttacttaaccgggtaaattcgcccggttttcgcatggagataattatgagaaacctctgtttcttactgacgttagtggcaactctgttgctccccgggcggctgattgccgccgccttaccgcaggatgaaaagttaattaccgggcaactgggcaatggcttgcgatatatgatttatccgcatgctcatccaaaggatcaggtaaatttatggctgcaaattcataccggttcattgcaggaagaagacaatgagcgcggcgtggctcattttgtagaacatatgatgtttaacggcacaaaaacatggccgggtaataaagtcatcgaaacatttgagtcaatgggcctgcgttttggtcgcgatgttaatgcctataccagctatgacgaaacggtgtatcaggtgaatttgccgactacgcagaaacaaaatctgcaacaagtgatggcaatcttcagtgaatggagtaatgccgcaacctttgaaaaactcgaagtagacgctgaacgtggcgtaattactgaggaatggcgtgcccatcaggatgcgaaatggcgcacctctcaggcgcgccgccctttcctgctggctaatacccgtaatttagaccgtgaacctatcggcctgatggatactgtcgccacggtcacaccggcacaattgcgccaattttatcaacgctggtatcaaccaaataatatgacctttatcgtggtcggcgatatcgacagtaaagaagcgctggcgctgataaaggataatttaagtaagcttccggctaacaaagcagctgaaaatcgcgtctggccgacaaaagccgaaaaccacctgcgctttaatatcattaatgataaagaaaaccgggtgaacggcatcgcactctattatcgcctgccaatggtacaagtgaacgatgagcaaagctttatcgaacaagctgaatggagcatgttagttcagctgttcaatcaacgtctgcaggaacgcatacagtcgggcgagttgaagactatttctggcggcactgcgcgcagcgttaaaattgcacccgattatcagtcgctgtttttccgtgtaaatgcacgagacgataatatgcaggatgctgcgaatgcattaatggcagagttggcaaccattgatcagcatggtttttctgctgaagaactcgatgatgtcaaatctacccgcctcacctggctgaaaaatgcggttgatcagcaagctgaacgtgatttacgtatgctgaccagtcgcctggcatccagctcattaaataatacgccgttcttgtcgccggaagagacatatcaactttcgaaacgtctgtggcagcaaattaccgtgcaaagtctggcggaaaaatggcagcagttaagaaagaaccaggacgcattttgggagcaaatggtaaacaatgagcttgccgccaaaaaagcattgtctcctgcggctatcctggcgctggaaaaagagtacgccaacaaaaagctggcggcttacatcttcccaggcagaaatttatcgttaacagtagacgctgacccacaggcggaaattagcagcaaagaaacgctggctgagaatctgacatcattaacactttccaatggtgccagggttattctggcaaaatccgcgggtgaagagcaaaagctacaaattactgccgtatcgaataaaggcgatttaagtttccctgcgcagcaaaaatcacttatcgcgctggcaaataaagcagtaagcggaagcggcgttggtgagctctcctcttccagcctgaaacgctggagtgcggaaaattcggtaaccatgagcagtaaagtcagtggcatgaatacgttgctctccgttagcgcgcggactaataaccctgaacctggttttcagttgattaaccagcgaatcacccacagcacgattaacgacaatatttgggcatcgctacaaaatgctcaaattcaggcgttgaaaacgctcgaccagcgtccagcggagaaattcgcccagcagatgtatgagacgcgctatgctgatgaccgcacgaaattactgcaagaaaatcagattgtacagtttactgccgcagatgcgctggctgccgatcgccagttgttttcatctccagcggatatcacgtttgtcattgtcggtaatgtctcagaagacaaactcgtggcgttaattacgcgttacttaggatcaatcaaacactctgattcgccattagccgcaggtaaaccattaactcgcgcgacggacaacgcatcggttactgtaaaagaacaaaatgaacctgtggcacaggtttcacagtggaagcgttatgattcccggacacctgttaatctggcgacgcgtatggcgctcgatgcttttaacgtcgcactggcaaaagatctacgtgttaatattcgtgaacaggcatctggagcatacagcgtttcttctcgcctctcggttgatcctcaggccaaagatatcagtcatttgctggcttttacttgtcaaccagaacgacatgatgaactgttaacgttagcgaatgaagtgatggttaagcgtctggctaaagggatcagtgagcaagaactgaatgaataccagcaaaacgttcagcgcagcctcgatatccaacagcgtagcgttcaacaattagcgaacactattgtaaatagtcttattcaatatgacgatcctgcagcatggactgagcaggagcaattgttgaaacaaatgacggtagagaatgttaacactgccgttaaacaatatctttctcatccggtaaatacttataccggagtattattgccaaaataataacagccccgtcaacacatcgttggcggggattttagcaatattcgctatttttatgtaataattttataaatgcgttcaaaataataatcaagtactaatagtgatattttaaggtctgatttttacgtgataattcaggagacacagaatgcgcataaaaataacagcataaaacaccttaccaccacccaagaatttcatattgcattgtttttcaatgaaaaaatattattcgcgtaatatctcacgataaataacattaggattttgttatttaaatacgagtcctttgcacttgcttactttatcgataaatcctacttttttaatgcgatccaatcattttaaggagtttaaaatggataagaagcaagtaacggatttaaggtcggaactactcgattcacgttttggtgcgaagtctatttccactatcgcagaatcaaaacgttttccgctgcacgaaatgcgcgacgatgtcgcattccagattatcaatgacgaattatatcttgatggcaacgctcgtcagaacctggccactttctgccagacctgggacgacgaaaatgtccacaaattgatggatttatccattaacaaaaactggatcgacaaagaagaatatccgcaatccgcagccatcgacctgcgttgcgtaaatatggttgccgatctgtggcatgcgcctgcgccgaaaaatggtcaggccgttggcaccaacacca

SEQ ID NO: 38 - DNA, 74344 bp, Escherichia coli
  source 1..74344: mol_type = genomic DNA
gctcagaaacaaggttgggacaagcacttccaggctaacacagtcagaaatcgaaacgtactctcaacagttcgcttaggcatggaagttttgcggcattctggctacacaataacaagggaagacttactcgtggctgcaaccctactagctcaaaatttattcacacatggttacgctttggggaaattatgaggggatctctcagcactcaatgctgagttgaaatcgagttgtgtggaaattgatgccagtgtcgataaaccaatggcataaacaataggtacacctaatgccaacataaaaaagaaggcaccaaataacacaataatcggtaaccagtaatccataatttctccattcctactatggttggttgttgtttgttatctttagagtggttgtttaagttcggttaaaaccatatctatggtgtatataataataagtacaccactaatcgggatgctcatatagatatatcccatttgccagcctaaagcgggcgaggtctgacctgaatcgaatgtatccatcgttaatagcccaccaccatataccataatgatggttgcgaagataataacgataatctgaatacacaaaaataaatgacgtcgggcttttcctttcagcatcataggtagcaggtcaatcgccagatgccggttttgccctgcggtgtatgccccaccaaaaagtccaagacaaataaagagcaaacggctgagttcatctgtaaaaatactggggctagtaaatataaatcgtgcagccacctgccacgtcacacatgccacgatgatcgccaaaatggtaatgttcaatgctgcaagcagagcattaatagatctaattatatttcgcatagtgattaacctttgcaatatcattcatcctgtggctggtaaattgtcccattaagaaaaccaggccagtttttttcaaaccaaatacctcggataataggaaactcacgaacaggtgtttctctgacgtgaaagataccgttgcaataatgaataagtagtttatcttttttatcctcagtacgctctgaacgaaagcgccaggcatcacaaaaaccatttcgtgtttgcggaatagaatttccatccctgtcgagaataatacgtgctccccgactaccaccacctgcgtcaatataatgcgttaattgcgttaatacggcggcagaagtcagtgccatatgccgccacataaacagctcggcaacttcacccacatgtttgatagccaatccatgccgttggacaaattcgctcaatagcagggcatcgcgagtggcgcgtcggactttatcggcatggcaaataaatcccgcatggtcagacattcgtgcctgaattttttctctcacaaccgacaacggcatcccggtcccgttatcgtgcgcctgagtaatgatctctcttatagaagccagtgtaggagctaccagctgtgctatatctccatcaatattccgcttttgcgtgcaaccaataaaacgtgccagacgaacagcaaaaacctgcccggcattcaatgctgcaccaccagggcgagtgacgccgtgtgtgccagcaacttcccccacggcgaaacagccgggcagggaggtttgtccccagatatccacttcaatgccgccattcatatgctgattattcatggcaaactgcaaaggctgtgtggtgagatcgtaaccgtgcatcttatacagcgagatagacagcggattcattcgttgcagccgttcgatgggcgatggtgccagagcgtcgttattttccagatacgcgcgaacgtcgtcgtccagtcgatctaatgagaacggcaggtcacccggcaccgcttcaggattgcgattgaaatccataaatacctgacgccctgattgctgctcttgcgctactgccatatctaacaagctggagccaaaatccatcacccgcgtggcgtggaacggccactgatagcctttacggaaaatgtttgaagccagctcctgggtggtgcgatagtaatccgcgaggaagttatactcgttaccctcagcatccacggaatagatatacgggatcacctgtacataggtgccggataaattccacggaaacgtgctacgcggcgtgcctataccaaactggctttcggtcagattggttagcgtcagaccttcctccagcgccagccccagcgagccgaagcatttatgtggataaacactgtcgcgataaagctcgccaggccctcctgttgccagtaccacattgggcgcagtcacaattgccagcccccatgggttatgggcgcgatgaccggtcgcgaggattgcccctgccacgcggtcttcgccgttttcgtcacgctgatgcagcagtttaatcactgttgcactggtcaacactggaatggcgaggcgctgtacttcttccaacagcactttcaccattaaccttgaggtacgcggcccacacgaggttgcacgcccggcttcgtcatggtcggtttgataacgaagaatcgcgccatagcgatcttccggtaattccagaccaagatattgcaacccgcctagagtgtgcagagaacctaccgcttcgacataagcggtgtcgtgatccatcgccccaccgctcgccagtgcctctgccagtttggtgaagttgtcgccgttgcccgcggtagcggcggtaaatagtgtctgtttatcggaaccagaacatgccgacgtccccatatataacccggcggtagcgatcagcacattttgctggcggcgtttaagttcaactgccgcacgtaatcctgctgcaccactgccgactaccagggcatctgtttgccagagtgggtaatcaacaccgtctaccgtgacaacccatgcgggctctgcctgtgcaaaaccctttgggaaagtaacgtgcgtcagcgcatcaaggatggtgtcatcaagctgactcatgcatcctccatcggcgtaaacaggctactttccatcaggcgtgggtgcttgataattggacggaaagccatatacggcagaatgtcgcgctcaatctccacacccggcgcgatttcaattaattcaacgccttctgccgttaactggaatactgcgcgttcagtgatatacaacacttcctgaccactttgctgtgcgtaggcggcgctaaaagtgattttttccacctgggtaaccagtttagggatttgacctgactgggtgatatgcaagccatctggcgttacatcaatcttgctacctttggcgtcgaacgtgccgcagaacaccactttacgggcgttttgcgcaatttcgagaaaaccgccgggaccaatgagattgccattgagatgggatacgttgacgttaccgtactgatccatctctcccatgccgaggaaggtgatatcgattcctccgccactgtagaactcaaattgatcgagtgatggaataatggcatcggcgttgcgggcgcagccgaaaaacgcatcatccagcatcataccgttatgcacgccttgctcgacgctcagccataaactttggtaaggcacgccttcgcgcagcgctacgcctggaatacccccaggaataccaaagccaaagttggttgaagcgccagctaccagttcgcgtgccgcccgacgggcaatcaggcgacgtaccggatgactaaccagttcaatggcgtcgttagaactcagacggcgatgttggccgctgatggtcaggtcgtaaccgccaagataggtttgtggttgttcgcggtgttcaacgatgccatcaaccagaatgcccggtaatttgacccggcgtggttcaatcgcgccagcttccagcacatcgcgtacctgtacgaacactttgccgccgctgttgtgtgctgccagcgccatggaatagctatccatatcaatcgcttcttcttcaaggctgacgttgcctcgaggatcggcataagtgccacgcaaaatcgcgtaatccactttgaaagggcgataacgaagtttggtttcaccgtcgatttcaatcagttctaccaggtcgtcggtagtgcattcattcgacttaccgccgccattgcgtggatcaacaaacgatcccagcccaacgtgggtaaaaagccccggacgtccggcgccgatctcccgtagcagtgcctgaatcacgccaccaggaaagcagtaggcttcaatcgtgttattttttaccagcgcctgcattttgggcgaccaggtaaagtgcccggcaataatgcgtttgagcatctctgcgtgcgcaaaacggttagtgcctttgcagtcgcgatcgccaatacccagcgagtggattagcgtcaggtcgcgagggtgtccggtttgcaggaaacgcgcttcaatagcagccagaatatggtcggcttccaccatgccgccgccgttaccgctaatggcaatggttgcgccgtcctgaatttgcgccgccagtgcctcggcggttgttatcttacgcatacaatttccttattgattatggaagctcacgctacttttttcggcaaaggcgcgcgtcgcctgctggcaatcctgagtggcggacattaatccggccagtagctggtgcgggtaatcggcatgtttattttccagtgccagaatcagttgcttaatatgcgccagtgccaccggaccgcatttttccagctgcgctaactggttcgccatccagctttccacctgttctatttctaccacttcatcaattaaattcgccgcctgggcttcctgcgccgtcaggcgtttacccagcatcagcatctggcgaccgaccaccggaccaacctgattaagcacacgttcaatgcccatccagccaggcaccatgccgagcatcacttccgggttagagaatttcgcgccggggcgggcaatacgaatatcgcagcacaaggccagttcaataccaccgccgatggtatgaccgttgagattcgcaacggttaattggggtaagtttcgcaggcgattaaaaacgtcattaccgcgtttaatccattttctgcccatatctaatggcgaataggccgaccacgatttaatatcgccgcccgcacaaaagaatttatcgccggttgccgttaattcgactaatcgtaatgtggtgtcgttttcaatttcatttaaataatggtcgagagattcgatcatctcttcgttaatagcatgacatttatcttcacggttcaatgtcaggcggcaggaagccgccactctgctgaacagaacgggttggtcactcatgatcattccttaacaataatgcgcgatgcgatcgacgctaatatccagcgtgctgttaatatctttctgccaccagtaaggcgagaatatttccagttcaatagcaccattaaatccggcgttttcaaccagccgacgaattgacggaatattgatgacgccatctcccggcataccacggtcattgaccagatcagtggtcggcactaaccagtcggaaacatgaaacgcgaggatgcgttttccggcacgcaggatctgactggcgagatccgggtcccaccaaacatggtagacatctaccgccacgccgaggccaaattcgccatcgggatcgagttcatcacaccagtccagcgcctgacgtaacgtgcacagacaggaacgatcggctgcggtcatcgggtgcagcggctccagtgcaattggcacgccgacatctttcgaatgtggcagcaactggcgaatcccttgtttcacttgttcccgcgcttcatatagatctttagtgcccgttggcagaccgccaaccacctgcatataacaggcggcattcagtacagcggcgtcgtccagcgcccggcggttatcgtcaatcgccagtttgcgctccgccagcgtcggtgcggtgtagtaggtgctacggcacaaaccggaaacgttcatcttactggcggcaagctgacgggcgatctgctggagatcttcgccctgcaactccctgcgccagggggcaattgcgccaataccgcgtgcagcgcaggcatcaataatggcgggtagcggcgttttatagcccagtgttgcggtattgatactgaataaatccgggcgttgtaacagatctctcatgattcagcctcagaagcgcggcatacttaagccgccgtcgatggcgaccgcctgaccacaggtgtaaatcagtttaccttccgccatcgcgcggacggtggaagcaatatcagccggataaccccaacgtccccacggcaccagacctttggcaatcagttcgtcgtaataagccgttgccggaatagtcatatcagttttgatgagacctgggcgcacttcataaacgccaatttgttcattacaaaggcgagcagcaaatagacgagcagcggcagaaacggcggttttggcaatggtgtattcgccgcgattcatcgccagcatgatggcgttgatggaactgacgaaaataatcgagcggtgcggcagttccgcttccggtttcggctgtgccagtaagcgcttactgaatgcctgagcaaggaagaacggcgcgcgggtgttaatggcaatgttttgatcgaagctgtctggttcgaggtcgaggaggtcaccgcgttttttcactgaaatcccggcgttattgagcaggcagtccagacgcccccactggttttgcgccgcgtcgagcatctcttcatgcaaggagagatcgccgacatcggcagggaagcaaatgacttccacgccttctgccaaacattcttgttgtgtgatatgcagtttttctacgctgtcggcatcgggacgatcgttaatcagcaggttaaacccgccacgagcaagctccagcgcacagccctttccaataccacgagcggctccggtaatcacggcaactggacgagtggatttcatacaataaccctcttttgaatattgttttctttagtgatgattagcttgcgactggcaggtaaaaagatcaaccatctagttggttgatctgcgagagtgatcacaggtaatttgataactcaatgaaattacgacttttatcctttttgctgtcgctgagatcaaatccggttatgatagccatcacgaagaggaagtggggaagtggaatgtatcttgataccagtcacgcacaaaacctgaaggaaaaattgctgctatgtgcggttaatgaatttgccgaatatggttatgaaggggccagagtagataatattgttaaggcagcagggtgtagtaaacagacggtttatcaccactttggtaataaagaaaatttgtttattgaagtactggaatatacctggaacgatattcgcgaaaaagagagagagcttgacatttcagggctttctccggttattgcgatcgagaaaataattgattttacttgggattattacatcaataatccgtggtttttaaaaattgtccatagtgaaaaccaaagtaagggtgtgcattataaaaaatcaaaacgcctcgctgaaattaaccatgcacatttgcagtcaatggcttcgttattagaagaagggcagcgacagaaaacctttaagaaagatattgatcccttacaaatcaatattaatatcgccgcactgggtgcatattatttaataaaccagtacacactggggatggtttatcacattagcatggtttcacctgaggctttggaagccagacgcagagtgatcaaagagaccatcctgagctggcttttggtgaaccctgcccgtgggtaatcagcgtgcgcggatgaaattaccatcaggttggcgggtgaacagtacttgctgattatttcccgtatcaatggttaagccggtaaccaccccattcgcattttgacggattttaacaatctgaccattttgcaggttactgagcggtttatccgcgccctcgacctgggccatagcgtacacatctgtaggcggcaaattatggtcgcggaacagctgggcaagggtcttgcctggttctacgcgatatgtccgccactgttgatcgataccactttccggttggaaagattgtgtctctgcaacaggtggctcttcaggttgaccttcctgaataggttccggcgcgaccggggcgacctgatccggatcgttttgcggcgtcactaaatgtgcctgtagctgtgcttcacctggggggggtgattgcatatctaactgcgcttcgcgggtgacaacaggcatctggcgtgtttcatctccaggcagaagaataccgataatcagcactattgccgcaataatgattccccggcgatgcatcggcggcaacgggtccatgaggcgaaagttatctggtgcgtgccagattttcaccagagttggttttagttcaaagcgcccaggcatggttttcctccagctccgcgtcgtgttcctcaatcatagcgcagtaataagctaacgctatgatgtccgtggtattaccgctgtttttgtattcatgcggattatccctattgtttctgtttccctgggatttgtcactcatcccgcgacaaagttttaccagaagaagcgtggctgatatcctgcccgctactttataccctaagaaaggaaatacgatgaccaccccaacttttgacaccatcgaagcgcaagcaagctacggcattggtttgcaggtagggcaacaactgagtgaatctggcctggaagggctgctgccagaagcactggttgcaggtattgccgatgcgctggaaggcaaacatccggctgttccggttgatgtggtgcatcgcgcgctgcgtgaaatccacgagcgcgccgatgccgttcgtcgtcagcgtttccaggcgatggctgctgaaggtgtgaaatacctggaagaaaacgccaaaaaagaaggtgtgaatagcaccgaatctggcctgcaattccgcgtgatcaaccagggtgaaggcgcaattccggcacgtaccgaccgcgttcgtgttcattacaccggtaaactgatcgacggcaccgtgtttgacagctccgttgctcgtggtgaacccgctgaatttccggttaatggcgtgatccctggctggattgaagcactgactctgatgccggtaggttctaaatgggaactgactatcccgcaggaactggcatatggcgagcgcggcgcaggcgcatccatccctccgttcagcaccctggtgtttgaagtcgaactgctggaaatcctctaagcagcgcattctgttcccctcgaaccagaggggagcaggcattcagcaataaacccttcagtttgccaaacggcgctattttgtgttgcaaagaccccgtaagcgtgtatttttgtgagctgtttcgcgttatcaccgtgatatgacactcactttaaacataaaattaacattagatctaaatcttagtattcatcccgcgtattgttacctaatatcgatgagtcccgatacagattcgtcgtatcatagactgactaaaggccgtagagcctgaacaacacagacaggtacaggaagaaaaaaacatggtagatcaggtaaaagtcgttgccgatgatcaggctccggctgaacagtcgctacggcgcaatctcacaaaccgacatattcagcttattgccattggcggtgccattggtacggggttgtttatggggtctggcaaaacgattagccttgccgggccgtcgatcattttcgtttatatgatcattggttttatgctctttttcgtgatgcgggcaatgggggaattgctgctttcgaatctggaatacaaatcttttagtgacttcgcttccgatttactcgggccgtgggcaggatatttcactggctggacttactggttctgctgggttgtaaccggtatggcagacgtggtggcgatcacggcttatgctcagttctggttccccgatctctccgactgggtcgcctcgctggcggtgatagtgctgctgctgacgctcaaccttgccaccgtgaaaatgttcggtgagatggagttctggtttgcgatgatcaaaatcgtcgccatcgtgtcgctgattgtcgtcggcctggtcatggtggcgatgcactttcagtcaccgaccggtgtggaagcgtcattcgcgcatttgtggaatgacggcggctggttcccgaaaggtttaagtggcttctttgccggattccagatagcggttttcgctttcgtggggattgagctggtaggtacaacagctgcggaaaccaaagatccggagaaatcactgccgcgtgcaattaactctattccgatccgtatcattatgttctacgtcttcgcgctgattgtaattatgtccgtgacgccgtggagttcggtagtcccggagaaaagcccgtttgttgaactgttcgtgttggtgggtttgcctgcggctgccagcgtgatcaactttgtggtgctgacctctgcggcgtcttccgctaacagcggcgtcttctctaccagccgtatgctgtttggtctggcgcaggaaggtgttgcgccgaaagcgttcgctaaactttctaagcgcgcagtacccgcgaaagggctgacgttctcgtgtatctgtctgctcggcggcgtggtgatgttgtatgtgaatcctagtgtgattggcgcgttcacgatgattacaaccgtttccgcgattctgtttatgttcgtctggacaattatcctttgctcgtacctggtgtaccgcaaacagcgtcctcatctgcatgagaagtcgatctacaagatgccgctcggcaagctgatgtgctgggtatgtatggcgttctttgtgttcgtggtcgtgttgctgacactggaagatgacactcgccaggcgctgctggttaccccgctgtggtttatcgcgctggggttgggctggctgtttattggtaagaagcgggctgctgaactgcggaaataaccgcattatcatgctggatggcgcaatgccatccagcttttagatcactcacccgccagcgcgcgtgggaacagtacattgttttccaggctgatgtgatccatcaggtcatcaatcagttcattaataccgttatacatcgctttccaggtggtgcaggcttccggcggcggtgtgacgttattggtggtgtgtttaatcacttccagcagttcgcccgcttcatcgtgctcgctttccatcacgctgattggtcccattgcctggctgcccatgccttgtttgatcatcgggaagaggatctgctcttctttcatcatgtggctggaaagctcttcatgcagcatagtcaggtattttgtcagcccttttggcacgctcggtttgtcggcgtgaacgcgctcgactttagtcgcttgcaggatcagctccggcagctgctcgcggtgacgatcgtggtagcgcacgatgatatggtcaatgatttctgccagcggggcgctacgccagtctttctcaatcggttgttcagcaagctttgccagttcagcttcaatgacctcaacatccagttctttacgtgccgccgcgcgcgccagcgtctgcttaccgccacagcagtaatccatatcatatttacgaaacagagccgaagcgcgagggatagagagcgccagttcacctaaaggttggtcgcgataagccatagctgatacctcattcttaataatataagatgtattttaaatgcatctttaaggcaaaagctataacccttacgtagcagaggcttatttaactcactgccagcgtgtcaactttctgagacagattcagttaaaggtttttctggttttgctctgaccgcaatgaccacgccaatcactaacagcgcgataccgctcagcgtcattagcggcggcatttgctggcggagtaaaaaggtgtacagcaaacctgccagcgtttcgaaaacaatcagcggcccgagaatcactgtcggtaatcgctggctggcgacgttccagcagagtgcgccaacccatgagcaaagcacggctatcgcaaccatcagactaataaacaccagcggacgggggccaaaaggtaaggagaagtccggcgtttgtatattcagccagtaacaggcgacgagatagccgatgagagaaaccggcagcgtgaccagcgcctgcgccgtcgcccacatcatcggatgtttgtcgggattttcccgcagccagcgggcgttgcgcagggcataccatgcccagcagaccacggaaactaacgctagcacgatgccagaggtataacgtgcccagtcaaaatcggggagtccgtggtttaactcagcaatattcacactcgccaggccgatgccaatacaaatcagtgccggggcgagttttccccacgcgagtttgccgtcgcgctggctataaagcagattggcaaagacaggaatgaccaccggcagggtgccgataatcatcgtggaaacaggcgcgccagtacgttgaatggcactggcaaggcagaagtaataaatgaggttgcccatcatagtgagcatcaaggcggtaagccagtcccgacgcgccaactgacgcagacgcacgcgtcccagccaggcaatgggcagcgcaattaaccctaacgccagataacgccccatcgactgcaacatcgccgggtattccggtacgatcaacggcccgacaaaaataagcccccacatcaaccctgctaacagggcgtacagcacgccgctaatcattactggcatccattggtctgtcagaagaaagttcaggaagcagacatgattgctcccggcatcccgtcattattagagaggatgcgggaggatgccactttaattaactagttattaacattaaaaagatggcttacgctttcggctaacgttgtcgttgggcggccaatcaatttgctaagcgttttgctgttatcaaacagaccacctttcgatgcgccaacgtcagaatccgccagcatatccgccagtccgtcgggcagtccgacgcttttcagtgccgcggcgaaatcggcttcgctcagattttgataggtaacggattttccgctctgtttggtcagctctgccgctaactgtgtcaacgtccaggcactatcgcccgccagttcgtaaaccttgccttcgtgaccggcttcgctaatcacgcgtgccgcagctgccgcataatctgcccgcgttgctgaggcgattttgccatcgcccgccgcaccgataaatacgccgtgttccagtgctgccggggcgctggcgaggtagttttcggtgtaccagccgttgcgcagcagggtgtaaacgatgccagaatcagccagcattttctccgtctcgatgtgctcatcggcgaggccgagcggggaggtatctgcatgtagcaggctggtataagcgataaatttcacgccagccgcctttgcggcattaataacattacgatgctgcggggcacgttgacccacttcgctggaagagatcagcagtagtttttccactccctgaagtgcagatgtcagtgcggcttcatcgccgtagtcagcctgacgcacggtaatgccttgtgctgccagggcctgggcttttgccggattacgaacgatagccactatttggctggcaggaaccgttttcatcaaggattcaataacatagtgaccaagttggccagtggcagcagtaatagcgatcatgggaagtctccatcgttttgtcttgtgtttaaatacgctaacacctaaacttacttttagtaagtacgtacaaaaaggtaagtatgaaatgagtcaggttagcctgtcgcaacaactgaaagagggtaatctctttgcggaacagtgcccgtcgcgcgaggtgttgaaacacgtcaccagccgttggggggtattgattctggtggcgctacgcgaaggtactcatcgctttagcgacctgcggcgcaaaatcggtggggtgagtgaaaagatgcttgcgcagtcgttacaggcgttagaacaggatggttttcttaaccgtatcgcgtatccggtggtgccgccgcatgtggaatacagcctcacgccgctgggcgagcaggtgagcgaaaaggttgctgcactggcggactggattgagttgaatttgcccgaggtgttggcggtgcgggatgaacgtgcggcataactgccggatgcgctgagcttatctggtctacggtgcatggcttgtagggcggataagatgcgccagcatcgcatccgccaataaatgccggatgcggttgatgatttataggccgaaaaagaagtgttttacttactcaaatccacctgataaatcgcaaacccgatatcatcggtcgcgactttattcatcggatattgccctttctctttaataaacgctgcggctttatctgacggggaagtttcgaaacggatatccagtttcttatcgccagcaatcggtgctaaacgccagttgttatctgccgccgggtgaatttcccccgcacgtttcgactcatcagcaatccacgctgccagcaccgagcggttctcatccggtgaagcaaaagcgatatggctgtcgcccgtaccggcaaatttgccgccgtaagcgcgatagttattggtggcaacgaggaacatggcgttcggatcaatcggcttgccattaaaggtcaggttcttaatcctttccgcattggcattaatcatctggcactcgccgtcataacgggcaggctgggtaacatcaatctgataattcacaccatcaatcacatcaaagttataggtgcggaaaccatcccagttgatgagtgattgcggtttcgtgctgttaggatcaatctggttaaactgtccggcggagcactccagccactctttcacctctttaccgctggctttcactacaatcagcgtattggggtagagataaagatcggcggcattacggaaggtcaactggcctttttccacctccacatagcttgccgggtcatttttgcgaccaccaactttaaacggtgcggcagctgaaagcaccggcagttttgccagatccggatcgccctgaatgtaatgttcgacatacgctttttgcgcgttgttcactacttgcacggtcggatcgtcctgcaccagcgccagatagctatacatattgtcggcagatttaccgattggcttgctgacgaactggcgtgtggcatcgtgatcggctttgagtgtttctaccagcttgctgtcttccgccgcgagggattttttattggcgatgtcgtaaatcggccgagcttccgctttcgcctgcgtcacctgccatttaccgctgtcattactgagttgtaagtcgaccacaccaagatgatcgccccacatgcctggcattaccgccggaacaccattcagcgtgcctttcgcgatatcagctccttcgatatcagcaaaatctttacttgggaaaacggcgtgagcatggccaaacataatggcgtcaacacccggaatttcactgagataataaactgagttttccgccatcactttatacggatcggcagacagcccggaatgcgccagaacgacaacgagatcggcacctttctcgcgcatttcaggcacgtatttgcgcacggtttcggtaatatcattcaccgtcactttcccggataaattagctttatcccagcccatgatttgcggcggtacgacgccaatatagccaatcttcagcgtctgtttttttccgtctttatcgaccacttcggtgtctttaattaaatacggtgtaaacattggctgtttggttctggcgtcaatgacgttggcatttacataagggaatttcgctcccgccagcgcatttttcaggtaatccagaccgtagttaaactcatggttgccaagcgtgccgacggtatagtccagcgtatttaatgccttatacactgggtgaatatcacctgcttttaatcctttcgccgacatgtaatctgccagcggactcccctgaatcaaatcgccgttatcgaccagtacgctgtttttcacttcattgcgggcatcgttaatcaggcttgccgtacgtaccagtccgaatttttccgtggcggtgtctttgtaataatcgaaatccatcatgttgctatgcagatcagtggtttccatgatacgcagatcgaccgtcgctgcattcacactggcggcaatcagcgtggccaggagcgttgcgctaaacttaatcatcagggacatccttttatcatcgggaatacgaaagaaaagggagaataaacgtcttacttatagaacagtgaagaatgccacaattttacgctttgaaaatgatgacactatcacagttggcgcattcattaacgatagggtataagtaaaacaataagttaacaccgctcacagagacgaggtggagaaatgttagatcaagtatgccagcttgcacggaatgcaggcgatgccattatgcaggtctacgacgggacgaaaccgatggacgtcgtcagcaaagcggacaattctccggtaacggcagcggatattgccgcacacaccgttatcatggacggtttacgtacgctgacaccggatattccggtcctttctgaagaagatcctcccggttgggaagtccgtcagcactggcagcgttactggctggtagacccgctggatggtactaaagagtttattaaacgcaatggcgaattcaccgttaacattgcgctcattgaccatggcaaaccgattttaggtgtggtgtatgcgccggtaatgaacgtaatgtacagcgcggcagaaggcaaggcctggaaagaagagtgcggtgtgcgcaagcagattcaggtccgcgatgcgtgcccgccgctggtggttatcagccgttcccatgcagatgcggagctgaaagagtatctgcaacagcttggcgaacatcagaccacgtccatcggctcttcgctgaaattctgcctggtggcggaaggacaggcgcagctgtacccgcgcttcggaccaacgaatatttgggacaccgccgctggacatgctgtggccgcagctgccggagcgcacgttcacgactggcagggtaaaccgctggattacactccgcgcgagtcgttcctgaatcctgggttcagagtgtctatttattaattaatttatgcagcaggtccatcacttgctgcacctcttcctgagtaagcgccccgtctttggcccattgcacgcgaccgtctttatccagcaccactacagcggaacttttttcatccagctgccaggcaccgcgtgcgacgccattgctatcaacaataaactgcgaccagggataaagctttttattactctccagactgctgcgcacaaacatgccggaacccggaattgcgtcgtcggtgttaacaatggtggtggtctggtaacgatcgtgcggtaacttcgctgatttaatcgcttcaatcagcgtcgcgtttttctcttttgcagaggtgcgaccagcaatatgttgcagtactcgcacttttcccactaactgcgcgctgttccaggttttgtagctaaactgatctttatcaagcaccaactcgccacgatcggtgatgccaatcggcggcactcgctgaccggtttcgaactgatgtgcggaagccatcatcggcaacagcaggcaggtgagtgccagaatcttgcgtagggtcatggtgtttccttcttatgatatgcaggtgatccgaccacttgggtctgagttttaatcatatgtgctatttatcgaatttcccgcaagtgtgatgccagtttgcggtcaagcgcacaaatcatatgaaaaatgaatgcttatactgaagaccgcgcttcggtaaaaagataattctgaataattgtaacctttaggtaaaaaaagttatacgcggtggaaacattgcccggatagtctatagtcactaggcattaaaatttgcgcctcataatagttgggccgattgtggcaccgcacaggcgtaatactcagcaggagataacaatgaaaattttccaacggtacaacccacttcaggtggcgaagtacgtaaagatcctgttccgtggacggttatacatcaaggacgttggcgcttttgaatttgataagggtaagattcttatcccaaaagtgaaggataagctgcatttgtcagtgatgtccgaagttaaccgtcaggttatgcgtctgcaaacagagatggcttaaccaaagtgctatgcagtaataagacggctcctgattcaggagccgtagatgtttctgggggttacgcgacgctttcttctttatctttagcgtcaggcagttttggcgaaagggcggtggccttgctgtcgatccgggtcaccagcagctggtcgatgcggtagttatcgatatccaccacttcaaatttgtagccggcgaatttcaccgaatcggtgcgtttcgggatcttacgcagcataaacatcataaagccgccgatggtttcgtagttgcccgactgcgggaactcgtcaatatccagcacgcgcatgacgtcgtcaattggggtgccgccgtcaatcagccatgagttctcatcacgggcgacaatctgctcttccagcccctgaccgaccagatcgcccatcagcgtggtcatcacgtcgttgagggtgatgatccccaccaccagcgcgtactcgttcatgatcaccgcgaagtcttcacctgcggttttaaaactttccaacgcctctgaaagggttaacgtatccggcacaatcagcgtgttgcgaatttgtacgccgctgttcagtgccaggctttggttagccagcacgcggttcagcaggtctttagaatcgacataaccgatgatgtggtcaatatcttcattacagacgaggaacttagagtgcggatgttccgccaccttattcttcaggctttgctcatcttcgtggagatcaaaccaaatcacgttttcacgcggtgtcattgaagacggaacggtacgggattccagctcaaagacgttttcaatcagctcgtgttcctgtttacgtaacacgcctgccagcgcaccggcttccactaccgcgtagatgtcatcagaagtgatgtcatctttacgtaccattggcagtttgaaaatacggaagattatgttcgccagtccgttgaagaaccacaccagcggggtgcaaacgtacaggcagaagcgcatcgggttgatgatacgcaaagccaccgcttctggcgcaatcataccgatgcgtttcggggttaaatccgcaaacaggataaacatgccagtcactaacgagaaagagagaataaagctcagttgctcagagagttctgccgacatatagcgggagaacaggctgtgaaaagctggagaaaatgccgcatcaccgacgataccgccgagaatcgccactgcgttcagaccgatttggaccacggtaaagaacatgccgggattttcctgcatattcagaacgcgttgggcatttatattgccttcatcagccagcagtttaagtttgattttgcgtgaggcggcaagcgagatctcggacatcgagaagaacgcacttacagcgatcaaacagagtatgactaaaatactgtttaacatatcttatccgacctttcaggccagatcctcggaaggggaagttgattaatttgtgtgaaatacacattgaaagccgattcgaagaaagtgaaccggcattttcagtggctagtatagcgtaaggtactgtaaagtcgccagagggttaaaattcagactgctgataaatgcaatactgcctgatgcgctatgccaatcaggcctacgcagtccttgcaatatattgaatttggacgattttgtaggcctggtaaggcgtttacgccgcatctggcataaataaagcgcactttatcaacaatctacatttgtacccgtaacgctatgcttccggtggcagacagacgccaattccgccaattccacagtaaccatacgggtttttatgcagatattgctggtggtcatcttcggcataataaaacggtgtggcgttagcgatttccgtggtgatgtgacgatcatcatcggcggcaagcatcgccgcctgaaaacgttccagactggcgcgagctgcggcatcctgttctggggtcagcggataaatcgctgaacgatactgcgtgccgtggtcattgccctgacgcattccctgggcgggatcgtgattctcccaaaatacctgtagcaactgctcatagctgatgacggaaggatcgtaaacaatgcgtaccgcttcggcatgacccgtatcaccggagcacacttcccgataagtcggatttggcgtatagcctccggtatagcctgcggcggtgctgtaaacgccgggtaactgccagaacagacgctccacaccccagaaacaacccatcgcaaaaatggcaatctccattccgtcaggtacattggtcattgagtgaccgttgaccgcatgcagcgtggctacgggcatcggggtgttacgtccaggcagggcatcggcgggggaaaccagatgctttttatcaaataaactcatggtgtcgctctcccgaaaatcggtcattggggttaaggttgtaacaagaggcgtatttgcacacaataaccaccgtgaataggtctaaagtaaaacataagaaatatttggggtttagtctgctttttaatccatattactggatttttgttaagccgtttaacggcgttccaggggcaggaaaaaaggatattcaggagaaaatgtgcgctatatccgacagttatgctgtgtaagcttactctgcttaagcggatctgccgtcgccgcgaacgtccgtctacaggtcgaggggttatcgggacagctggaaaagaacgttcgtgcgcagctttctacgattgaaagtgatgaagtgacgccagaccgtcgctttcgcgcacgcgtcgatgatgccatccgtgaaggtctgaaagcgctgggttattaccagccgaccattgaatttgatctccgtccaccgccaaagaaagggcggcaggtattgatcgccaaagtcacgccaggtgtgccggtgttaattggcggcaccgatgtggtattgcgcggcggcgcgcggaccgataaagactatttgaaattgctcgatactcgcccggctattggcacggtgctgaaccagggcgattatgaaaatttcaaaaagtccttaaccagcattgcgttgcgtaaaggttatttcgatagcgaatttaccaaagcgcagctgggcattgcgctcggcctgcataaagccttctgggatattgattataacagtggcgaacgttaccgctttgggcatgtgacctttgaaggatcacaaatccgcgatgaatacctgcaaaatctggtgccgtttaaagagggcgatgagtacgaatcgaaagatctggcggaactgaaccgccgactttctgctaccggctggtttaactcggtggtggtggctccacaatttgataaagcgcgcgaaacgaaagtattacccttgacgggcgtggtttcgccgcgaactgaaaacaccatcgaaaccggggtcggttactctacggacgtgggaccgcgcgtgaaagcgacgtggaaaaagccgtggatgaactcttatggtcacagtctgaccaccagtaccagtatttccgcgccggaacagaccctcgacttcagctataaaatgccgctgctgaagaatccactggaacaatattatttggtgcagggcggttttaagcgcactgacctgaacgataccgaatctgactccactacgctggtggcttctcgctactgggatctctccagcggctggcagcgtgccattaacctgcgctggagcctcgaccactttacccagggtgaaattaccaacaccacgatgctgttttatcctggggtgatgattagccgcacgcgttctcgtggtggcctgatgccaacctggggcgactcgcaacgctactctatcgactactccaacacggcctggggctcagatgtcgatttctccgttttccaggcgcagaacgtctggatccgcacactgtacgatcgccatcgttttgtgacacgcggcacgctgggctggattgaaacgggtgatttcgacaaagtaccgccggatctgcgtttcttcgccgggggcgatcgcagtattcgcggctacaaatacaaatctatcgccccgaaatacgccaacggtgacctgaaaggggcctcgaagctgataaccggatcgctggaataccagtacaacgtgaccggaaaatggtggggcgcggtgtttgtcgatagtggcgaagcggtaagcgatattcgccgcagcgactttaaaaccggtaccggggtcggcgtacgctgggaatcgccggtcgggccaatcaaactcgattttgccgtaccggtcgcggataaagacgagcacgggttacagttttacatcggtctggggccagaattatgagtttatggaaaaaaatcagcctcggcgtggttatcgttatcttactgttgctgggatcggtggcgtttctggtgggcaccaccagcggcctgcatctggtatttaaagcggcggatcgctgggtgccaggactggatattggcaaggtcaccggcggctggcgcgatctcaccttgtctgacgttcgttatgagcagccaggcgtggcggtaaaagcgggtaatctgcatctggcggtcggtcttgagtgcctgtggaacagtagcgtttgtattaatgacctggcgctgaaagacattcaggtcaacatcgacagtaaaaaaatgcctccttctgaacaggttgaagaagaggaagatagcggtccgctggatctctccacgccgtatcccatcaccctgacacgggtggcgctggacaacgtcaacatcaagattgatgacaccacggtgtcggtgatggacttcacctccggcctgaactggcaggagaaaaccctgaccctgaaaccgacgtcgctgaaaggcctgctgattgctctgccgaaagtggcggaagtggcgcaggaagaagtggtcgaaccgaaaattgaaaatccgcagccggaggaaaagccgctcggcgaaacgctgaaagatctcttttctcgcccggtattgccggaaatgaccgacttgcatttgccgcttaacctgaacattgaagagtttaaaggcgagcagttacgcgtgacgggcgacacggacatcaccgtgcgcaccatgctgctgaaagtgagcagcattgacggcaatactaaactggacgccctggatatcgattccaaccaggggatcgtcaacgccagcggcacggcgcagctgtcagacaactggccggtggatatcaccctcaacagcacactgaacgtggagccgttgaaaggtgaaaaagtgaagctaaaagtgggtggcgcgctgcgcgaacagctggagattggcgttaatctttccggtccggtggatatggatttacgcgcccagacgcgactggcggaagccggattgccgctcaacgtggaagtgaacagcaaacagctttactggccgttcactggtgagaagcagtatcaggcggatgatctgaaactgaaacttaccggcaaaatgaccgattacacgctctctatgcgtacggcagtgaagggacaggagatcccgccagccaccattacccttgatgccaaaggtaatgaacagcaggtcaatctcgacaaactcaccgtcgcggcgctggaagggaaaactgaactcaaggcgttgctcgactggcagcaggccattagttggcgcggtgagctaacgcttaatggcattaacaccgccaaagagttcccggagtggccgtcgaaactcaatggcttgattaaaacccgcggtagcctgtacggcggcacctggcagatggaggtgccagaactgaagctgaccggtaacgtcaaacagaacaaagtgaacgttgacggcacgctgaaaggcaacagttatatgcagtggatgatccctgggcttcatctggaactcgggccaaacagtgccgaagtgaaaggcgagctgggggtaaaagatctcaatcttgatgccaccatcaacgcgccggggctggataacgcgctgccggggcttggcggtacagcgaaagggctggtgaaagtacgcggcacggtggaagcgccacaactactggcagatatcaccgcgcgcggcctgcgctggcaggaactttccgtggcgcaggttcgcgtggaaggcgacattaaatccaccgatcagatcgccgggaaactcgacgtacgcgttgagcaaatttcgcagccggatgtaaatatcaacctcgtcaccctgaatgccaaaggcagcgaaaagcagcacgagctacagttgcggattcagggcgagcctgtctccgggcagcttaatctggcaggaagttttgatcgcaaagaagaacgctggaaggaaactcttagcaatacccgcttccagacgccggtcggcccgtggtcgctgacccgcgatattgcgctggattaccgcaataaggagcaaaaaatcagcatcgggccacactgctggcttaacccgaatgcggaactgtgcgtgccgcaaactatcgatgcgggggccgaagggcgtgcggtggtgaatctcaaccgcttcgacctcgccatgctgaaaccgtttatgccagaaaccactcaggccagcggtatcttcacgggtaaagcggatgttgcctgggacaccacgaaagaggggctgccgcagggcagtatcaccctttcggggcgtaacgtgcaggtaacgcaaaccgtcaacgatgcggcgctgccggtggcgtttcagacactgaatctgacggcggaattgcgtaacaaccgtgccgaattgggctggaccatccgcctgaccaataacggccagtttgatggacaggtgcaggtgaccgatccgcaaggccgccgtaatcttggtggcaacgtcaatatccgtaacttcaaccttgcgatgataaaccccatctttacccgtggggaaaaagcagcggggatggtgagtgccaacttgcgtctgggtggtgatgtgcaaagcccgcagttgtttggtcagcttcaggttacgggtgtggatatcgacggcaactttatgccgtttgatatgcagccgagccagcttgcggtcaactttaacggtatgcgctcgacgcttgccggtacagtacggacccagcagggtgaaatctacctgaacggtgatgccgactggagccaaattgaaaactggcgggcacgagtaacggcgaaaggcagtaaagtgcggatcaccgtgccgccgatggtacgaatggatgtatcgccagatgttgtattcgaggctacaccaaacctgtttaccctcgatggtcgcgtggatgtcccgtgggcgcgcatcgtggtgcacgatctgccggaaagcgcagtaggcgtctccagcgatgtggtgatgcttaacgataacctgcaaccggaagagccgaaaacggcgtcgattccgattaacagtaacctgattgtccacgttggcaacaatgtgcgcattgacgcctttggcctgaaagcgcggctgacgggcgatcttaacgtcgttcaggacaaacaagggctgggcctgaacgggcagatcaacatccctgaagggcgcttccatgcctatggtcaggatctgattgtgcgtaagggtgagctactgttctctggtccgccagatcaaccgtatcttaatattgaagctattcgtaacccggatgctacagaagacgacgtaatcgccggagttcgcgtcactggtctggcggacgaaccgaaagcggagatcttctctgacccggctatgtcgcaacaagctgcattgtcttatttgctacgtggacaagggctggagagcgatcagagcgacagtgcggcgatgacctcaatgctgattggcctgggggttgcgcaaagtggccagattgtgggtaaaatcggcgagacgtttggcgtaagcaatttagcgctcgacacccagggagtaggcgactcctcccaggtagtggtcagcggctatgtattgccaggtctgcaagtgaaatacggcgtgggtatatttgactctatagcaacactcacgttacgttatcgcctgatgcctaagctatatctggaagccgtgtctggtgtagaccaggcactggatttgctctatcagttcgagttttagcaatgcgaatatttgtctacggcagtttacgccacaaacaaggcaacagtcactggatgaccaatgcccagttactgggcgatttcagtatcgataactaccagttgtatagcctgggccactatccaggcgcagttccggggaacggaacagtacacggtgaagtttatcgtattgacaacgccacgctggccgaacttgatgccttgcgcaccaggggcggtgaatacgcgcgccagttgattcagacgccgtacgggagtgcatggatgtacgtttatcaacgacccgtcgatggattaaagctaattgaaagcggcgactggttagacagggataagtaataataaaagcacgccaccttcgggtggcgttgttttatgcgatgtatctcgcgatttttttttgtaacttttccatcttttgcttttctctccgagccgctttccatatctgcaatcgcataaaaaactctgctggcgttcacaaatgtgcaggggtaaaacgtttcctgtagcaccgtgagttatactttgtataacttaaggaggtgcagatgcgtattaccataaaaagatgggggaacagtgcaggtatggtcattcccaatatcgtaatgaaagaacttaacttacagccggggcagagcgtggaagcgcaggtgagcaacaaccaactgattctgacacccatctccaggcgctactcgcttgatgaactgctggcacagtgtgacatgaacgccgcggaacttagcgagcaggatgtctggggtaaatccacccctgcgggtgacgaaatatggtaaagaaaagtgaatttgaacggggagacattgtgctggttggctttgatccagcaagcggccatgaacagcaaggtgctggtcgacctgcgcttgtgctctccgttcaagcctttaatcaactgggaatgacgctggtggcccccattacgcagggcggaaattttgcccgttatgccggatttagcgttcctttacattgcgaagaaggcgatgtgcacggcgtggtgctggtgaatcaggtgcggatgatggatctacgcgcccggctggcaaagcgtattggtctggctgcggatgaggtggtggaagaggcgttattacgcttgcaggcggtggtggaataaggtgtgtttatttatcgcgggcataaaaaaacccttactaaccgaagcccggtgttcagggttattgcgccagaagaacttatttattctttgcgcgctcgaaggaggcaacgatttcagctttagcggcttctgcgttttcccaaccttcaactttcacccacttgcctttttcgaggtctttgtagtgctcgaagaagtgagcgatctgcgctttcagcagctctggcagatcgttaacgtctttaatgtgatcgtattctttgctcagcttggtgtgcggaacagcaatcagtttcgcatcttcaccggcttcgtcggtcattttcagaacgccaaccggacggcaacggatcacagaacccggctgcagcgggtacggagtcgggaccagtacgtcaaccgggtcaccgtccagagacagagtgtggttgatatagccgtagttgcacggatagaacatcgcggtggacatgaagcggtcaacgaacagtgcgccgctctctttgtcgatttcgtatttgatcggatctgcgttagccgggatctcaataacaacgtagatgtcttccggcagatctttacccgcagggacgttgagtaagctcatgtctgtttcctttaaaaatatgtggcaaacaagtgccgagtattatagccaactcgcgccgaatgtcttcgcttgttttcgtcttcattttcctttttcgccagttttaagacggtatacagagcaggaaaatccataaccgtagccgcatttttcatagtgagatgaaagcgattacaaacttgtgattaacgttttatttacttttatgaagtgtgatgtaacgcaatccgttacataacgaattgtctatagtttttccgcgaacatcttttcaccaataataattaccccgacgaggacaaccctatgtggaaacgcttacttgtagtctctgcagtctcggcagccatgtcgtctatggcgttggccgctccattaaccgtaggattttcgcaggtcggatcggaatccggctggcgtgccgcagaaaccaatgtggcgaaaagtgaggccgaaaaacgcggaattacgttgaaaattgccgatggtcaacaaaagcaggaaaaccagattaaagcggtacgttccttcgttgcacaaggggtggatgcgatctttatcgctccagtggtagcgacgggttgggagccggtattaaaagaggcgaaagatgccgaaatcccggtcttcttgcttgaccgttccatcgatgtgaaagacaaatctctctatatgaccactgtcaccgccgacaacatcctcgaaggcaagttgattggtgactggctggtaaaagaagtgaatggcaaaccatgcaacgtggtggagctgcagggcaccgttggggccagcgtcgccattgaccgtaagaaaggctttgccgaagccattaagaatgcgccaaatatcaaaattatccgctcgcagtcaggtgacttcacccgcagtaaaggcaaagaagtcatggagagctttatcaaagcggaaaacaacggcaaaaacatctgcatggtttacgcccataacgatgacatggtgattggtgcaattcaggcaattaaagaagcgggcctgaagccgggtaaagatatcctcacgggttccattgatggcgtaccggatatctacaaagcgatgattgatggcgaagcgaacgccagtgttgaactgacgccgaatatggcaggtcccgccttcgacgcgctggagaaatacaaaaaagacggcaccatgcctgaaaagctaacgctgaccaaatccaccctttatctgcctgataccgcaaaagaagagttagagaagaagaaaaatatggggtattgagggtatcaatgcctgatgccgattcgtaggccggataaggcgctcgcgccgcatccggcggtggtgcgctgaagcctgatgcgacgcttaccgcgtcttatcatgcctacgagttcggtgctctgtgtaggccggataaggcgttcacgccgcatccggcagtggtgcaacaccggacttaacaccgtgcacaatctgtcccctcgccccttcggggagagggttagggtgagggggacaaacggcgcagctcttaacatcaggcacgatctattcccagacttttagagcgtggctaagggggaaaccatgacgaccgaccaacaccaggaaatcctccgcaccgaaggattaagtaaatttttccccggcgtcaaagcgttagacaacgttgatttcagcctgcgccgtggcgaaatcatggcgctgctcggtgaaaacggggcgggaaaatcgacgctaatcaaagcattaaccggtgtataccacgccgatcgcggcaccatctggctggaaggccaggctatctcaccgaaaaataccgcccatgcacaacaactcggcatcggaaccgtttatcaggaagtcaacctgctacccaatatgtcggtcgctgataatctattcataggtcgcgaacccaaacgtttcggctttctacgccgcaaagagatggaaaagcgtgccaccgaactgatgacatcttacggtttctccctcgacgtgcgtgaaccgcttaaccgtttttcggtggcgatgcagcaaatcgtcgccatttgccgggctatcgatctctccgccaaagtgctgatcctcgatgaacccaccgccagcctcgacacccaggaagtagagttactgtttggcctgatgcgtcagttgcgcgatcgcggcgtcagcctgatctttgtcactcactttctcgatcaggtctatcaggtcagcgatcggatcaccgtcttacgcaacggcagtttcgtaggctgtcgggaaacgcgcgagctaccgcagatcgaactggtaaaaatgatgctggggcgcgagctggatacccacgcgctacagcgtgccgggcgaacattgttgagcgacaaacccgttgccgcgttcaaaaattacggcaaaaaaggaacgatcgcaccgtttgatctcgaagtacgccccggcgagatcgtcggcctggcaggcttgctgggatccggacgtaccgaaaccgccgaagtgatcttcggtatcaaacctgctgacagcggcacggcgttgatcaaaggcaaaccgcaaaacctgcgatcgccacatcaggcttcggtactgggcatcggcttctgcccggaagacaggaaaaccgatggcatcatcgccgccgcctcggtacgggaaaatatcatcctcgctctccaggcccagcgcggctggctacgacccatttcccgcaaagagcagcaagagattgccgaacgctttatccgccagcttggcattcgcacaccttcaactgaacaaccgattgaatttctctctggcggcaatcagcaaaaagtgttgctttcacgttggctactgacccgaccgcaatttctgatcctcgacgagccaacccgcggcattgatgttggtgcccacgccgagatcatccgcctgattgaaacgctgtgtgctgacggtctggcgctgttggtgatctcctccgaactggaagagctggtgggctatgccgatcgggtgattatcatgcgcgatcgcaaacaggtggcggagatcccgctggcagagctttccgttccggcgatcatgaacgccattgcggcgtaaggagaacagtgtgatgcctcaatctctcccggacactacgccgccgaaaaggcgctttcgctggccaacgggaatgccgcagctggcggcgctattgctggtgctgctggtcgatagcctggtagccccgcatttctggcaggtggtgcttcaggatgggcgtttgttcggtagccctatcgacattcttaaccgtgcagctcccgttgcgttactggcgattggtatgacgctggtgatcgccaccggtgggattgatctctccgtaggggcggtgatggctatcgccggagccacaacggctgcgatgacggtcgcgggattcagcctgccgattgttttgttaagcgccctgggcaccggcatcctggcgggattgtggaacggcatactggtagcgatcctcaaaattcagccgtttgtcgccaccctgatcctgatggtcgccgggcgcggcgtggcgcaactgatcaccgccgggcagatcgtcacgtttaactcgccggatctctcatggtttggcagcggatcgctgttgttcctgccaacgccggtcattatcgcggtgctgacgcttctcctgttctggctgttgacccgcaaaacggcgctggggatgtttatcgaagccgttggtatcaacattcgggcggcaaaaaatgccggggtaaacacgcggatcatcgtcatgctcacctacgtgttgagcgggctgtgtgcggcgattgcgggcattatcgtggcggcggatattcgcggtgccgatgccaataacgccgggttatggctggagctggacgccattcttgcggtggtgattggcggcggatcgctgatgggcgggcgctttaacctgctgctctcagtcgtgggggcgctgattattcaggggatgaacaccggaattttactttctggctttccgccggagatgaaccaggtcgtaaaagcggtggtggtgctttgtgtgctgattgttcagtcgcaacgctttatcagtctgattaaaggagtacgtagccatgataaaacgtaatttgccactgatgatcaccatcggcgtctttgtgctgggctatttctactgcctgacgcagtttcccggttttgcttccacaagagtgatctgcaatatcctgacagataacgcctttcttgggataatcgccgttggcatgacctttgtgatcctctctggcggtatcgatctctccgtcggttcggtgatcgcctttactggcgtgtttctggcaaaagtggttggcgatttcggcctctcgccgctgctggcgtttccgctagtgctggtgatgggctgtgccttcggcgcatttatggggcttctgatcgacgccctgaagatcccggcatttatcattacgcttgcggggatgttctttttgcgcggcgtcagctatctcgtttcggaagagtcgattccgataaaccatcccatttatgacacgctctcaagccttgcgtggaaaatccccggcggcggtcgccttagtgcgatggggctgttgatgctggcggtggtggttatcggtattttccttgcgcatcgtacccgttttggcaatcaggtgtacgctattggcggcaacgcgacgtcggcgaacctgatggggatttctactcgcagcaccactattcgcatttatatgctctccaccggactggcaacactggcggggattgtcttctcgatttatacccaggccggatatgcactggcgggcgtaggtgtggaactggacgccatcgcgtcggtggtgattggcggtacgttgttaagtggtggcgtcgggacggtgcttgggacgctttttggcgtggcaattcagggactgatccagacttacatcaactttgacggcacgctgagttcctggtggacgaaaatcgccatcggtattttgttgtttatttttatagcattacagcgtgggttaacggtgctgtgggagaatcgtcagagttcgccagtgacaagagtcaacattgcgcagcgataaaaacgcctctccgtgtggagaggcgcaggagattacgcgtccgggaactcacggataaagcgttcgacatcttcaaccatatggtcgttgccgacaaagaatgaacggcgctggtgcagggtttccgggatgatatccagaatacgctctttgccatcgctcgctttaccgcccgcttgttccgccaggaatgccatcgggttgcactcatacagcaaacgcagtttgccgtccgggtggctggcggtgcttgggtagagataaataccgcctttcagcaggttacggtggaaatccgcgaccagtgaaccgatataacgtgaggtatacgggcggttggtggatttatcttcttcctggcagaatttaatgtacttcttcaccccgttcggaaacttaatgtagtttccttcgttgatggagtaggttttgcctttctccgggaagcgcatccgttcctggcacagacagaaaacgcccagcgaaggatcgtaagtaaaggcgtgaacaccgcatccggtggtgtaaaccagcatggtagaggagccgtataccacgtaacctgccgcaacttgtttgttaccaggctggaggaaatcttcttccgttaccggcgtgccgacgggcgtaactcggcggtagatggagaaaatggtaccgacagagacgttaacatcgatgttggacgagccatccagtgggtccatcagcaccacgtattttgcatgttcacagccttcaaagacaacaatctcatcttcttcttcagaggcaatgcccgcaacgatatcgcgtgctttcagtgcggctttcagtttttcattagcgaacaagtcgagtttctgctgaacctcgccctgcacgttctcagcaccgctggcacccaggatatcaaccagtcctgctttgttgatatcgcgatggataatcttggcgcccagttttattgccgacagcaaagcagtgagctcaccggtagcatgagaaaactcgtgctgcttttcgacaataaattcacctaacgttttcataaaactttccctgcaatgtttatggagtaaagcgaccgcaacaatcttaacaaataatctcaatgttgcgctcaggtgaatcgcgccagcaaattgcggattatcctgaaatgcgtttctcacttgcccgacatatgcgtaaaatgagcggcagattaaaaaaggatagtgacgtatgcgcattcatattttaggaatttgtggcacatttatgggcggtctggcgatgctggcgcgccagttaggccatgaagtaacgggttcggacgccaatgtgtatccgccgatgagcaccttacttgagaagcaaggcattgagctgattcagggttacgatgccagccagctcgatccgcagccggatctggtgattattggcaacgccatgacccgtggaaatccgtgtgtggaagcggtactggaaaaaaacatcccttatatgtcaggtccacagtggctgcacgattttgtgctgcgcgaccgctgggtgctggccgttgccggtacacacggcaaaactaccaccgcgggaatggcgacctggattctggaacagtgcggttacaaaccgggatttgtgatcggcggtgtgccggggaactttgaggtttcggcgcgtctgggcgaaagcgacttctttgttatcgaagcggatgagtacgactgcgccttcttcgacaaacgctctaaatttgtccattactgcccgcgtacgctgatcctcaacaaccttgagttcgatcacgccgatatctttgacgacctgaaagcgatccagaaacagttccaccatctggtgcgtatcgttccggggcagggccgtattatctggccggaaaatgacatcaacctgaaacagaccatggcgatgggctgctggagcgagcaggagctggtgggtgagcagggtcactggcaggcgaaaaagctgaccaccgatgcttccgaatgggaagttttgctggatggcgaaaaagtgggcgaagtgaaatggtcgctggtaggcgaacataatatgcacaatggcctgatggcgattgcagcggctcgccatgttggtgtagcgccggcagatgccgctaacgcgctgggttcgtttattaatgctcgtcgccgtctggagttgcgtggtgaagcgaatggcgtcacggtatatgacgattttgcccatcacccgacggcgattctggcaacgctggcggcgctgcgtggcaaagttggtggtacggcgcgcattattgctgtgctggaaccgcgctcgaataccatgaaaatggggatctgcaaagacgatctggcaccttcattaggtcgtgccgatgaagtcttcctgctgcaaccggcgcatattccgtggcaggtggcagaagtggcagaagcctgcgttcagcctgcacactggagtggcgatgtggatacgctggcagatatggtggtgaaaaccgctcagcctggcgaccatattctggtgatgagcaacggcggttttggtgggatccatcagaaactgctggatggtctggcgaagaaggcggaagctgcgcagtaattcggcctcagcctgatatagtgtgcgtaggccggataaggcgttcacgccgcatccggcatttgagcatagtgcctgatgcgacgcttgatgcgtcttatcaggcctacaggtgcaccgcatccggcaaaccatactcacatcaacaacgaaaattacccttcattctccgccagttcgcgcagatactggaaaatctggcgtgcggatttcggcggcttattcccttctttctctttcttcgcgttgcggatcagagtacgcagctgctgacgatcggcatcgggccacagatttaatacctcagcgatggcgtcatcaccttgatcgatcagacgatcgcgcaggttttccagtttatggaacagcaccacctgctggttgtgacggtttttcagcttatccagcgcctgacggatcggttctacatcgcgctggcgcagcatcttaccgatgagctgcaactggcggcggcgaccttccatcttaatacgctgggcgagctcaatagccgcgcgcagatccgcatctaacgggatcttatccagcgcgtttttccccagatcaacaatttccgcgccaaggcgttttagctcctcggcatcacgtttaatttcacttttactgacccagataatttcatcgtcttcgtcttcgatgtcatcaccgggaacgtcgtcgagccagtcttcgggctgcttagtcatctcaggctccttaaaaaaagaggctaatgttaccagttaagatgcgcactgaaaaacggttctctgttagacttcagagaaactctctacattatggcacttgcaatgaaagtaatctctcaagttgaagcgcagcgcaagattctggaagaagcagtttccactgcgctggagttggcctcaggcaaatcggacggtgcggaagttgccgtcagcaagaccaccggcattagcgtaagcacgcgttatggtgaagtggagaatgttgaattcaatagcgatggcgcgctggggatcactgtttatcaccagaaccgcaaaggtagcgcatcatccaccgatttaagcccgcaggccattgcccgtactgtacaggcggcgctggatattgcccgttatacctcgccagatccctgtgccggcctggcagacaaagagctgctggcctttgacgcaccagatctcgacttgttccaccctgctgaagtttccccggatgatgccattgaactggcggcccgcgcagaacaggcggcattgcaggcggacaaacgcattaccaataccgaaggcggcagttttaacagccactacggtgtcaaagtttttggcaacagccacggcatgttgcagggttactgctctacgcgtcattcactctccagctgtgtaattgccgaagaaaatggcgatatggagcgtgattacgcctacaccattggtcgtgcgatgagcgatctgcaaacgccagagtgggttggggccgactgtgctcgccgtactttatcgcgcctgtcaccgcgtaaactctccaccatgaaagcgccagtcatttttgccaatgaagtggcaaccgggctttttggccatctggtgggggcgatagcgggtggctcggtttaccgtaaatctacctttctgctggattcgctgggtaaacaaattctgccggactggctgaccattgaagagcatccgcatctgctgaaagggctggcgtcgacgccattcgacagcgaaggtgtgcgcaccgagcgtcgcgatattattaaagatggcatcctgactcagtggctgctgaccagctactcggcgcggaaactggggctgaaaagcaccggacatgcgggcggtattcacaactggcggattgccggacaagggctaagcttcgaacaaatgctcaaagagatgggcaccgggctggtggtgacggagctgatgggccagggcgtgagtgccattactggtgattattcccgtggtgctgcgggcttctgggtagagaatggcgaaattcagtatccggttagtgaaatcaccatcgcaggtaatttaaaagatatgtggcgcaatattgtcaccgtcggtaacgatattgaaacacgcagtaatatacagtgtggttctgtgctgttgccggagatgaaaatcgccgggcagtaaaaaactggcgcgacctgccgcgctataaactaaaaaattacacaaaatcattcgcactgcatcgagacggaaagtgaatgagggccggggagcgtactcgcagtacgtgacccgggcgaatgagcgtagccgtcgatgaggcagtgtgaaggatgaagtgtaaataaaaaaggaagtgagcaatgcgtaaaagcctgttagctattcttgcagtctcctcgttggtattcagttctgcgtcgtttgccgctgatcttgaagacaatatggaaaccctcaacgacaatttaaaagtgatcgaaaaagcggataacgcggcgcaagtcaaagacgcgttaacgatgatgcgcgccgcagcgctggatgcgcaaaaagcaacgccgccgaagctcgaagataaatcaccggacagcccggaaatgaaagatttccgccacggtttcgacattctggtcggtcagattgacgacgcgctgaagctggcaaatgaaggtaaagtaaaagaagcgcaggccgccgcagagcaactgaaaacgacccgcaacgcctatcaccagaagtatcgttaattcctcatttccctgttgcctgcactcaggtaacagggaacttatcatcgcaaatgatgcaccacctgattgctgctgccgcgccagatcagggaagggtcttttaaatcctgcacaaacttgccgtcgaccagcacgttaatcaaatcaacaacctgcatttgcgtagcgttgagttcgtcgagtttatagcctgtccacacccagatgtctttacccggacactcggcgcggatgcgttgtaccagtttcagaatatccggcacgttttgcggatgcagcggatcgccgccggagagggaaataccctggcgtttgatacgagtgtcattcagatcgttaatgatctggtcttccattgctttggtaaatggctgaccagaatttacccgccatgtgcttttgttatagcaaccggggcattcatgaacacacccggagacaaacagggtgcagcgagtgccggggccgttgacgatgtcgacaggatagtactgatgataattcattatttcgcctggcttatcagtccgcgtgtaggctgcatccggtaatcaatgcctgatgcgacgctgtcgcgtcttatcaggcctacagccgttgccaaatgtaggccggataaggcgtttacgccgcatccggcatttgcttagcgcagagtgaagattaacctatctgcccattccccaaatgtttaacgcggcgcttaacttcttcctgcttaccagcgttaaacggacgtgcatccgggctacctaaatatccgcacacgcggcgagttaccgacacacgggaggcgtcatggttaccacatttcgggcaagtgaagcctttgctggtgcactcgaactcaccggtaaagccacactcgtagcactcatcaatcggtgtattggtgccgtaatacggtacatgctgatagctgtaatcccagacatcttccagcgccttcaggttgtgctgaatgtttggatactcgccgtagcaaatgaaaccaccgttcgccagcggcgggtaaggcgcttcaaagtcgatcttgtcgtacgggttcaccttcttctccacatcgaggtggaaactgttggtgtagtaacctttatcggtcacgcccggcaccacgccaaactcagcagtatcgagacggcagaagcggtcgcacaggttttcactcggcgtgctgtagagactgaaaccataacccgtttcttctttccactgatccactgcctgacgcagacgttcaacaatggcgatacctttcgcgcgaagctgctcgttgtcgtaaacatgctcgccgccgaacagcgcgttaatggtttcgtggatgccgatgtaacccagcgaaatagacgcacgaccgtttttgaagatttcagaaacatcatcgtcagcattcagacgtacgccacaagcaccttccatatagaggatcggggccacgcgcgctttcacgccttcgagacgagcgatacgggtcatcagcgccttacgtgccagcaccagacgttcatccagcagcttccagaaggtggcttcatcgccttttgcttccagagcaatacgcggcaggttcaggctgatcacgccgaggttgttacgaccatcgtggatctgctcgccgttttcattttcccacacgccgaggaagctgcggcagcccatcggggttttaaacgaaccggtgactttcactacctgatcgtagttcaggatatccggatacatgcgcttgcttgcgcactccagcgccagctgtttgatgtcgtagttcggatcgccttttttatggttcagaccatcgcgaatcgcaaacaccagtttcgggaacaccgcagttttacggtttttaccgaggcctgcgatacggttacgcaggatcgattcctgaatcaggcgcgattcccagctggtgcccagaccaaaaccaaaggttacaaacggcgtctgaccgttggcggtgtgcagggtgtttacttcgtactccagcgactggaaggcatcgtagcactctttgatggtacgagagtttgcgtagccttcggcgtccgggatgttccactcttctgcggtcttgcgatgtttgttgtagctggcggtaacaaacggcgccagcacttcatcgatacggttaatggtggtgccgccataaatatggctggcgacctgagcaataatctgcgcagttaccgcggttgccgtagagatcgacttcggcggttcaatctcggcgttccccatcttaaagccctgggtcagcatgcctttcaggtcgatcaacatgcagttgaacatcgggaaaaacggcgagtaatcgagatcgtgatagtgaatatcgccacgctcatgtgccttcaccacgtcacgcggcagcaggtgctggcgtgcatagtgtttagccacgatcccggccagcaggtcgcgctgggttggaatcaccttgctgtctttgttggcgttttcgttgagtaacgaggagttggtctgctcgaccagaccacggatctcctggttcaggcgaccgcgtttttcacgttcaatgtcgcgatcgtgacggtactcgatgtaagcacgagccagttgtttgtatggacctgacatcagctgattttcaactgcggtctggatctcattgatatccacctggttgcggccctgcatctgctcgctgacaaccgcggcaacagtggcgcaataatcggcatcatcgacttccgctgctttagctgcacgcagaatcgcttctttgatgcgctctgatttaaacggcactttgcagccgtctcgtttcatcacatgcggtgtcatgatcgctccatatttttaagaacaggttatccacagaaattgggaaaggcgttttccggttttttcgtttcgttttccggtgctttccgcaatcgccatccgcttatccacaacgccgcacctttttcgtggggagctgtagtagcaattatagtcgattaatacaacatattgggtttggacgcattttaaagtctatatatagtgctttgcatcaaggatgttttaactttttttgatgtagctcaaagtaaaaagcagagcgtacggatgacgggcgctacagcgttatgtaaattttttaatgaatttgctggttgaaaaatcaacaaaaacaacatgctgacagacaaaaccccggaatgaccggcattaccggggcttagggaagatttacttctgtaaccaccagacagcctcaaaaggccgtaaattcatggcacagggttgtggtgaggcttcttcgtagttatgcatcacaagctgccagttgccgcgcatttgccctggctgccagggttggatctcacggctaaggttggcaatgaccagcaaggtttgccccttccattcacggcgatagcaccacaatacagggctgtttggcagcagatcctggtaattgccccatgtcaggatggcttcttgcttacgcagtgcgattaacttttggtaggtgtaaaacaccgaggactcatcggccagcgcggcttctacgttgatttgttgatagttatcgcccaggccaatccacggttcgccagccgtaaacccggcattatcgccgttgctccattgcatgggcgtgcggctgttgtcacgggatttactggcgaggattgccaataactcgtcggcatcacgaccatcgttgcgcagctcggcaaacatattgaggctctccacgtcgcgatagtcagtaatgcgcgtgaaatgcgggttggtcatgccaatctcttcgccctggtagatatacggcgttccctgcatgccatgcagcaccatcgccagcatttttgccgcaggcacgcggtattcaccttcatcaccaaagcgagaaataatgcgcggctgatcgtggttacaccagaacaaggcattccatgccacgttgtgcattccttgttgccagtggcggaacaatgttttcaacgccacaaagtcaggtttagccagcgtccatttttcaccaccgggataatcgaccttcaggtgatgaaaattaaaggtcatcgacaattcactgcctgtcagtgccgcgtatcgctggcaatgctcaaggctggtggaggacatttcacctacggtcattaacccgcgtggcgtaaacacatcgcggttcatctcgtgcaaaaactcgtgtgctcgtggcccgtcggtgtaaaagcgacgcccgtcgccatccaggtcttcagggaaacgcgggtctttggagatcagattcaccacatccaggcgcaacccgtcgaccccacgatcggcccagaattcacagacttttttcagctctgcgcgtaccgctggattctcccagttgagatccgcctgttctggtgcaaagagatgcaaatagtactgttcgctttccgcatgccagcgccacgcactaccgccaaattttgaacgccagttgttcggtggcgtttctggttcgccatcgcgccagatataaaactggcggtaagggctttctttgttcagcgcctcgcgaaaccaggcatgttgggtagaggtatggttaaacaccatatcgagaatgatacgaatcccgcgcgattttgcctgcgtcaccagttcgtcaaaatcgtccagcgtgccgtaggtgggatcaatcgccgtatagttcgctacgtcgtaaccgttatcgacctggggagagatataaaagggggttagccagatggcatcaacgcccagtttatgcagatagtccaggcgttggataacgccacgtaaatcgccggtgccgctacccgtggtgtcctgaaaactctttggataaatctggtagataacgccgttttgccaccagtggggaagattagtcattacgttattcctgcaaatgcgagggggcgcaattgcgccccgaagaaaattaaacaatatccagcgtgcccaggcggtatttccgctgatagataaacgaggtgagtacaatcgggatgatgatggcgataaccattgccagcgcaaatacctgccagtagctcggttgaatcgagagaattcccggcaggccgcctacgccgataccattcgccataacgccgttcaggccgcatagtaatcctgccagaccagaaccaatcatcgcgcacagcatcgggaagcgatatttcaggttgatgccgtacattgcaggctcagtgaccccaagccaggcggagatagcggcaggcacggagatctcgcgttcattgtgcttgcggctggaaatgataatgcctatcacggcggagccctgagcgatattcgacagcgcaatcagcggccacactggcgtgccacccatgctttgaatcatctgcaaatcaatagcaagggtggtctggtgtacgccggtgatcaccagcggcgcgtacaggaagccaaacaatgccgcaccaatcggagcaaagctgccggtcatcaggtgacgtaccgcaaaggcaacgccatcgccaatcatgcgaccaaacggaccaatcagcgcatgggcgaggaacaccgcgaggatcagcgaacagacgggcaccaccaccagatagaggtaatccggtacgatgcgtttaaggcgagtttcaataacgcccagcgccagcccggctaacagtgccgggatcacctgcgcctgatagcccactttggcgatgctgaacatgccaaagtcccacacttccggcagctgctgcccgagcagataagcgttcatcagctggggggaaaccagtgtcacgccaagcacgataccaaggatcggcgtgccgcccatttttttcaccgctgaccagcaaatcccgaccggcaggtagaagaagatcgcttcaccgatcaaccacagaaaatcgtagatcgtttgcagggaagggtacatttgcgccagcgtttgaccgttgctcatgggcaaatcgccgatcacattacgaaaaccgaggatcaaaccgccgctaatcaacgcgggcagcaacgggaagaagatctccgcgaaatgagagatcaactgctcatgccatttcatattctgccgggcggctttttttacctgctctttatcaacctgcgcctgtccggttgacgctattagtgcttgatagtaatcacccacgttggtgccaatcaccacctgaaattgcccggcattggtgaaacagcctttcaccatggggagttgctcaatttctttcggtctggcattggccggttggttgaggacaaagcgcaggcgagtaatacagtggctcaccgtcgcaatattgccgcgcccgccgaccagttcaatcaaccgatcgatatccgtttggtttattttgctcatcataaagccccatggcagatgacatttttggttggctgcagaatatattgcgcggaaaaatttaaaaacgggaacgttcccgaaacgcagcgaagatcacaatttatcgttcaggaaacgatcaggacagggtggcggggatgatgatttgttgcggttcgctgcgcccggttacctgtgcgatcaattggcaggccgcctggcgtccagcttcggcgtaaccaggatctacggtgacgatctccggatggaggaatttcattaatggcgtattaccgacgctcgccagttgcaaggtgtcgatgcgttgctcttgcaggtatttacttgcgccaagtgccagcgtgtcggttgcgcacagtaaggcggtagtttcaggcgtaatcacttttgctacgttctcatagccttgcttcatagcaaggcctggcagagcggcaacgggatgcagtttatgcgctttgcagaacgccaggtaggcttcgtgacgtcgcttcccggtcgtcacgtcactatgcggcacgccgagataactgatattacgatgcccctggtcatacagccgttgcatcaggatcttgattgccccttcgtcgtcataacagaccgaagcaaaaccttttgcgtcacgcgccagcagaaccagcgatgactgccagtgggctaacatttcttctgttatgccagtaaaaccgaacagcactacgccgtcgatattacgccgtttcagcacccccaaatgttcggcaactaattgcggggaaaactgactttccatcatgattgggtcgtaaccttgttcatagaacgctggcagcatggtttgaacggcgagattttctgacaacgaatccaggcgggtaacaatgatggcgaccactttatcgctttgcccacgcatagcgcgcgcagagcgggaaggggaaaatccatgctgattcatcactgcttcaacacgctcgcgggtgcgctggctcacgccgctttcgttattcagcacccgggaaactgtagatttccccacgccgcttaagcgtgcgatgtctttgatggtcagccgattttgcatcctgttgtcctgtaacgtgttgtttaattatttgagcctaactttacccgtgcattcagcaatgggtaaagtctggtttatcgttggtttagttgccagcaggtattatatcgccatagatgctacgaatattattggattctccttattatttgcggcgctttattcacttaccggaggttatatggaacctgatcccacgcctctccctcgacggagattaaaacttttccggtaagcccgtcttttcacggcgttaccggatgcgtaaggccgtgacgttttaacgtccctgctcagctttattaccttcaggtaaggcttcgccacgcctgaagacatttctgtactgtttcagacagtgcggagggactccttatgtttaaagaaatctttacccggctcattcgccatttaccttcccgtctggttcatcgtgatccattgcctggcgcgcagcagacagtgaatacggtggtcccgccgtccttaagtgcgcattgcctgaaaatggcggtgatgcccgaagaagaattgtggaaaacgttcgacacccatccggaagggttaaatcaggcggaagtggaatctgcccgcgaacaacatggtgaaaataaattacccgcacaacaaccgtcgccgtggtgggtacatttatgggtctgctatcgcaacccatttaatattttactcaccattctcggcgctatttcttacgccacggaagatttatttgccgcgggcgttatcgcgctaatggtcgctatttctacgttgctgaactttattcaggaagcacgttccactaaagcggcagatgccctgaaagcgatggtcagcaataccgcgacggtgctgcgcgtaattaacgacaaaggcgaaaatggctggctggagatcccgatcgaccagctggtgcccggcgatattataaaactggcggcgggggatatgatcccggcagatttacgtatcttgcaggcgcgggatctgttcgtcgctcaggcgtcgttaaccggtgagtctctgcccgtggaaaaagccgctaccactcgccagccggaacacagcaatccgctggagtgtgacaccctgtgttttatgggcaccaccgtggtgagcggcacggcacaagcaatggtgattgctacaggagccaatacctggtttggtcaactggcggggcgtgttagtgagcaggaaagcgagccgaatgcctttcagcaggggatcagccgcgtcagtatgctgctgattcgctttatgctggtgatggctccggtggtgttgcttatcaacggttacaccaaaggcgactggtgggaagcggcactgtttgcgctttcggtcgcggtaggcttaacgccggaaatgttgccgatgattgttacctcgacgctggcgcgcggcgcagtaaagctgtcgaaacagaaagtgatcgtcaaacatctggatgctattcagaactttggcgcaatggatattctgtgcactgataaaactggcaccctgacacaggacaaaattgtgctggagaatcataccgatatctccggtaaaaccagcgaacgcgtgctgcatagcgcgtggttgaacagtcattatcagaccggacttaaaaacctgctcgatacagcggtgctcgaaggtacggatgaagagtcagcgcgctcgctggccagtcgttggcaaaaaattgatgagattccgtttgatttcgagcgtcgccggatgtcggtggtagtggcagaaaataccgagcaccatcagctggtttgcaaaggtgcattgcaggaaatcctcaatgtgtgttcgcaggtgcgtcacaatggcgagattgtgccgctcgatgacatcatgctgcgtaagattaagcgggttactgatacgcttaatcgtcaggggctgcgcgtggttgcggtggcgacgaaatacctgccagcgcgtgaaggagattaccagcgggcggatgaatccgacctgatcctcgaaggatatattgctttccttgatccgccaaaagagacaaccgctccggcactgaaggcattaaaagcgagtggaatcaccgtaaaaatccttactggcgacagtgagttagttgcagcgaaagtgtgccatgaagtggggctggacgcgggagaggtggtcattggtagtgatattgaaacgctatctgacgacgaactggcaaatctcgcacagcgcaccacgctgtttgcccgcctgacgccgatgcataaagaacgcattgtgaccttactgaagcgcgaagggcatgtggttggctttatgggcgatggtattaatgatgcgcccgccttacgcgctgcggatatcggcatttctgtgtacggcgcggtagatattgcccgtgaagcggctgatatcatcctgctggaaaaaagcctgatggtgctggaagagggggttattgaaggacgtcgcactttcgccaacatgctgaaatacatcaaaatgacggcgagctccaacttcggtaatgtgttcagcgtgctggtggcgagtgctttcttgcccttcctgccgatgttgccgttacacttgcttattcagaacctgctgtatgatgtgtcacaggtggcgatcccgtttgataacgtcgacgacgagcaaattcaaaagccgcagcgttggaatccggcggatctggggcgctttatgatcttcttcggaccgatcagctcgatcttcgatattctgacgttttgcctgatgtggtgggtattccatgccaacacgccggaaacgcaaacgctgttccagtcgggatggtttgtggtgggcttactgtcgcaaacgctgattgtgcatatgatccgcacccgccgtgtgccgtttattcagagctgtgcatcgtggccgttaatgatcatgaccgtgatcgtgatgattgtcgggatcgcattgccgttttcaccgctggccagttatctgcaactgcaggcgctgccgttaagctatttcccgtggctggttgcgattctggcagggtatatgacattaacccagttggtgaaaggattttatagccgtcgttacggctggcaataaagaatcaactgggcatggtggcctggattcgaattgcagacaaagtgagttttgttcatgccggatgcggcgtaaatgccttatccggccaacaaattcaataaattgcaggaatcacgtaggcctgataagcgtagcgcatcaggcgattttgtgtttgtcatcagacttaatccgggcatgatagcccggatttccatcaagattagcgacgaacagcgatcgcttcgatctcaattttcacgtctttcggcagacgggcaacttcaacgcaagaacgtgccgggaaggtggcattgtgttcggtgaagaaggcttcgtaggtagcattaacggttgcgaagtcgttcagatctttcacaaacacggtggttttaacgatgtcgcccactttcaggcctgcggcttcgacgatcgcttttacgttatccagcgactgacgtgcctgtgcagcgacgtctgccggtacttcgcccgttttcggatttaccgggatctggccggaggtgatgatcatattgcccagatcaacgccctgtacgtaaggaccgatagctgccggtgcattttccgtcgcgatagttttgctcatgatttctcctttattacagcggtaaaaagtctggctcattatagggagccagacttttattaccaaccgcaattaattggccagcaccacattatgggaaaactctttttcacagtatttgcatttgagcgcgatgtcattggcgcgttttcgcacggcaaagctggaagaaaccggttcggcatggctgatacagttgctgttcgggcagaccagcacattgtcgatgcgctctggcagactggggcgcgatttacccaccacttcatagttgtcgatacggttaaccgtggcttgcggcgcatacaatgccagttgatctacctgatcttcactcaaaaaggtattttcgattttgatcagatctttgcggcccatctcgccagaaggcaagttcagaccgatggtgatgcgctgatccgtttcggtcagcttgaacagactcaacagcttaaaaccgatctgggcggggatatggtcaattaccgtgccgcgtttaatagcttcaacctgcaatttattatcgtgtgtcatctctatttccccttacagtaccagatcgcgattcagaaccagtgccagtaacgcctggcgagcgaaaatcccgttgcctgcctgctggaagtaccaggcgtgtggcgttttatcaacatccgtcgcaatctcatcaacacgcggcagcggatgcagcactttcatattggctttggcgttgtggagatcgctggcgcgaagaacaaactgcgctttcacgttggcgtactcggacgggtccagacgctctttttgcacgcgggtcatgtacaggatgtctacttccgccatcacttcttcaatagagctgtgcagactccatgcgatccctttttcatcgagcatatccagaatgtattgcggcattgccagcgcgtccggcgcgatgaagtaaaaacggttgccgtcgaacttcgctaacgcctgagtcagggagtgaacggtgcggccatatttcaggtcaccaaccattgcgacgtggagattgtccagacgcccctgggtttcctgaatagtgaataagtccagcaaggtttgcgtcggatgttggttggagccatcaccggcattcagtaccggtacattgccggaaaactcggtggccaggcgcgccgcaccttcctgcggatgacgcatcactatcgcatcgacgtaagtgctgataaccgaaatggtatcggccagcgtttcgccctttttacccagtgatgtattggcgctgtcggagaagcccaccacgctggcacccaggcggtgcatagatgtttcgaaagagaggcgggtacgggtagaggcttcgaagaaacagctggcaatgactttgtgcttcaacagctctggttgcgggtttgctttcagtttcgccgctgtcgccagcaccagattaaggtcatcgcgactaaggtcgtttatggaaatgatatgtttctgatatagcggattagccatcttttatctcctgacgcctgggcaaaaaaaagcccctcgattgaggggctgggaatgggtgatcaacgggaagaaaaacggcaggccagcgtcttttttcagacgcggtaagacaaaatgtcgaacacactgaaccatacatcctcccggcaaattgtccggcattatactcatcgtcagaagcggtgcaagcatttgatgcaatattttgtcagcgcaaacggtttatttgaattataagtcaaaatgcatgcatttttatttgttgtgattctgcaggggaacggtcgttcggtatcaataattgcagacatttcctgcttttttctttttcactttcacgcaatcagatatgcattttattccattcatccgacttatagggcggagtgtgaaaacgaacggctaacactattgcttactgctcagggatgcgcgctatcactttaatttcaaaatcaaagcctgccagccatgtaacacctaccgccgtccagtttggataaggtggggcgctaaatatttcatttttcaccgtcatgatgtcttcaaattggttttctggatcggtatggaagctcgtaacatcaatgatatcgtcaaaagtgcatcccgcagcagccagggtcgcatgcaaattatcaaatgccagtctgacttgttgctgaaaatcgggttctggtgttccgtcctctcgacttcctacttgcccggaaacaaacagcaaatcgccggaacgaatagccgcagaataacgatgttcagcatacagtgaatgtcggcctgcagggaaaacagcggttctttctaccatttggttatcctcaagatttacgacatgaacagaagatttatatttaccaggagccgcttttagcggacgacgtgagtaaacaaaacccagacatcatggataatggctgggcttaattgagcgtagtcggttatgcgccaaacgcgccatcaatggtatgcatcgcgccggtaacaaaactggcttctggccctgctaaccatgcgaccataccagcgacctcttccggttgcccatgtcttttgatagccatcaaactatgcaacatatcgcgcattggcccgttggcgggattagcgtcggtatcaattggccctggctggacgacgttgatggtgatcccacgcggtccaaaatcacgggccagcccgcgcgccatgccttgcagggcagatttgctggcggcataagcagccatgcctgcaacaggcatacgatcgccattcacggagccgatgattaagatgcgcccgccttcgggcatctgccgggcggcttcaacggaggcatggtaaggagcatgaatattgattttgaaaaggcgatcaatatcgtcggcatttaattccagggcatcgccaaagacgccaatacctgcatttaccacgaggatatccaatgcgccgctcttacgaacgacatcaataacagcgtctctgtcagcactatctgtgaatactgctgtcgctcccgtctcttgtgccaggcgttcagcggcatctttcgaccccgcataggtgaatcgtacattggccccatcggtgacgaaacgacgtacgatagcggcaccgattccacggctaccaccgaggatgagaactgtcttacctgtaaaagcgcccataaggactccttgatttattatgtaacatgcattacaaaactgttttaactttctgtcaacaagttttgtaatggtcactaaaaaacaatctcgcgttccaggtcgtcccagacgtttcgctcctgagcaggcagtctctgcggcaaaagtgctttttcaccaaaaaggtttcgatgctgtcagtgttgctgaagttactgattatcttggtattaaccccccgagcctctacgcggcttttggcagtaaggctgggttatttagccgtgtactcaatgaatatgtcggtacggaagctattccgcttgccgatattcttcttgatgatcgtccggtaggcgagtgcctggttgaggtattaaaagaagcggcgcgcagatatagccaaaacggcggctgcgctggctgtatggttcttgaaggtattcatagtcatgatccacaagcgcgtgatattgccgttcaatattatcacgccgcagaaacgaccatttatgactatatcgccaggcggcatccacaaagcgcacaatgtgtgactgattttatgagtaccgtgatgtcagggctttctgcgaaggcacgggaggggcactccatcgaacaactctgtgcaacagctgcactggcgggggaagcgataaaaactattctcaaggagtgatgcgggccttgacccgaaaggcgggaacgcgcctgccgataagttgtgataagacaataattcacgcgttaaggctagcggaattgatcatcttttcgtataacgatagaaatgaaacgttgttttaattaaggagtggaaaagatgatcatcggaaatattcataatcttcagccgtggctaccccaggagttacgccaggcgattgagcatatcaaagcacacgttacggtagaaacgccaaagggcaagcacgatatcgaaggcaagcgtctgttttatcttatctcggaagatatgaccgagccgtacgaagcccgccgtgcggagtaccatgcccgctatctcgacattcagattgtgttaaaaggtcaggaaggcatgaccttcagcacgcaacctgcaggcacgccggataccgactggttagctgataaagacatcgcatttttgccggaaggcgttgatgagaaaacagttatccttaatgaaggtgattttgttgtgttttatccgggggaagtgcataaaccgctgtgcgcagtgggtgcaccagcccaggttcgcaaagcagtagtgaagatgctgatggcgtgatgacttttcgccgtaaataactccagatttacggcgagtttgtgaaaagagcgttttttgatatttttttgtgagtaaaatttgtaatgcttagacgttcttattaactcaaggagtccgtcatgagcaaaatatcaggttggaatttttctcaaaacattacatcagccgacaattgtaaacaaaaaaatgaagacttagatacctggtatgtgggaatgaatgattttgcccgaattgccggagggcagaatagcagaagcaatattctttctcccagagcatttttggagtttttggctaagatatttaccctgggttatgtggattttagcaaacgctccaacgaagcgggtagaaatatgatggctcatattaagtcctcatcttatatcaaaaataatgatggtagtgagataatgaagtttgttatgaataatcctgaaggggagcgagcggatttatctaaggtggaaatagaaattacacttgcctcagcttttaataatgggattcgtgaaggacatacagtcattatatttacacaacctgatggttcgactaatcgttatgaagggaagtcctttgaaagaaaagatgagagttcattacacctgattactaacaagattctggcgtgttaccaacgcgaagctaacaaggaaatagctcgtctattaaatattccgcaggagttaaataattctcaggacttgaataactcgcaggtgagttgtaaagattcagttgattctacgattacggatttattagaaaaaccattgaataatgcattattagcaataaggaaagaacatctgctattaatgccttatgtatgtaatgaatcgatttcatacttgcttggtgaaaaagggatactgaaagaaatagatgaccttaacgcagataaataattatcttcttaataataagaaagctactgacaatgaaattaatgacatcaaagttaacctgtctcatattcttattgattccttagatgatgcaaaagttaaccttacaccggtcatcgattcgattctggagacttttttaaaattcccatatattaatgatgtaagaatactggattggtgttttaataaaagaatgcaatattttggtgattctgaaaagataaagtatgcatgctccgtgataaatcatattgattttagccgcgatcaatctaaagattttagctgcgatcaatctaaaattaaaatagctgagaccttatttttcaatctcgataaagaacactataaaaatagccgtaaattacaggaattgatttgggataagttggttgcatatgtcaatgattttaacttaagcaatcaagaaaaatcacgcttaatactaaggttatttgatgatgttaagttgctatttaatgaagtgcctgtcagcattttagtaaatgatattttttttgaaggattttttcatgaagcaacctgattttgctaagtggtatttctatcaattacttaaagattatgagggcgaacagctgtatcttaatgagttaggatatgtttatggtaatgaagaaaaaacaaatgaaattgtaaaaaacaatccgggttatgtcgttaagatttttgaagaaaagatggttaatgaattaaaaattagaacaagaatgatgaaaatcctccggaagatttacgtatagcaatagaaaaatatggatggaataattgaactattactgcataaaataatgtgatgccgggatgtttttgtatttcccggcatctttatagcgatatcaattatttactgagcgtcgcgaccatcaccgctttgatggtatgcatgcggttttccgcctgatcaaaaacaatgctggcggcagattcgaagacctcatcagtcacttccattccgccatgtaggccaaactcttccgccattttcttaccaagcgtcgtctggtcgtcatgaaacgcgggcaggcagtggaggaatttgacctccgggttaccggtcaactgcatcatcttgctgttcacctgataatcacgcagtaatgcaatccgttctgcccatttctcttttgcttcccccatcgacacccatacatcggtatagataaagtcagcaccttcaactcctttggctacatcttccgtcagcgtaatattcccgccattttgctgtgccagggcgcggcattccgtaaccagcgcagcttccggccagcatgcctgtggcgcgaccagacgcaaatccagaccggtaagcgccgcagcttcgagcatcgaattgcccatgttgttacgtgcgtcacctgcatagaccagcgtcatttcgttgaatgctttaccgggtaaatgctcctgcatggtgaggagatccgccagcaactgcgtggggtgaaactcattggtcaggccgttccataccggcacgccagcgtattccgccagtgtttcgacaatctcctgaccatagccgcgatactgaataccgtcatacatgcgacccagcacgcgggcagtgtctttaatcgactctttatgaccaatctgactgccgcttgggccgagataagtaacgcgagcaccctggtcatatgcggcaacttcgaaagagcatcgggtacgggtcgagtctttttcgaagatgagcgcgatgtttttaccagtgagtttggcttcttctttgccgcttttcttatcggctttcagcttcgcggctaactgcagcaggctgttgagttcagctggcgtgaaatcgagtaatttcaggaaatgcttatgataaaacccggacatagatccctcctgtggctaacgccttaatgaattaaaattcaatttatatggatgattattcatttgcaagtctaaagcataaatctttgtcacaaaggtggaggcaatgtcagtggtgtgtgacaataagagtatcggcaggacattaagaggaatgagccatggcaaacccggaacaactggaagaacagcgtgaagaaacacgtttgattattgaagaattactggaagatggcagcgatccggacgcgctgtacaccatcgaacaccatctttccgcagacgatctggaaaccctggaaaaagcagcagttgaagcgtttaaactcggttacgaagtgaccgatccagaagagctggaagttgaagatggtgatatcgtgatttgctgcgacatcctcagcgagtgcgcgttgaatgccgatctgatcgatgcccaggttgaacaactgatgacgctggcggagaaatttgacgttgagtacgacggttggggcacttactttgaagatcccaatggcgaagacggcgacgatgaagattttgtcgatgaagacgatgacggggttcgccactaattaattgattaaaatgcccgatagcacacactagcgggcatttttttagagttcgcgtagcatccgcacttcacaatctacatggcccgtgcagccaagtgcatagtcgatatgttgaaaacctaaatgttcatacaaaccaatcgcttctttcaaaaaagcggtcgtttccagatagcagcgtttgaagcccatctctcgtgcctgctccatcgccattaaggccagttttttcgccagccctttaccgcgaatagccggaagaaaatacatcttctgcagttcgcaaatgtccgactcactcccggttaatggcgcaatcccaccgccgccgaccacttcaccatcgtactcaaccacccaatatgcatgacccggctgactatacacttgatacaactcgtccaggttcggatcggcgacggtgtagcctttatcagcggtaagaccgtattcggcggatacctgacgaatgacgcgggcgatggcgggattatcctgctgcgtcaggcgacgcattacaggtgattgcggcgcaatgttattcatagtttaacccaataaaaataaagtaattatacatttgtttaataccactctcttcttacgtgcgcaagcgacttataaagtaataaagtttttgccagcctattactgataagagtattgtaacgtggcagaacattttactgtctgtatatataaattatatcaatggattttttaattcagggaatttttatggctcaagttattaatgaaatggatgttccgtcccattcgtttgtttttcatggtacaggtgagagatattttcttatttgtgtggtgaatgtgttgttaacgattataacgctaggtatctatttgccatgggcattaatgaaatgtaagcgttatctctatgctaatatggaagttaacggacaacgattttcttatggaattactggtgggaatgtttttgttagttgtcttgtttttgttttttgctatttcgcaatcttaatgacagtgtcagcagatatgccacttgttggctgtgttttgactttgttactgttggttttgcttatatttatggcagcaaaaggactgcgttatcaggccttgatgaccagtctcaacggcgtaagatttagttttaattgctctatgaaagggttctggtgggtaacctttttcttgccgattttaatggccattgggatggggactgttttctttatctcgacaaagatgctacatgccaatagttcaagtagtgttattatatctgtggttctgatggcaatagttggtattgtttccattggtatttttaatggtactttatatagcctggtaatgagttttctctggagcaataccagtttcggtatacatcgtttcaaggtgaaattagatactacgtattgtataaaatatgccattctcgcatttttagctttattaccttttctcgctgttgctggttatattatcttcgatctaaaatgataatcgcgcagttaatctattattttgggattgctgttagcaccagttatttaacggtgtcgttgcgaaatcattttatgagcaacctgtcactgaatgatgggcgtattcgttttcgctcaactttaacgtaccacggtatgctttatcgcatgtgtgcgttggtggtgatatccgggattacgggcggtctggcttatccactgctgaaaatatggatgattgactggcaggcaaaaaatacgtatttgctgggcgatttggatgaccttcctttaatcaataaagaagaacaaccagataaaggcttcttagccaggatttcacggggaattatgccttctttaccatttctgtaagagataaaaaaggccggagcatgctccggccttcgttttcattactgtgttttgattacagcgcggcgataacagcctgctgttcaatcagcttcgctttcgcttctgcatagccttccagcttttcacgctctttcgcgatgaccgcttccggtgcgcgggcgacaaagccttcattcgccagcttgttctcgatacggctgatttcaccttcaatcttcgccacttctttcgccagacgcgccagctcatcttctttgttgatgaggccagccatcgggatcagcagctctgcaccgtcgatgatcttagtaacggaaaccggacctttgtcatcggcaggcagcacggtgatactttccagacgcgccagcgtttgcaggaagccacggttttcatttacgcgacgttctgcatccgcgctgcaaccacgcagtagcagctccagcggtttgcccggcgcgatgttcatttctgcacggatgttacgtaccgcaacgatcgcctgcttcagccactcggtgtcggccagtgcggcttcatcaacctgagatgcatcgtactgcgggaacggctgcagcatgatggtgtcggcagtgataccgcaaagtactttcacacgctgccagatggtttcggtgatgaacggaatgatcggatgcgcgaggcgcagcagaccttccagtacagtcaccagcgtatggcgagtaccgcgcagttctgcttcggtgccaccgttcattaccggcttggtcagctcgagataccagtcacagaactggttccaggtgaactcatacagaatgcctgcggcgatatcgaagcggaagctgtccagcgcttcgcggtacgctttgatggtctggttgaactccgccagaatccagcggtccgccagcgacagcgtcatttcgccgccgttgaagccgcaatcctgaccttctgtgttcatcagcacaaagcggctggcgttccacagcttgttacagaagttacggtaaccttccaggcgcttcatatcccagttgatgtcacgaccggtagatgccagtgccgccagggtgaagcgcagcgcgtcagtaccgtgcggttcaataccgttcgggaactgcttctcggtgcgcttacggattttgtccgccagctgtggctgcatcatattgccggtgcgtttttccagcagttctggcagcgaaataccgtcaaccatatccagtgggtcaataacgttacccttggatttggacatcttctggccttcgtcgtcacgaatcaggccggtcatgtaaacggtgtggaacggcacctgcggtttgccattttcatctttgatgaagtgcatggtcatcatgatcatgcgggcaatccagaagaagatgatgtcgaagccggataccatcacgctggttgggtggaactgacgcagggcgtcggtgttttccggccagcctagggtagagaaggtccacagtgcagaagagaaccaggtgtcgagaacgtcttcgtcctgacgcagggcaacgtcggcaccgaggttattttctttacgcacttcgtcttcgttgcggccaacataaacgttacccgcttcgtcataccatgccgggatacggtgaccccaccacaactgacgagagatacaccagtcctgaatatcgcgcatccaggagaagtacatgttttcgtactgcttcggtacgaactgaatgtcgccgttctcaaccgcttcaactgccggtttcgccaggacatcggcacgcacgtaccactggtcggtcagcattggttcgatgaccacgccgccacggtcgccgtaaggaacggtcaggtcatgtggtttaatttcttccagcaggccgagtgcgtcaaccgcagcaacgaccgctttacgtgcagcaaaacgctccagtttctggaattctgccgggatctcgctggaataaacgtcagattcgttacctttggtatcgaacacctgggcactttcacggatatcgccgtcaaaggtcaggatgttgatcatcggcagggcgtgacgtttaccgacttcatagtcgttaaagtcgtgcgccggggtgatcttcacgcagccggtgcctttttccatgtcggcgtgttcgtcgccaacgatcggaatacgacggttaaccagcggcagaatgacatatttgccaatcagatctttgtaacgcggatcttccgggttaacggctacgccagtatcgcccagcagggtttccggacgggtagtcgcaaccaccagataatctttaccgtctgcggttttcgcgccgtcagccagcggatagcggatgtgccacatcgaacctttcgattcgcggttttccacttccaggtcagagatagcggtgcgcagtttcgggtcccagtttaccaggcgtttgccacggtaaatcaggtcttctttatacagacgaacgaaaacttctttcaccgcattggacaggccttcgtccatggtgaagcgttcacgctcccagtccacggagttgccgagacggcgcatctgacgggtaatggtgccgccagattccgctttccattcccagattttgtcgatgaaagcttcgcggccgtagtcgtgacgggttttaccttcttctgcggcaatcttgcgctcaacgaccatctgggtagcgatcccggcgtggtcagtaccgacctgccacagggtgtttttgccctgcatgcgctgatagcggatcatggtatccatgatggtttgctggaaggcgtgacccatatgcaaactgccggtgacgttcggcggcgggatcatgatgcagaaactttcctggctttcatcgccattaggcttaaagtagccctgcttttcccagtgctcgtaaagcggctgttcgatatcttgtgggttatatgtcttttccattatttccaggttgccgtattcaggttgaaaccagccacgcggtaggctttatagcgttcgcgcgccagttgtttcagagaatcttcataaggaacgaagtctaccacttctgtgaaagcggtggcaaaatctgcaaagcttgttcgcagactaatcaatatatcgcgcgggctgctgctgcgtttttgcggccaggcgatctccaccggcgcaccgccgcgcggtccttctcccgctaaattatgcggaacaaagctttctgccggacgcgcccacagggcttcatccagccggtaagcctgcttttcatcttcacaggcgatgagtacgcgcttaccactgcgccaacgttctgcggcaatttcacacaccagttgctcaacggcgcttaagccatcgacggtggtgtcattgtccagaaggtagaacgtcgcgtttttcataaatggggcttcttgtggtggatttaaatattgctgcattcctcaccctaaaagatgagcaatgaatttctattgcgctcgatcggttccctctcccttagggagagggttagggtgagggtaaaacgcaaacttactcttcgccgttaaacccggcgcggtttaacaggaactgtgccagcaacgctaccggacgaccggttgcgcctttcgctttaccagaacgccaggcggtaccggcgatatccaggtgcgcccagttgtacttacgggtaaagcgtgacaggaagcaacctgcggtaatcgccccaccaggacgaccgccaatgttcgccatatcggcaaaattggactccagttgttcctgatactcgtcacccagcggtaagcgccatgcgcggtcaccggattgttcagacgcggcaatcagttcatgggccagcggattgtggttcgccatcagaccagtaatgtgatgacccagcgcgatcacgcaggcaccggtcagcgtcgccacgtcaatcaccgcttccggctcaaaacgctcaacgtaagttaacacgtcgcacagtaccaggcggccttcagcgtcggtgttgagcacttcaacggtttgaccagacatggtggttaacacatcgcccggacgataggcgcgaccgcctggcatgttttcacaacctgccagcacgccgataacattaatcggcagttgtagctccgcgaccatacgcatcacgccgtaaaccgccgccgcgccgcacatatcgtacttcatctcatccatgccttctgaaggcttgatcgagataccgccggagtcgaaggttaaacctttacccaccagcacgattgggcgtgcatcttccgacgcgttgcctttgtactcaatcaccgacatcagcgattcgttttgcgaaccctgaccgaccgccagataagagtgcatccccagctctttcatctgctgttcgccgataacgcgggtaatgacattcttgctgtagctgtcagccagctggcgcgcttgtgaagcgaggtaagcggcgttacagatattcggcggcatattgccgagatcttttgctgctttaatcccggcggcaatcgccagaccgtgctggatcgcgcgctcaccgctggtcagttcacggcgggtcggcacgttgaacaccatcttacgcagcggacgacgcggttcgctcttgttcgttttcagctgatcgaaactgtagagcgtctcttttgccgtctcgacagcctgacgcactttccagtagttgttacggcctttaacgtgcagttcagtcagaaagcagaccgcttccattgagccagtatcattcagcgtattaatggttttctgaataacctgcttgtactgacgctcatccagctcacgttctttgccgcaaccaataaggagaattcgctcggaaagtacattcggaacatggtgcagcaacaatgtctgccccggttttccttccagttcgccccgacgtagcagggcgctgatgtacccatcgctgattttatcgagctgttctgcaatcggagaaaggcgacgtggttcgaagacgcccacgacgatgcaggcactccgctgtttctccgggctaccgctttttacactaaactccatgcactacgctcctgaatcttaaagacaacggcggtggctacagatagaattgcaagctttcgtaactcatgtccgctgttgcgatgacttcgtgttaatcttaacgttattacggcattggcacgtcagaacaaaatctgagaggtgaatccgttgagtataattatcttagcgacgatttcgacgactcaagagaataaatgacgtttaagccatgaaacaagctaaaatcctgcaaaagacgagtttttacgggcgtatttaaagtgataatcataagatatctggtgcgggagacgctcaaaagccagctggcgatactcttcatcttgcttttgatcttcttctgtcaaaagttagtgaggatcctcggcgcagcggttgacggcgatattccggcgaatctggtgctctcccttctcgggttgggcgtgccggaaatggcgcagcttatcctgccattaagcctgttcctcgggctgctgatgacgctgggcaaactgtataccgaaagtgaaattacggtaatgcatgcctgcggcctgagcaaagcggttctggtgaaagcggcaatgatccttgcggtattcacggcaatcgtcgcggcggttaacgtgatgtgggcgggaccgtggtcatcgcgtcatcaggatgaagtgttagcagaagcgaaagcgaaccctggcatggcggcgctggcgcaagggcaattccagcaagcgactaatggcagttcggtgctgttcatcgaaagcgttgacggcagcgatttcaaagatgtgttcctcgcgcaaattcgaccaaaaggtaatgcacgtccttctgtggtggtggccgattccggacatttaacccagctgcgcgacggctcccaggtcgtcactctcaaccagggaacgcgcttcgaaggcactgcactgttacgtgatttccgcattacggacttccaggattatcaggcgatcattggtcaccaggcggtggcgctcgacccgaacgataccgaccagatggacatgcgtacattgtggaacactgacaccgatcgtgcccgcgcagaactgaactggcgtatcacgttggtattcaccgtgtttatgatggcacttatggtcgtaccgctgagcgtggttaacccacgtcagggacgcgtactgtcgatgctgccagccatgctgctgtatctacttttcttcctgatccagacctccctgaaatcgaacggcggtaaaggtaagctggacccgacgctgtggatgtggaccgttaacctgatttatctggctttggcgattgttctcaacctttgggacaccgtgccggtccgccgcctgcgcgccagtttttcgcgtaaaggagcggtgtgatgcaaccttttggcgtacttgaccgctatatcggtaaaactattttcaccaccatcatgatgacgctgttcatgctggtgtcgctgtcgggcattatcaaatttgtcgatcagctgaaaaaagccgggcaggggagttacgacgcgttaggcgcaggaatgtataccttgctgagcgtgccgaaagatgtgcaaatcttcttcccgatggcggctctgcttggggcgttgcttggtcttgggatgctggcgcagcgcagcgaactggtggtgatgcaggcttctggttttacccgtatgcaggtggcgctgtcggtgatgaaaaccgccattccgctggtcttgctgacgatggcgattggcgaatgggtcgcgccgcagggcgagcagatggcgcgtaactaccgtgcgcaggcgatgtacggcggctcgttgctctctacccagcaaggcttatgggcgaaagatggcaacaacttcgtctacattgagcgggttaaaggtgacgaagagttaggtggcatcagcatttatgcctttaacgagaatcgtcgtctacaatccgtacgctatgccgctactgcgaagtttgacccggaacataaagtctggcgtctgtcgcaggttgatgaatctgatttgaccaatccgaaacagattaccggttcgcagacggtgagcggcacctggaaaaccaacctcacgccagacaaactgggcgtggtggcgctggacccggatgcactctcaatcagcggtttgcacaactacgtgaagtatctgaagtcgagcggtcaggatgccggacgttatcagctcaatatgtggagcaaaatcttccagccgctatccgtggcggtgatgatgctgatggcgctgtcgttcatctttggcccactgcgtagcgtaccgatgggcgtgcgtgtggtcaccggtatcagcttcggttttgtcttctacgtactggaccagatcttcggcccgctgacgttggtttatggcatcccgccgatcatcggcgcactgttgccaagcgccagcttcttcttaatcagcctgtggctgttaatgagaaaatcgtaaccaagcaagggagcgaaagctccctttcacattgttgataaagtcaaatacgagttcgatcggtcccctcgcccctttggggagagggttagggtgaggggcacagaccgcacctgacttaccttcttcttccccccagcaaactccccaacatcccgcgtacaatctgattcgtcacctggcgggcggcgcttttcgccattgtttgcaccacaccatctttcttcccgccgcgtggtccggtagtgccaaacaaaatatcctttaatccaccaagaatgccgtcatccaccgccacctctttccctttcgcggggggattattttgctgctcggcgcttgcctgtacgcctttttgcaacatctcataggcggattcccggtccacctcatcctcgtacttgccatacaccggagagtgattaatcaagccattacgctcatcttccgtcaccggtcccatccgcgaacaaggcgcaatcaccatcgcccgttccaccactgaaggacttcctttcacatcaagaaacgagattaacgcctcgccggtccccagttcctggattgccttttcggtatcaaatgccggattggcccgcatggtttgcgccgcagcttttaccgctttctgatctttgggcgtaaaagcacgcaaagcgtgttgaacgcgattaccgagctgcccgagcacattatccggaatatcagacgggttttgcgaaacgaaccagacgcctacgccttttgagcgaataagccgtatcacctgctcaatcttatccagcagtacctgcggtgcatcgttaaacagcagatgtgcctcgtcgaagaaaaacaccagttttggtttctccagatcgcctgcttccggcaattgttcatacaactctgaaagcatccacagcaggctggcggcgtacagtttcggcatctgataaagcttctcggcgctgaggatattgataacgcctttaccgttggtatcggtgcgcatccagtctttgatatccagcatcggctcgccaaagaagtgtgctgcgccttgctgttccagcgataacagcccgcgctggatggcaccaaccgatgcgctactgatatttccgtactgattctggaaggatttggcgttatcgccgatgtactgggtaatcgcccgcaaatctttaaagtcgagcagtaacagcccctgatcgtcagcaatgcggaagatgatattcagcacgccagattgcacatcgttgagattcaacagtcgtgccagcaacagcggccccagatccgaaaccgtcgcccgcaccggatggcctttctcgccaaagatatcccacaccaccaccggattggcatgcggttgccagtcattgacgccgatatttttaagccttgcgagcagtttttccgacgccgttcctgcctgcgcgacgccggtcagatcgcctttcacatcagccataaacaccggcacgccgatttccgacaatgactccgccagtttttgcagcgtaacggttttacccgtccccgttgcgccggtaatcagcccatgacggttagccattcccggcaataaaaacagttttgtgtccggcgtgcgggcaattaacaggggttcgctcatgagatttcctccagtttcctgcctggagtataggcaacggctgtgcactcttcaccgctaaattcagcagattgcgagacgccttccaaagagatttaagtgccgggcgacaggcacccggcaaagggatcagaagtcggctttcaggaccactcggtagcgcgctttaccatcgcgtacatgctgaatggcgtcgttaattttcgacatcgggaacaattcggtagtcggcgcaaccttgctgcgggcggcaaagcgcatcagcttacgcagctcataaggtgtgccggttgctgaaccagagacgctgcggtcgcccgcaattaacgtaaaggccggaacagacagcggcgtgagaaccgcaccgaccgtatggaaattaccgccataggtcagcgcctcaaaataaggctgccagtcgaggctgacgttgacggtgttgataatgagatcaaactgccccgccagtgctttcagtgcctgcggatcgcggctattcaccactttatcggcacccatcgccagcaattcctgctctttcgccggattagaactaaaggccgtcacctcacatcccattgcgtgcagaagttttatagcgatatgccccagcccgccaataccaattaccccaacgcggctggtagcagtgatatggtgcatcaacagtggtttaaagaccgtgataccgccgcacaacagcggcccggcagattcaatgtcgatattttccggcagtggaatcacccattgccagtctacacgcaacttctcggcaaaacctccgcgattcataattgttggcaccgcaccttgctcacagttgatctgatttccgctaatacaggcgtcgcagtgaccacagctacgcgccgtccagccaatcccgacacgctgaccgacctgcaaacctttatcctgcgcggcactcccgagcgccaccacgcgaccaatcacctcatgcccggcaaccagcggatattgtgaaaatccccattcgttatcgatcatcgacagatcggaatggcagatcccgcagtaatccacctgcacttcaacatcttgtggcttcagctcaccgggatcgtactcataaacttccagttcgccgcccgcttcttttgcggcatagctttttatcattgacattttttggtccttctctggtgtggtctgggaagtgtagagcatggcagggcggggtgcatggagtgtgacaaaggttacacatcgctgtacgcaatgctgaaaatttcagcacttagcgagatgcgagcaagctggcgcttgcatggtggcgtgcgacaggtataatccacaacgttttccgcatacctcttcagtgccgaagtggcgaaatcggtagacgcagttgattcaaaatcaaccgtagaaatacgtgccggttcgagtccggccttcggcaccattagtacttccaagaccatccgagaaagtccatttatccctttaaaatcaatgcttgaatcgatttttaagtcctgagtcgtccgagatagtccgttgaaatccggatgccattgggggcataattgggggcatcttaacttcgattagaattgtgcccccaaatgaagctcacagccagacaggtcgagaccgcaaagccaaaagaaaaaacctacaaaatggccgacggcggcggtttgtatctcgagatttcggctaagggctctaaatactggcgcatgaaatacagacgcccctcagacaaaaaagaggatcgcctcgcttttggtgtttggcctactgtgacgctagctcaggcaagagtaaagcgcgatgaggctaaaaagctgctagtgcagggcattgacccaaaagccgaacagaaagaagttcaggccgagaattcgggggcatatacattcgaaaccattgctcgtgaatggcacgccagtaacaagcgctggagtgaagaccatcgatcgcgcgttcttcgctatcttgagctttatatattccctcacattggttcgtccgacattcgtcagctcaagactagccacctattagccccgattaaaaaagttgatgcaagtggtaagcatgacgtcgcgcagcgtcttcagcagcgtgtcacggctatcatgcgttatgcagtacagaacgattacatcgactcaaatccagccagtgatatggctggtgctctatctacaaccaaggtgcgacattaccccgctttaccctctagccgattccctgagtttcttgcacgtcttgctgcatatcgtggccgtgtaatgacaaggatcgcggttgagctttccttactaacttttgtgcgttccagtgagttgcgtttcgcgcgttgggatgaattcgacttcgataaatctctatggcgcatacctgcaaaacgaaaagaaattaagggtgtgcgttattcgtatcgtggtatgaagatgaaagaggagcatatcgttccgctgagtcgtcaggcgatgaatttgttagaccagttaaagcagattagtggtgataaagagctgcttttcccgggggatcatgacgcaactaaggttatgagtgaaaacacagtgaatagcgcattgcgtgcgatgggatatgacacaaaaaccgaagtctgcgggcatgggtttaggacgatggcacgtggtgcgctgggtgagtcagggttatggagtgatgatgctatagaacgccaactgagccattcagaacgtaataatgttcgggctgcctacattcacacttcagagcatttagatgagcgtaggctgatggtgcagtggtgggctgattatttagatataaatagaatgcaatatgtgacaccgtatgacttcgcaaaggaagaaaatctgtagaaattatatgctaacaatatataaaactcttatagtaataaaccatccattatttttaatggatggtttaagatgaattactagttttatgattgaatttaaattacttcgacattttgatcatcattagcactttgctgaacgtcgacattaatgtcatcatcattcggcagagccttataatattctcccatcatcattttataatgtgcagcattatcgctgtattcaaatattttctggaatatattgagatttttactaaccgagttttggtctagagcaatgtaaagatcgtcatttgaatgatgtgaaccgtcattaatccaagatatcaatgaattaaatgctattttttcatcaccatcaaaatgtttttcgagtttccatacattaaatccacctaaaattttaaagtaattttcaagaattcttctcattgtgttttgtactgttgtgcaattaatatcagggcgccttatctcactccatagtaaatcatatgaagttttaattggattgcatgcatggctttcaatgaacgataatttatcctttttcctaatgacccaaaatgtttcatcaggacgagcagtatctaaatttctattcatatcgaaagttaactctttatgaaaataaatattgtgagttaggaaaaagacctgttttatacggccattattgtctctaatgtcttttataagttttttcattaatgagctaactataaacagaatatcactatctaaacttgatataggatcatcaaagacaactactcgatcgttcattacaccagatgttgaattacttcctttgatgagattatagaaatataggaatgtgataaaagttttctcaccctcactgagtgtgcttagggcattatcaccattttcacgtacgattctatagctaaacgaatcggatgtcggtgcaaggctaaaatttttgaagccaaatgataaaagtatcttatttatagcagtgattgttggcgtgacactggttcttttagattcctcgctggatatattttcaatgatatcatctaatctgactttgtctttttctaaacccttaattaacccttccttagctctatttaactgttccttatcagtattatatttatttattttatcagccagttcaactttaactatataatgccatatttcttttgttagtttttctctttccatgctcctgtttttgtatagttcattattttcaaaaacttgattgttagctgcaagaatgatgtctaataattctttgccaggctctagaagtcctgtcatagcgacaggtgtacttaattcagccaattttctttttgcttcatctatattccttgataatattgatagaattaacttggattttgtgttaaacaaatccaaatcaaggaaggcatagttcccttcatttattttcgcaacatattcatcaaataaacgatactcatgagtataattttttagtaatacattaatgctttctgttttttctaaatattttgtgtcaaagtaactttctaaatccgatttcaaactactgggcgtattttgttggcaaaatggacatttggtttcaaggttatcatagtactttatcccttctttaacccagtcactgttatctagttgccttatgatttcggcaacgcttgcatcttcttttccaagaattttctctttccatatttcatcgtcaactattttttttatgttactaaaatttggtaagggaattatattgtgaactgttagcgagtctgagtaaacactaccagccttcgatattaagtatggtaactggtgtaaatctacttcttttgaatatagctcctctaatacctttgatttgaatttttcctggctgcttcttaaaccttcaaatgctttatagaagtaatcatcatgttttttcttttgattccagcaatcatttttgaaatccaattcaattttttcaagtttttgatagatacctaaatttgcattatcattgttatttaaatttcttttcttggaatctattgagctttgctctttatccctttgttgtatcaatttgtctatgttatctgtgagctcttttgtttcttcacctaaagtaaaaatacctttaatactatctccagaaaaattatttacaacaaaatccctgttgtagacataaggagttaattgattgttgtttttccatttaatctggcaaattggaaagcctaaagtattatgaattattttgctaattgtagtttttccagcaccatttgagccatatatgtaattgattttcattagaggcatcatatattgaacgtcatttccatatgaaccggcttgagaaacgcttatagactctatcattatctttttcatcctttagctttgtgtgaggggcgtgtcagtcacggattactattgcagaatatccatttgtttcaagatatgtttttatacagtggtaaataaacacagtggtaaataaacacagtggtaaataaacacagtggtaatcacaaaatattcaagtggtttagtgtcatagaaagtgagcatctacgcaagaatgtactaactctgagtttacaaaattaaataattaatatgcgcgcgcagtgctttccccgcctcgcccgcccgctttgcagggcggttttaatgcagttgcacagtcacgctcaggctgcgccgggaatggcgcggtctgcagaaaatgaggcaggaaaacgcatgcaaagccatgcaccttatcgatgcatggcttttttcagtaaaaacgggcggattttcggggaattttacacagactgacgtgatgccagttgcgcacttttacgcgaaaaaatcatgttctgcgcaggggtgaatttttcacggctgtcatccaccgaagccgcgtcaggcctgaatccgatggtcgttaaaatgtcactatcctgtgcggaataattaattttttcacccttcgcaagccaggacagaagggcttcacgcagggcatctgtggcacgctgtatggcacagtttcgggcaatggccgtcagctcactgtagcccatcagctccggtgccagtgccgccgccagtgctgtgccgtgctgctgcataaaatcattcagccggtcgcggatgctgatgtgctgaacggcttcatgcgaacgaatataacgaccggcggcctgattcacctg

SEQ ID NO: 39 - DNA, 70207 bp, Escherichia coli
  source 1..70207: mol_type = genomic DNA
tttacgcacctcttttcctaacaaaacgccagccatctcaaaattagaactagtgttagacatatatccaagcctatctcttattttaagatacatctactgtctggtatttcagggggccagctcactcagacttcctcagactttcctcatgcgcccgctgcattatcagaatgcttttaatcagggataacgggtcttttaaactttctcgtgtgtaatgttcaccatcgctcagtgtgactatatctacaccagcccttaagatacgacgtaatagctcagaagcaatatcaatatcctgacgtgagagacggtctaaactctcgattagtagtgtatcaccagctttaacaagccctttctcgatagcggttaaaaagtcacctaagccacctttcaagtgcttaccactaaaagcacttttccccaaatctttaaagctcaaggatgaatccaagtaaaactcagggttcttatcaagccagtcagtgaccagcttagattgtctgcgtacagagtccccttttagttgtcgttcacttgaaaatctgatgtagctgattgcccgtctcatattcaatacctaaaatgatgtgtttagggacccattatactgaagacaataccggaccacatattcagggcggagtggccggtaacaccaagctgctcaacgtagaggggtaagaagggcattaccagactgaaggcggccccggtaagaaaacagcctagccaggcgacgatcaggtttcgtttccagtttataggggtgtcattttcacagggtgacatagcaatccgctgttggtgcgccaggcgcggtgaacataagaagaaaagataagcacactaattatgcgcccgacttccagggggcgcaatccagagagcttttatcgctaaatcagggggatttgctgtggtaatgccggatgccattctgaagcatccggcatgggagatttaatagcgtgaaggaacgccttccgggcgtgttttaaagcgacggtgtaaccacatatactgctctggtgccatcatgatgcatttttcgaccactttgttcatccacgcggcggtagtttcggcatcatccagtggcggagaacactctggcggcagcataatcaattgataccctttgccatctggcttacggcgtggaacgaagggcaccagacatgcgccggacatccgtgccagcatccaggttccggtcgtggtcgcagcctgctcaacggcaaacaacgggacgaaaacgcttgagcgcgggccgtaatcatgatccggtgcgtaccagaccacttcgccttttttcagggctttaatcatgccttttaaatctttgcggtcgagcatcgatttatttgagcgcaaacggccccaggtttgtagccagtcaatcagtggattatcgttcgggcggtaaacgccaatccccggttcctgcataccaaactgccgcgcacccagctccagtgtcagaaaatggataccaactaacaggatgccgcgtttttgcgcctgcacgtcacgaatgtgttccatgccgatcacttccgtccagcgggcgattcggcggtccggccagaaccacgccatgccggtttccatcaggcccatgccaacggattcgaaattcttcaccaccattttacggcgttcttgttcgctcatttccgggaagcacagttccaggttgcgatgcacaatttttgcgcgtcgtttcataaaacgtaacgccagttttcctaatccacaaccgaggcggtagataaccgggtagggcaattgcacgactaaccaaagtacgccaatacccaaccaggttaaccaataacgcggatgaagcagtgcggtggagaacttgggtagattcgtcatatcaatcctgtttttcaacctattcgggcaattgtatgtattgtcgcattttttcgcccgcaaccaaaatttgtggctgaagactgggcgaaattgccgcgcttgtaaataacaaataatttttaatgcgcaaatgtagcgtaaaatgtgtggatgttaattatcgataattgctatatcatgccgcggatttttactttcccatctcgcaggaaccgtacaccatgccagtgttacacaaccgcatttccaacgacgcgctaaaagccaaaatgttggctgagagcgaaccgcgaaccaccatttcgttttacaagtatttccacatcgccgatcctaaggcgacccgtgacgctttatatcagctgtttaccgcgctgaatgtttttgggcgagtgtatctggcgcatgagggcattaacgcgcaaatcagcgtacctgcgagcaatgttgaaacatttcgcgcgcagctctatgccttcgacccggctttagagggtttacgcctgaatatcgcgttggatgatgacgggaaatccttctgggtactgcgcatgaaggtacgcgatcgcattgttgccgacggtattgacgatcctcactttgatgccagcaatgttggtgagtatctgcaagcggcggaagtgaacgccatgcttgacgatcccgatgcactatttatcgacatgcgtaaccactatgagtatgaagtggggcactttgaaaacgcgctcgaaattccggcagataccttccgtgagcagctgccaaaagcagtcgagatgatgcaggcacataaagataaaaaaatcgtcatgtactgcaccggcggcattcgttgtgaaaaggccagtgcctggatgaaacataacggattcaacaaagtctggcatatcgagggcggaattattgaatacgcccgtaaggcgcgcgagcagggcttgccggtgcgttttattggcaaaaattttgtttttgacgagcggatgggcgaacgtatatcggatgagattatcgcgcattgccaccagtgcggcgcgccgtgcgacagccataccaactgtaaaaatgatggctgccacctgctgtttattcagtgtccagtatgtgcggaaaaatacaaaggttgttgtagtgagatttgttgcgaagaaagcgcgttaccgccagaagaacagcgacgccgtcgggcaggacgtgaaaatggcaataagatctttaataagtctcgtggacgtctgaatacaacactgggcattcctgatccaacggaataaatatcattgccggatgcgtgccatccggcaacatttcactcttacttctgctgtacgccttccactgaaataatcagatccacttcctgagaagctggacctaaatctgtcttgatattgaagtccttgagcttaattttgccttcggcctcgaagcctgcacgtttaccaccccatgggtcgtcgccctgaccaattaatttcgcttccagcgtgacgggtttggttacgccattcagcgtcagatcgccggtaatatccagttcgtcaccgtctttcttcatgctggtggaggtgaatgttgcctgtggatattttgcggtattgaggaaatctgcactgcgaagatgtttatcgcgttcggcgtgattagtatcgacgctggtggtgttaattgtcacattcactttatcggcagccggatttttttcgtcaaaggtaaaagtaccgtcgaaatctttaaaggtgccgtataaccagctatagccaaggtgctggatgcggaaattaacaaaggcgtgctgaccttctttgtcaattttgtaatcggcggcaaccgctgaaccggcagagaacatcagggacgcgaaggttaaaccaagcaggctttttttcattttttatactccatagtcagatgacgactttcccagcatgcgcttcagagtgtcgtctttatcgatgaaatgatgcttcagggccataaatccgtgcataacggacagtactacgacgctccacgcgagccaaaaatgcagggcaccggcaaagtctgcctgtgcgccagcgtcggcaagggtcgcggggacgtcaaaccagccaaaaacgctgatcggtttaccatcggcagttgagatcagatagccgctgatgccgatggcgaacagcaataggtacaatgcgagatgtccagcttttgcggcaagacgagtcatgggcgaataactcggcagcggacccggcggtggagatatgacacgccacagaacgcgaataaccagccccatcattaacaaaataccgatgcttttatgcagttcgggtgctttgtgataccagccatcgtaataactgagcgtgaccatccacagacctaaagcaaacatgccgtagacaataattgcgcttagccaatggaaggccgcagatataacaccatagcgttcaggggtatttgtgaatgacataagtgcatccaaaacgaatttgcgagagaaagaaaatggcgtgtcggagaatgaattgcaacacaaaaataacaaattgaatgatatttatttttatttcaataattttgaattaataatgaaagaatcttcataagtttagtgggttcagcatcagagatgtccggtgagtgctgtagaagcaggaataatctcattcaatttttcacgctaaatgaaagggagattaaatatttgtcagtttatgtcagtgcggaaaactaaaaataaaacacatagatcagatccataattgccaacaatccccagagaaaaagataaagcatcagatgctcgcgaatattattgatgagatagtgcaacagccgacgcattaaatactcctgtaaaaacggcctcattctggaggccgtaatgatgattattggaagcgggaaagcctgaatggcgtcaaatcaaaatcgctttttttgtcttgcgcaaaatcggcagctatttcccctaaaactgacgcaaatttaaaaccgtgcccactcaggccggtaatgagcagtgtattatcgtggccgggtagggtatcgataataaaatcttcgtcaggcgaattatcataggtgcaggcagcgccgtacaggcagcaaccgatacccggcaatacattgcgcaagaacgggaaggcttccgaaccatcgctgaccacttccgcaaacggaacacgttcatccgctgaatggataacctggcctccgttatgtttgccaatcttcaacgcgtcgttttctgccggaaaaccataatattgatcgccattgggccgttcaccggtaaacgccgggaatttattcttcacgctatagcggccatcggcctgataccaggcaaatactttacgtacgggctggacaggcagctccgggagcaggtcttttacccatgttcccgcgcagacaatcgcttttttcgcctgatactcaccgtcaacggtttcaatagttacgccatcatcgtcatgacgaattgcggtgaccgggcagttgaacagttgcgcacagcccgcttccttcgccagttggatccaggttttaatcgccagttcgctgcgcaaaaaaccggaatcagtctcaaataagccgatgtagttgtccgggacgcgtatttctggccagcgggccataatcccttgcgcatcgagcttttcaacgttgagttgccactgttcggcgctgtgggcgacgttggcgagaaatgcggagtcagccgggccgaggttaatgacaccagagcgtacaaaaatgggatcatcttcgttgtggcgggaaagttcatcccacagcgtttgcgcgcggaggaccagcgggacatacttttcgccttcaccataagcatggcgaattaatcgcgtatcgccatggtggctgccgtgttgatgcggtggcatatgggcgtcggtcattagcacgtttaaaccggcgcgggttgcataatacccggcggcagcgcctacggaaccgctgccaataatgatgagatcgtatttcatttttttctctctgctctcatggtttaagcagagtaattaactgaatgcagatatacaacccagaaatggtaaaggcaccggtgaggtgccttttgggtggatggtcatgtcatgttaatgacgccgatactcgtttaccgggaaatcaccggattcaattttggcgattcctgcttctaatatcgaaataaattgtctggcaacatcagtggttaaccagagcgtctgaccaacttcagtcccttcctgctcggacttatttggggtctggtagtgcaaacgcaacatcagcgcatcatagctatcaacggtgctgatgtcccaccctacgagcggatgagtctgaatgacttcattatttttttccatcatggccccctaattcgtgttactagacaacgttattcgaggttcaatgcgtttttatctgaagcaacttcagtataccaataagtaagggtattcaccgaatttttaaaggggggaacagataaatttctgcttttaagatttatatgaacaataaaacagcatgtcattcatatttttttagcatattgtgcaattattttgaggaagtgtagaaattttgtactcaaaatttgtaagtaaaataaaaaagccggggcgacccggcaaaaacaaaaatcactgcatattattcgctgacaaaccagtcatcggcgctttcccacgtttcctggagaatttcgctaatgcgctgtttatcttcttttgttgcgccaataaccgataaattattcgctgcggcataacgtaccgatacgtggccttcattatcaggaaacgcatactgaatacggcgggaaagttcgccagccagggcgtcaatagccccagctggcaatggagaagttttcgctatggtgacttcaattcgcataatagccccctgttgaatatactggttatttatacaggtaaaataacctaatgacaacaggaagctacaatttttattgtttaacggaccagcgtaccgtttccccggcgaggaatggcaccagggtgtcatcagtcagtgcgatgctttcagcaacctgttgctcttcacgtaccagttcgatgaatgtgtcgttgaccggcaagccatagaactgcgggccgtttacagaacagaatgcttcaaagtgctgcagagcattcatctcttcaaagacggtagcgtaactgcccagcgcggttggggcgttgaagcagcccgcgcagccgcaactgctctctttgcgatgacgtgcatgtggcgcagaatccgtaccgaggaatactcgattaaaaccgctggcgaccagttcacgcaatgcctgttggtgaatattgcgtttgaggatgggtaaacaatacaggtgcggacgcacgccaccaaccagcatatggttgcggttaaacatcagatgctgcggagtgatggtggcagccagccgttcatttccgtcacggacatagtcggcagcatctttggtggtgatgtgctcaaaaacgactttcagcgcagtcaggcgctggcgcagaggttccatcacgctttctataaagcgcgcttcacgatcaaaaatgtcgatatctgcatgtgtcacttcaccatgcaccagtagcggcataccgattttttccatgcgctcaagtaccggcatgattgcgtcaattgacgtcacgccgtggctggagttagtggttgcgtttgccggataaagttttgcagcggtgaacacgccttcgttaaatccgcgctccagctcattaggatccagcgaatctgttaaataacaggtcatcaatggggtgaaattgtgcccggcaggtacggcatcaagaatacgttggcgatacgccacggcagcctcaactgtggtcacgggcggagccagattgggcattacgatagcccgtccataaatttcgctggtatacggcacgacagtttttaacatgtcgccatcgcggaggtgaaggtgccagtcgtctgggcggcggatctttaatacctgggatggtgcagtcattaatctctatgctccggctgaagggatgtttttgccggacacaaaggataagcggaaacgttttcctttgcacgaaaaataaagggcgcgaatgcgccctcgtcattaatccgtaaacggaatgacaatttcgcctggcttcacttcaatgcctttcgccagttttttcgccattgcttcgccctgactgccatcttcgcgcaggacgtaagcaggttgctggttaaagtaattgcgtaatgcctggttcaaatagggaagcaacgtttgcatcaccgtttgcattttttccggttgtaccgtcgcatcgaccacttccatctctttcaggaagatcgcacctttttctttatcaaacacgggcagcgctttcagcttcagtttcatggtcgctttctgactaccgaacagggagttcatgtccagattggcgtctccggttagggtaaccttattcggctcttcgcgaccaatttggctggtcaagtttgtcagaacaatatgggcgtcagccacgccgggtaaaccgatatcttttgagaaattattatgtttcgcaagcgactggttaatttcttgttcggtgatggtgtattgggtgagttgattacagccaacgagcaggccactgacgatcaatgcagcggcaaataaaaacttgttcatggtagtcctcgacatgaaatctgcgtcaatatcctgacacaacgcagcatgtgtcaccagcgataaactcgccagcagaaaaaactgaaaacggcggcaacccgcgaatacaggctgccgcggcgggtcaggattaaatcgccattgatgataacaaattgatttgtgtctgtttcgccatattatcgcggtaatcagcaacgcggcttggccagttgattccggctaccagcgtcagattacgcagtagcggaaatagctgaatatcatcttccgaaagttcgccattcacggcgttcggtttgacgatcagtttgtccagcgcacgtaaatcatcgctgatattcttaatcagaccgtcagagtgggccagcaggtcggcaaaattacccgcgctggcctctttcttgtcgacgaaatatttgcgcgcggcgggagtagaaaactcatcgaatgccgatttggcaaaacgcggcaacagcagtttgtttgcgtagccattgaccttgcgcagccactcttcaatggcaggggaacgtttgccggtcagtaacggtttgccgtcgagtttatcgacatagtgaacgatgtccatgctttctggcatatagcggctgtcatctttttgcagaatgggaacctgtttttgaccgaccatccgggtgggtgtttctgcgtcgtcgttgagcagaacatgtaattcgacggggatatttttcaggccgaaaatcatgcgggctttgaggcagtaagggcagtgatcgtaaatgtatagcttcacgtgactcctccatttggctgtcagttcactttcagtatggaggagtcaggggggagtatcaaatcaggcgtcgcgttccagcaaacgacgcgcggcgcgtttctgactaaactgccaacccagcgcaaggaaagtgaagatgccaataattcccagcatcatccacggaagctctggctggtgcgccgatttgcccaggtcaaacagccagccaccaccgatataaccaatagcgccgccaatcgccagacccagacggctaaaccccatatagctgccgcgagctcttgcgtccgccagcgaagcacttaaggtttcacgcgcaggctcggcaatgatcgacccgatataaaacagacaaatcagggtgaaaagttgttgcaggccgctgaccatgcccaccggcatcatgcttaatgacattatcaacagcccagccatcaaccggtgttccagacgaaaatgcttttcactccagcgggcgatagggtagagcaacgttaacgacagacacgcttcaatggcatacatccatttaacggcagagggtgcgccagccacgtcgttgaccataattggcagcatcagcatcacttgtacagccagcatgtagtaacccgccagcgtcaggacataggtgacaaaacgcttgtcacgcatcacgcgggtcatgccttcgcgaacgggcgtgcgtacggtggagagtttccatgccggtaacaaccacgcattgaacgccgcacacagcacaaacaaaacggcccctgtggcgcagaccaggcgaaagtcgtattgcaacagccagctccccaacaatgcgccaatgaccgcaccggcactgtcctgcatcatcaacagcgagaaaaaacgaccacgttgttgtggacggattagtttcaccaccagcgccgaacgcggcggatcaaacaacgtgccgccgagtcccgagagcaggcatgaaaaccacaatagccacggttcgtgggcgatacccattgtggcgaatccggcggcgcgcatcagcataccggtaacaatcatcggtttggcaccaaagcggtcggcaattgcgccgccgaaaatacccagaccttgctgaataaactggcgtagaccgagagcaataccgaccatgacggcggcccagcccatttgatcaacgaagcggatagagatcagcgggaagacaacaaagaaccccagcacgaccagcatattatcgatgagcaggaaatatttacccaggttcctcgcctgcgatacgcgggacatttcccctcccgggaaataaaagatgagcactttctattctgcattgccgctaagacttttcccatcacttaggggacaatatttttttatcaaaacgtcgctttgatagagagtttttatcaaatatgtgaataatgcagaaaatggcattttggacttttcacagggtctggttgcgcaggtatagtaatacttacagcgtattaaagacgttacgggaaggagtaggtatagaatgtttggctatcgcagtaacgtgccaaaagtgcgcttaaccacagaccgactggtcgtgcgtctggtgcatgatcgtgatgcctggcgtcttgcggattattacgcagagaatcgccatttcctcaagccctgggagccagtgcgcgacgaaagccactgttatccatcaggctggcaggccaggctggggatgattaacgaatttcataaacaaggttcagctttctactttggcttattcgacccggacgaaaaagagattattggcgttgccaatttttccaatgttgttcgtggctcttttcatgcctgctatctcggttattcgattgggcaaaaatggcagggcaaaggactcatgtttgaagccctgaccgcagccattcgttatatgcagcgcacccaacatattcatcgcattatggctaattatatgccgcacaataaacgcagcggtgatttactggcgcgactgggttttgaaaaagaaggctatgcgaaagactatctgttgattgatggacaatggcgcgatcacgtactgacggcattaactaccccagactggacgcccggccgctaaggagaatctcatgaaatatcaacttactgcccttgaagctcgcgtgattggttgcttgctggaaaagcaggtgaccacgccggagcaatacccgctctcagtcaatggtgtagtcacggcctgtaatcagaaaacgaaccgtgaaccggtcatgaatctgagtgaatccgaagtgcaggagcaactggataatctggtcaaacgccattatctgcgcacggtgagtggctttggtaatcgggtcaccaaatatgaacaacgtttttgtaattcagaatttggcgatctgaaactgagcgcagcggaagtggcgttaatcaccacgttgttattgcgtggtgcccagacgccgggtgaactgcgcagccgcgccgcgcgaatgtatgaattcagcgatatggcggaagtggagtcgacgctggaacaactggcaaatcgcgaagatggtccttttgtggtgcgtctggcccgcgaaccgggtaaacgcgaaagccgctacatgcatcttttcagtggtgaggtagaggatcagccggcggtaacggatatgtcgaacgcggttgatggtgatttacaggcccgcgtcgaagccctggaaatcgaagtggcagaactgaaacagcgtcttgattcgttgctggcccatctgggagattaaagtgaaaaaattacgtatcggcgttgtgggattaggcggcattgcgcaaaaagcgtggttaccggtgctggcggcagcgtctgactggatgttacaaggagcctggtcgcctacgcgcgcgaaagccctgccaatttgtgaaagctggcgcattccttatgccgattcgttatccagccttgccgccagttgcgatgcggtttttgtgcattccagcaccgccagccactttgacgtggtcagtacgttactcaatgcgggggtacatgtctgtgtcgataaaccgctggcagaaaatctgcgcgatgctgaacggctggtggaactggcggcgcggaaaaaactgacgttgatggtcggttttaaccgtcgtttcgcaccactctacggagagttaaaaacgcaactcgccaccgcagcttcgctaagaatggataaacatcgtagcaatagcgtcgggccacacgatctttatttcacgttgctggatgattatctgcatgtggtggataccgcgctgtggttgtcgggtggcaaagcctctctggatggcggtacgctactgactaacgacgctggcgaaatgctgtttgccgagcaccatttttcggctggtcctttgcagatcaccacctgtatgcatcgccgtgccggaagtcagcgtgaaaccgtgcaggccgtgactgacggtgcgctcatcgacattacggatatgcgcgaatggcgtgaggagcgcgggcagggcgtagtgcataaaccgattcctggttggcagagcactcttgaacaacgtggatttgtcggctgtgcgcggcacttcattgaatgtgtgcaaaatcagacagttccgcaaaccgccggcgaacaggccgtgctggcgcaacgtatcgttgacaagatctggcgcgatgcgatgagtgaataaaccctgtaacatctggcggtagcaattcaccataatccaggtagactattcgcctctttcagcgcctgccttgcaggcgttttgcccgtgggtctggattagaacaccgatgaatttattaaaatcgctggccgccgtcagctcgatgaccatgttttcgcgtgtgcttggcttcgcacgagacgcaattgtcgccagaatctttggcgcagggatggcaaccgacgcctttttcgtcgcttttaaacttcctaacttgttacgccgtatctttgccgaaggggcattttcccaggcatttgtaccgattctggcggaatataaaagtaagcagggtgaagacgccacgcgggtctttgtctcttatgtttctggcctgctgacactcgcgctggcggttgtgacggtcgctggcatgctcgccgcaccgtgggtgatcatggtgaccgcgccaggcttcgctgacacagctgacaaatttgccctgaccagccagctactaaagattacctttccctatatcttgctgatctccctggcgtcgctggtgggagcgattctgaatacgtggaaccgcttctcgattccggcgtttgcgccaacactgcttaacatcagcatgattggtttcgcgctgtttgccgcaccgtactttaacccaccggtgctggcgctggcgtgggctgttacggtcggcggcatcctgcagctggtgtatcagctaccgcacctgaagaagatcggcatgctggtcctgccgcgcattaacttccacgatgccggagcaatgcgcgtggtgaaacagatgggaccggcgatccttggcgtctctgtgagccagatctccttaatcatcaacaccatttttgcctcgtttcttgcttccggttcggtgtcttggatgtattacgccgaccgcttaatggagtttccgtccggtgtgctgggcgtggcgcttggcaccattttgctgccgtcgctgtcgaaaagttttgccagtggcaatcatgatgaatacaaccgtttgatggactgggggttgcgtctttgtttcctgttggcgctgccgagtgcggttgcgttgggcattctttcaggtccgttaaccgtttcgctgttccagtacggtaaatttaccgcgtttgatgcgctgatgacccagcgggcgttaattgcctactcggtgggtttgattggcctgattgtagtgaaagtgttggctcctggcttttattcccgccaggacattaaaacgccagtgaaaattgccatcgttacgctgattttaacgcaattgatgaacctggcgtttattggtccgttgaaacatgccgggctgtcactttctattggtctggcggcgtgtctgaatgcttcgctgctttactggcagttgcgtaagcagaaaatctttactccgcaacccggctggatggcgtttctgttgcgtctggtggtggcggtactggtgatgtctggcgtgcttttaggtatgttacatatcatgccggagtggtcattgggtaccatgccctggcgcttactgcgtttaatggcggtcgtgctggcggggattgccgcgtacttcgctgcactggcggtactgggcttcaaagttaaagaatttgcccgccggacggtgtaacaatgcattccggcctgcagtgcaggccggagataatattcagatcgaaatctttttaccgccgcgatgggttgttgaggtctgaccgttcgccccatatagcgtcggttcctgatgcggtttcaacatttccagcgcctgttgattgcgctcaatctgtccttccagtaaccagccgttatgttgattcatttggcgtagttgctgcgttttcacagtaatttcctgccagcgttgactaatatcaacgctatttgctggattgggttctttcttgcgtaactgttcgaggtaatccagcgtcgccagcagtgagcttttttgttctgtaatccattgcaactggctgccgttgatctgccccatagagagatgttgctgctcttgatccattaccgttttgagatcgttaagcacagcggacatctggtcgaggatctctgcaagacgtgtcatacgatcagttactctgcaagtcttgctgcgcttcgttgatcagcgcatcggcaattttgccggtgtccatttttagttcaccgttacgaatcgccagttttaacgcttcgacacgttcaagattgatatcactgctgccgggttgcatcagttttgcttgcgcgtcgcttaacgtcacactggtgctggtggaggcggttgtttttgccgcccggctgttcgttaccggcgcgtcagtggtttcgcgcggttgaacggtgcttacaggcttcagaggcgaagtgcgatcaatactcatggtttattcctcattgagggcgcttttatcatgtgttgcttatttatcggcaagggacgggtaatctttaacagcttacaggtttataagaatattcccatctgcatcaacaacgccgctgactacctgtcccgataccatgcgcacccgcgcattctgtgcgacggctgcattgttcagcgcctgaccttctgcgttggcgctaaacccatcaccgctggcgatcacattgacgcgttgtcccgcttttacccgccatgcctggcgaaactgggttaactggataggttgatcgggtgatagatcgcgcaggctaatggcatcaacaagttgattgatatccagcaccgtacgcggtggcagggtatccagccgtccgcgttttagtttgacattgccagcttccagctttcctccccgcacaatgggcatcgcggcaaccacataatttcctgtggcctgcacattaacctgtaaatatcgtttgtcgttaccgcagcgtgccaacacattcacattgccccacaggcgggaattattgctcatcgaaagtaatggctgctcgcatggcggtagtagattgggcgctgtacgaatagaaacacgaacctcatcacttacccccgcgagttgggcgctaaaaaagttgtgcaattgcgatgtgagattgctcgccgtacttaacggactgaacagtatcgcgatgatcgccacgctacgttttattgtcagcattttcgcccccagccatttctacaacgtgaattgtacctgtccgcaatgaccatcaacggcataaatagcgacccattttgcgtttattccgccgataacgcgcgcgtaaaggcatttaagctgatggcagaattttgatacctgcggaggagatatgctcgataagctcgacgccgccttacgttttcaacaagaggcgctcaatctgcgcgcccagcgtcaggaagtgctggcagcaaacatcgccaatgccgatacccctggttatcaggcgcgcgatatcgattttgccagtgaacttaaaaaagtcatgcaacgtggacgggatgcaaccagtgtggttgcactgacgatgacctcaacgcaacacatcccggcgcaggcgctgacgcctcctaccgcagaactgcaataccgtattccggaccagccttcgcttgacggtaataccgtcgatatggatcgcgaacgcacccagtttgccgataacagcctgcaataccagatgagccttagcgcgttgagcgggcaaatcaaaggcatgatgaacgttttacagagcggaaattaacggatggcactgctgaatatttttgatatcgccgggtcggcgttaactgcccagtcccagcgcctgaacgtggcggccagtaatctggcaaatgctgatagcgtgaccggtcctgatggacagccatatcgggcaaaacaggtggtattccaggttaacgctgcaccaggtgctgcgacaggcggcgtaaaggttgccgatgttatagaaagtcaggccccggacaaactggtttatgaaccgggtaatccgctggcagatgcaaagggctacgtaaaaatgccgaacgttgatgtcgtcggggagatggttaacaccatgtcggcgtcacgcagctatcaggccaacgttgaagtgctcaacacggtgaaaagtatgatgctgaaaacccttacgctcggtcaataaaggagaaagctatgtccattgcggtaaccaccaccgatccgacaaataccggcgtcagtaccaccagcagtagttcgctcacgggcagcaacgccgcagatttacaaagcagttttctgactttgctggtggcgcagctgaaaaaccaggacccgaccaatccaatggaaaacaacgagctgacgtcgcaattggcacaaatcagcacggtcagcgggattgaaaaactcaataccacgctcggatctatttccggacagattgataacagccagtcgttacaggccagtaacctgatcggtcacggcgtgatgatccccggcacaactgttcttgcgggaaccggcagtgaagaaggggctgtgaccacgaccacgccgtttggtgttgagctgcaacaggcggcagacaaagttacggccaccatcaccgataaaaatggcgcggttgtgcgcaccattgatattggtgaactgaccgctggagttcacagtttcacctgggacggtacgttgactgatggcagcactgcgccgaacggttcttacaatgtagcgattagcgccagtaacggtggtacacaactggttgcccagccgctgcagtttgctctggtgcagggtgtgatccgcggcaacagcggtaatacgctggatctcggcacttacggcaccaccaccctcgacgaagtacggcagataatttaagccttcacatttcaggagtcagtcatggccttttctcaagcggttagcggattaaacgctgccgccaccaacctcgatgttattggcaacaatatcgccaactccgccacctacggctttaaatcaggcacggcctcttttgccgatatgtttgccggttcgaaagtgggactgggggtaaaagttgccggtatcactcaggactttaccgatggcacgaccaccaacaccgggcgaggtctggacgttgctatcagccagaacggttttttccgtctggtagacagcaacggttcggtgttctacagccgtaacggacaatttaagctggatgaaaaccgtaacctggtgaatatgcaaggtttacagctgacgggttacccggcaaccggtacgccgccgactattcagcaaggggcgaatccgaccaatatttcgatcccgaataccctgatggcagcgaaaactaccaccacggcatcgatgcagatcaacctgaattccagtgatccgcttcctactgttacgccattcagcgccagcaatgcggatagctataacaaaaaaggttcggtgactgttttcgacagtcagggtaatgctcatgacatgagcgtctactttgtgaagaccggggataataactggcaggtctacacccaggatagcagtgatccaacaggtacagccgagcctgcaatgaagctggtgtttaatgccaatggcgttctgacctcaaatccaacagagaatattaccactggcgcaattaacggcgcagatcccgccacgtttagcctgagcttcctcaactccatgcagcaaaataccggcgctaacaatattgtggcaaccacccagaatggctacaaaccgggcgatctggtgagttatcaaatcaatgatgacggtacggttgtcggcaactattccaacgaacaaacacaactgctggggcagattgtactggcgaactttgccaacaacgaaggtctggcatccgaaggcgacaacgtctggtctgcgacgcaatcttctggcgtggcgctgttggggacagccgggacgggcaactttggcaccctgaccaacggtgcgttggaagcgtccaacgtcgatctcagtaaagaactggtcaatatgatcgttgcccagcgtaactatcagtctaacgcccagaccatcaaaacccaggaccagatcctcaacacgctggttaacttacgctaatcgctgacgggatagctcaatggatcacgcaatttataccgcgatgggagcagccagccagacgctgaatcaacaggcggtaaccgccagtaatctggccaatgcctctacgcccggttttcgcgcgcagttaaacgccttgcgtgcagtgccggtggaagggctttcactgcccacgcgcacgctggtaacggcgtcaacaccgggtgcagacatgacgcccggcaagatggattacacctcgcgcccgctggacgttgcattgcagcaggatggctggctggccgtgcagtccgctgacggcagcgaagggtatacgcgtaatggcagcattcaggttgatcccaccgggcaactgacaattcaggggcatccggtgataggcgaggctgggccaattgctgtgccggaaggggcggaaatcactattgctgccgatggcacaatctcggcgctcaatccgggcgatccggcaaatacggttgcgccagtggggcgtctgaaactggtgaaagccacgggcagcgaagtgcaacgcggtgacgacggcatttttcgtttaagcgcagaaagccaggccacgcgtgggccgatactgcaggcagatccaaccttgcgtgtgatgtcgggggttctggaaggcagtaacgtcaatgccgttgcggcaatgagcgacatgattgccagcgcgcggcgttttgaaatgcagatgaaggtgatcagcagcgtcgatgataacgcaggccgtgccaaccaactgctgtcgatgagttaattgaacgattgatgacattgcaataaaagcgcgcggactattccctcgcccctttggggagagggttagggtgaggggaaattcacactgtcgcgtgcttctgctctgcttgtcactaatccactacaggacattttatgatcagttcattatggatcgccaaaacgggccttgacgcccagcaaaccaatatggacgtcattgccaacaacctggcaaacgtcagtactaacggttttaagcgtcagcgcgcggtgtttgaagatctgctttatcaaaccattcgccagccgggggcacagtcttccgaacaaaccaccttaccctccggattacaaatcggcacgggggtacgcccggtcgccactgaacgcttacacagccagggaaacctgtcgcagaccaacaacagcaaagatgtcgcgattaaagggcagggctttttccaggtgatgttgccagatggttcatcagcctatacccgtgacggctctttccaggtggatcagaacgggcagctggtgacggctggtggttttcaggtgcagccagcgatcaccattccggcgaatgcgttaagtatcaccatcggtcgtgatggcgtggtcagcgtaacccaacaaggccaggcagctccggttcaggttgggcagctcaatctcaccacctttatgaatgacaccgggctggagagcattggcgaaaacctctacaccgaaacgcaatcctctggtgcaccgaacgaaagcacgccgggcctgaacggcgcgggactgctgtatcaagggtatgttgaaacgtctaacgtcaacgtggcggaagaactggtcaatatgattcaggtgcaacgcgcttacgaaatcaacagtaaagcggtgtccaccaccgatcagatgctgcaaaaactgacgcaactctaaggcttaaccggtggcaggttcaccggtttactgatttttgaagatgatagccatgcaaaaaaacgctgcgcatacttatgccatttccagcttgttggtgctttcactaaccggctgcgcctggataccctccacgccgctggtgcagggggcgaccagtgcacaaccggttcccggtccgacgcccgtcgccaacggttctattttccagtctgctcagccgattaactatggctatcaaccgctgtttgaagatcgtcgaccacgcaatattggcgatacgctgaccatcgtgttgcaggagaacgtcagcgccagcaaaagctcctctgcgaatgccagccgtgacggtaaaactaattttggctttgatactgtgccgcgctatttgcaggggctgtttggtaacgctcgtgccgatgtcgaagcctccggtggtaacacgttcaacggaaagggcggggccaatgccagcaatacctttagcggcacgttgacggtgacggttgaccaggtactggtcaacggcaacctgcatgtggtgggtgaaaaacagattgccattaatcagggtaccgaatttattcgcttctctggcgtggttaatccacgcactatcagcggcagcaataccgtaccgtctactcaggtggcggatgcgcgcattgaatacgtaggcaatggctacattaacgaagcgcaaaatatgggctggttgcagcgtttcttccttaacctgtcgccaatgtaagtgaggctgtggtgattaaatttctctctgcattaattcttctactggttacgacggcggctcaggctgagcgtattcgcgatctcaccagtgttcagggggtaaggcaaaactcactgattggctatggtctggtggtggggctggatggcaccggtgaccagacaacccagacgccgtttaccacacaaacgcttaataacatgctctcacagctgggaattaccgttccgacgggcaccaatatgcagctaaaaaacgtcgctgcggtaatggtgacagcgtcacttcctccgtttggacgtcaggggcaaaccatcgatgtggtggtttcttccatgggaaatgccaaaagcttgcgtggaggtacgttgttgatgacaccgcttaagggcgttgacagtcaggtgtatgcgctggcgcagggcaatattctggttggcggcgcaggagcctccgctggcggtagcagtgttcaggttaaccaactgaacggtggacggatcaccaatggtgcggttattgaacgtgaattgcccagccagtttggcgtcgggaatacccttaatttgcaacttaacgacgaagatttcagcatggcgcagcaaatcgctgacaccatcaaccgcgtgcgtggatatggcagcgccaccgcgttagatgcgcggactattcaggtgcgcgtaccaagtggcaacagttcccaggtccgtttccttgcagatatccagaatatgcaggttaatgtcaccccgcaggacgctaaagtagtgattaactcgcgcaccggttcggtggtgatgaatcgcgaagtgaccctcgacagctgcgcggtagcgcagggaaatctctcagtaacagttaatcgtcaggccaatgtcagccagccagatacaccgtttggtggtggacagactgtggttactccacaaacgcagatcgatttacgccagagcggcggttcgctgcaaagcgtacgttccagcgccagcctcaataacgtggtgcgcgcgctcaatgcgctgggcgctacgccgatggatctgatgtctattttgcaatcaatgcaaagtgcgggatgtctgcgggcaaaactggaaatcatctgatgatcagcgacagcaaactactggcaagtgcggcctgggatgcgcaatcactcaacgaactaaaggcgaaagcgggcgaagacccggcggcaaatatccgtccggtggcccgtcaggtggaagggatgttcgtgcagatgatgttgaaaagcatgcgcgacgctttaccaaaagatggcctgttcagcagcgagcacactcgcctgtataccagtatgtatgaccagcagattgcccaacagatgacggcgggcaaaggtctggggcttgcagagatgatggttaaacagatgacgccagaacaaccattgccagaggagcccacgccagcagcaccgatgaaattcccgctcgaaaccgtggtgcgttatcaaaatcaggcgctttcgcagctggtgcaaaaggccgtgccacgtaactacgatgattcgctgccgggtgacagtaaagcattcctcgcgcaactctcgctgcccgcccaactggcaagccagcaaagcggtgtgccacatcatttgatcctcgctcaggcggcgcttgaatctggttgggggcaacggcaaatccgccgcgaaaacggcgagccaagctataacctgtttggtgtcaaagcctctggcaactggaaagggccagttactgaaatcaccacgactgaatatgaaaacggcgaagcgaagaaagtaaaagcgaagtttcgggtctacagctcgtatctggaagcattgtcggattacgttgggttgttaacacgtaacccgcgctacgctgccgtgacgaccgccgcgagtgcggaacagggggcgcaggccctacaggacgcgggctatgccaccgatcctcactatgcccgtaaactcaccaacatgatccagcagatgaaatcgataagcgacaaggtgagcaaaacctacagtatgaacattgataatctgttctgaataactcaagtccggcgggtcgctgccgataatactctgtaattgaaggcttataaggaacctccatgtccagcttgatcaataacgccatgagcggactgaacgcggcccaggcggcgttaaatacggcaagtaataatatctccagctataacgttgctggatatacccgccaaaccactattatggcgcaggccaatagcacgttgggcgctggcggctgggttggcaatggcgtcaacgtttctggtgtgcagcgtgagtatgatgcgtttattaccaaccagttacgtgcggcgcagacgcaaagtagcggcctgactgcccgctatgagcagatgtcgaaaatcgacaatatgctctccaccagtacctcttcgctggcaacacagatgcaggatttcttcaccagcctgcaaacgctggtgagtaacgcggaagacccggcagcgcgccaggcgctgattgggaaatcagaagggttggtgaatcagtttaaaaccaccgatcagtatcttcgcgaccaggacaaacaggtcaatatcgcgataggtgccagcgttgatcagatcaacaattacgctaaacaaattgccagcctgaacgatcaaatctcgcgcctgacaggcgtgggggcaggggcgtcacctaacaatctgctggatcaacgcgatcaactggtgagcgaattaaaccagattgttggcgtagaagtcagcgttcaggatggcggtacttataacatcacgatggccaatggttactcactggttcagggaagtacggcgcggcaactggcggcagttccttccagcgccgacccttctcgtacgactgtcgcttacgttgatgggacggcaggcaatattgagatcccggagaaattactgaataccgggtcgctgggcggcattctgacattccgttctcaggatctggaccagacgcgtaatacgcttggacaactggcgctggcatttgccgaggctttcaacagccaacacaaagccggatttgatgctaacggcgatgccggtgaagatttctttgctatcggtaagcccgcggttctgcaaaacacgaaaaacaaaggtgacgttgcgatcggtgccacggtaactgatgcctccgcggtactggcgacagattacaaaatctcgttcgataataatcagtggcaggtcacccgccttgccagcaataccacttttacggtgacgccggatgccaacggtaaagtggcatttgatggtctggagttgacgtttacaggaacgcctgccgttaacgacagcttcacgctgaaaccagtaagtgacgccatcgtcaacatggatgtattaatcaccgacgaagcgaaaatcgcgatggcgagcgaagaagatgcaggtgatagcgacaaccgcaacggtcaggccctgctggatctgcaaagcaacagtaaaacggtgggcggtgcgaaatcctttaacgacgcttatgcctcgttagtgagtgatatcggtaataaaaccgcgacgttgaaaaccagtagcaccacgcaaggtaatgtggtgacgcagctttccaatcagcagcagtcgatttccggtgtcaatctcgatgaggagtacggaaatctgcaacgttttcagcagtattacctggcgaatgcgcaggttctgcagacggcaaacgcgatttttgatgcgctgattaacattcgctaaggggagataagatgcgtttcagtacccagatgatgtaccagcaaaacatgcgtggcatcaccaattctcaggcggaatggatgaagtacggcgagcagatgtcgacaggtaagcgagtcgttaacccttctgacgatcccattgcagcatcacaagcggttgttctctcccaggcacaggcgcaaaacagccagtacacgctggcgcgtactttcgccactcaaaaagtgtcactggaagagagtgtacttagccaggtcaccactgctatccagaatgctcaggaaaaaattgtctacgccagcaatggcactttgagtgacgatgaccgggcctcgctggctacggatatccaggggcttcgtgaccagttgctgaatctggcgaacaccactgacggtaacgggcgctacatttttgccggttataaaacagagactgcgccgtttagcgaagagaaagggaaatacgtcggtggagcagaaagtattaggcaacaggtcgatgcttcgcgttcgatggtgataggacatacgggcgacaaaattttcgacagtattaccagtaacgcggtagcggaaccagacggtagcgcttctgaaaccaatctttttgccatgctggatagcgccatcgcagccctgaaaacgccggtcgcggatagcgaagcggataaagaaatcgccgctgcggcattggataaaaccaaccgtggactgaaaaactcgctgaataatgtccttaccgttcgcgcgggattaggcacgcagctgaacgaactggagtcgctggattcattaggtagcgatcgcgctttagggcaaacgcagcagatgagcgatctggttgatgtggactggaatgcaactatttcatcttacatcatgcagcaaacggcattgcaggcatcgtataaagcatttaccgatatgcagggattgtcgctcttccagctcaacaaataagctcgctttaaaacatatcatgaaactgggtatgttttgtctgcctgctctgggatcgccggggcgggcattttttttgcctattttgcattgttggttagcaaggatgccatttgatgaattttaatatgttgattcaaagatgaaataaaaaagccctggcagttaccagggcttgattactttgagctaattattactcaacaggttgcggacgcgcaggagcggcagaggcatgatgcgttgccgtatgaccacctgcggcacctttaccttcgaaggcaaaagtagggcgctgccagtcactgtgacgcggtgcctccggaacatattccggtgccggagcgcgcgtcattggcgcggtagcgtggttatgctcaacggtgatctctggttcaaccgcggctaccgtttcaacttctgctgcgacttcagcgacgactggcgcggcaggttgagcaacaacttcaggttcagcaaccacaacctcagcagtttcggcaacttcttcaatatctgccgtctcttcctgcggttcaaccaccggttctgcgtgttctgcgacttcctgggctacggcaacatcagactcggtaatcacctgcggctgttcagttaccgcggcggcaatcacttcaggatgcgtcgtttcaaccacttccggttgcggttcggcaaccggtacgggggcttctacgacttcagccatttcttcaacaactggcgcgctaacaaccggttcgatagcggcggcgacagggacctcagtcaccatcggctgcacatgtacttcttcctgttcgcgctgctcttcaacctgtacatcttgcggacgtacaattggatagcggatccagactttgccagaggccagttccggagacgcgcacgctacggtcaacggcattggcgactgggttggataacgctcgtcacgatagcgacgacgacgctgaccacttacgcgcaggtgacgaggcgagcggcgagaacgacgcggcatgccaccgttgtcacggttatcagcattgttctcttcttgctgttctggtgcagtttgcgctacgactggcagcgggactttcaccagttctgtgcgtggagctggcgcttcctgaacaattggttcggcagcgacagtttcttcaaccaccggtgcgactaccgcttcttcggctacgctttgctcgtaacgcactttctgattgagctgacgctgtttacgacgcggctgaaccggacgtacacgttcttcctgttcggtttcctgaacagattgctcttcaacattcagcgccttcgcttcttgttgcgcctgacgtttatcatcattacggcggcggctacgttcacgacgcggcgcttgctgctcgtcggtggtacgcgctttttccgttacctcagcttgctgacggctctcacgcgtctcggcagtctgctgctgtgcctggcgacgattacgacggttttcttcgcgattatcgctgccttcagtacgttcactacgggtgtcgcggcgctcattacggtcacggcggttgttctgacgaggcttgcgacgatcctgttgacgttccggtttcgcttctgctttcggtgctggttgctcggtcggtttggtttcttcactaccgctgaacagcgctttcagtgcgccgaagaagcggctcaacagcccaggttgtgcaggagttgctggtgttgccggtgcagctttcggtgctggggctacaacaggcgcggcaggttcagctggcgttggcgctggcggcacatccggcatggcaaaggttgccagcgcaggttgttccggacgcttacgttcagcgaactcttcttcagacggcagcgccatcgcttcttcatgcagcttcggcagcatgtagcttaaggttggggtttcttcccctttacgcacgcgcagcacgtggtagtgcggggtttccatctgatcgtttggcacaattacacagcgcacaccgtcctgacgagtttcaatggcatttaccgcagaacgtttttcattcagcaggtaagaagcgattggcacaggaacaatggcgtgaacttcctgggtgttctctttcagcgcttcttcttcgatcagacgcagaatagagagcgacagcgattcgttgtcacgcacggtgccagtaccagaacaacgcggacaaacgtgatgactggattcacccagtgatgggctaaggcgctgacgggacatttccagcaggccaaagcgagaaatatggctgatttgaatacgcgcacggtcctgacgcaccgcttcacgcagacggttttctaccgcacgctggtggcgtacaggcgtcatgtcgatgaagtcgataacaatcaggccgccgaggtcacgcaggcgcagctgacgagcaatctcatcggcagcttcgaggttggtgttaaacgcggtttcttcgatatcgccgccgcgggtcgcgcgtgcggagttgatgtcgatggccgttaacgcttcggtgctgtcgataacaatggaaccaccggatggcagacggacttcacgctggaaggcggactcgatctgcgactcgatctggtagtggctgaacagcgggatctcgccggtgtatagtttgattttgctgctgaaatccgggcgacctaatgcagcgatatgctgacgtgccagttcgagcactttcgggttatcgataaggatttcgccgatgtcctgacgtaagtaatcgcggaatgcgcgaacgattacgttgctctcctgatgaatcaggaacggggccgggcggctttcagcggcttttttgatggcttcccagtgtttcagacggaagcttaaatcccattgcagcgcctcagcagatttgccgacgccagcggtgcgcacgataagccccatgccttccggcagttcaaggcttgccagtgcttcttttaattcggtacggtcgtcgccttcgatacggcgagaaatgccacccgcgcgcgggttgttcggcatcagaaccagatagctacccgccagactgataaaggtggttaatgccgcgcctttgttgccgcgctcttctttatcgatctgaacaatgacttcctgaccttcacgcaacacatctttaatgttgggacgaccatgagcactgtagttagcagggaaatattcgcgggcaatttcttttagtgggaggaaaccgtgacgttcagcgccgtaatcaacaaaagcagcttccagactcggttcaatgcgggtgattttacctttgtagatgtttgcctttttctgctcgtgccctggactttcgatatccaggtcatacagacgctgcccatctacaagggcaacgcgcaactcttcctgctgagttgcgttgattaacattcttttcatcgtaacttactcattattcttacattgacgactaagctgcgggcaaagtaacgcctttccgggtgtgaaccgatggcctcgtgtctagtcgcgtcgccaacctcacggttatcgtcagctcaaagaggcgcagagtgtcggttgcccgtttttcatgcggaaaaacagcgcaattatcaaagaaacagactgggtattactctccagaaatatttccatctaccggtaaggactgcaacccgcagcccgctaactgcctgaaagatcaatacgtcttacgccattgctgcgtggatgatcggtcgggcaaaatgggttattccgtaaaatttcttgttttaacaaggatggacacggaaacggcctcattattccactgcaagccttgttatagcaagatgacttttaccatttatcacccgcttactcacagttttttcacttcttgctggtgattggtttaataaccatcaataaagtgatcacgtagtgaagtaataaggtgcaaaactaaatataagcatagaaaaatgagtggcgcgaatcctgttggctaattagaatcgcccaccatgaaaacagagactccatccgtaaaaattgttgctatcaccgctgacgaagcggggcaacgtatcgataactttttgcgtacccaattgaaaggcgtaccaaaaagtatgatttaccgtattttgcgtaaaggcgaagtgcgggtgaacaaaaaacgtattaagcctgaatataaactcgaagcgggtgatgaggtgcgtatcccaccggttcgcgttgctgagcgggaagaagaggcggtttcgccacatctgcaaaaggtggcggcgctggcggacgtcatcttatatgaagatgatcatatcctggtgctgaataaaccttccggtacggcggtacatggcggcagtggtttaagcttcggcgttatcgaaggtttgcgggcgttgcgcccggaagcgcggtttcttgaactggttcatcgtctcgaccgggacacttcaggtgtgttgctggtagcgaaaaaacgctcggcgttgcgttctctgcatgagcaattacgtgaaaaaggaatgcaaaaagattacctggcgctggtgcgcggtcagtggcagtcgcatgtgaagagcgttcaagcgccgttattgaaaaatattctgcaaagcggcgaacgtatcgtgcgtgtcagtcaggaaggcaaaccgtcggaaacacgctttaaagtggaagaacgctatgcatttgccaccctggtgcgttgtagcccggtaaccggacgtactcatcagatccgtgtgcatacacagtatgcgggtcatccgattgcctttgacgatcgctacggtgaccgtgaatttgacagacagctcactgaagcaggcacgggattaaatcgtctgttcctgcacgccgcagcgttgaagtttacccatccggggaccggtgaggtgatgcgtatcgaagcgccgatggatgaaggtttgaaacgttgtttgcaaaagctgcgtaacgcgcgctaatacaagcagataagcctgataatgggcggttggcctgataaggcgtttacgccgcatcaggccgccagcaccgattgccggatgcgaagtaaccgcatccggcgcaaaaaactatcccatcagcgggtttttcccttcccgacgtaacatctgacacagcgcgattagcggtaaaccaaccagcgtgttaggatcacgcccctctaaacgctcaaacagcgtaatgccaaatccttcactcttaaagctacccgcgcagtgcaggggatgctctttacgcacgtaattatcaatctccgcctcgctcaggtgacggaaatggacgtcaaaaggctccacttctgtttgcagatgcccattcgccgaattaaacaacgccagtccagtatagaaggtgacgatattgccgctggctttgcgtaattgcagacgggcattttcttccgttaacggtttaccggtgatttcgccatcaagaacacatacctggtctgaaccaataattaaatgatccggataacgtgacgccagagattgcgctttttcttgtgccagtcgaagcaccaactgtcgcggtgattcgtcgctgcgtggggtttcgtcgacctctggtgctgcacattcaaaagagatttgcagtttttccagaagagcgcgacgccatggcgaggtggaggctaaaataagtttaggcatatttttttccatcagatatagcgtattgatgatagccattttaaactatgcgcttcgttttgcaggttgatgttcgttatcagcactgaacgaaaataaagcagtaacccgcaatgtgtgcgaattattggcaaaaggcaaccacaggctgcctttttctttgactctatgacgttacaaagttaatatgcgcgccctatgcaaaaggtaaaattacccctgactctcgatccggttcgtacggctcaaaaacgccttgattaccagggtatctatacccctgatcaggttgagcgcgtcgccgaatccgtagtcagtgtggacagtgatgtggaatgctccatgtcgttcgctatcgataaccaacgtctcgcagtgttaaacggcgatgcgaaggtgacggtaacgctcgagtgtcagcgttgcgggaagccgtttactcatcaggtctacacaacgtattgttttagtcctgtgcgttcagacgaacaggctgaagcactgccggaagcgtatgaaccgattgaggttaacgaattcggtgaaatcgatctgcttgcaatggttgaagatgaaatcatcctcgccttgccggtagttccggtgcatgattctgaacactgtgaagtgtccgaagcggacatggtctttggtgaactgcctgaagaagcgcaaaagccaaacccatttgccgtattagccagcttaaagcgtaagtaattggtgctccccgttggatcggggataaaccgtaattgaggagtaaggttcatggccgtacaacagaataaaccaacccgttccaaacgtggcatgcgtcgttcccatgacgcgctgaccgcagtcaccagcctgtctgtagacaaaacttctggtgaaaaacacctgcgtcaccacatcactgccgacggttactaccgcggccgcaaggtcatcgctaagtaatcacgcgtctgcgtgatgaagcttagtgaggattttccccaggcaactggggaaagaccaaaccgggcggcgacgataccttgacacgtctaaccctggcgttagatgtcatgggaggggattttggcccttccgtgacagtgcctgcagcattgcaggcactgaattctaattcgcaactcactcttcttttagtcggcaatcccgacgccatcacgccattacttgctaaagctgactttgaacaacgttcgcgtctgcagattattcctgcgcagtcagttatcgccagtgatgcccggccttcgcaagctatccgcgccagtcgtgggagttcaatgcgcgtggccctggagctggtgaaagaaggtcgagcgcaagcctgtgtcagtgccggtaataccggggcactgatggggctggcaaaattattactcaagcccctggaggggattgagcgtccggcgctggtgacggtattaccacatcagcaaaagggcaaaacggtggtccttgacttaggggccaacgtcgattgtgacagcacaatgttggtgcaatttgccattatgggctcagttctggctgaagaggtggtggaaattcccaatcctcgcgtggcgttgctcaatattggtgaagaagaagtaaagggtctcgacagtattcgggatgcctcagcggtgcttaaaacaatcccttctatcaattatatcggctatcttgaagccaatgagttgttaactggcaagacagatgtgctggtttgtgacggctttacaggaaatgtcacattaaagacgatggaaggtgttgtcaggatgttcctttctctgctgaaatctcagggtgaagggaaaaaacggtcgtggtggctactgttattaaagcgttggctacaaaagagcctgacgaggcgattcagtcacctcaaccccgaccagtataacggcgcctgtctgttaggattgcgcggcacggtgataaaaagtcatggtgcagccaatcagcgagcttttgcggtcgcgattgaacaggcagtgcaggcggtgcagcgacaagttcctcagcgaattgccgctcgcctggaatctgtatacccagctggttttgagctgctggacggtggcaaaagcggaactctgcggtagcaggacgctgccagcgaactcgcagtttgcaagtgacggtatataaccgaaaagtgactgagcgtacatgtatacgaagattattggtactggcagctatctgcccgaacaagtgcggacaaacgccgatttggaaaaaatggtggacacctctgacgagtggattgtcactcgtaccggtatccgcgaacgccacattgccgcgccaaacgaaaccgtttcaaccatgggctttgaagcggcgacacgcgcaattgagatggcgggcattgagaaagaccagattggcctgatcgttgtggcaacgacttctgctacgcacgctttcccgagcgcagcttgtcagattcaaagcatgttgggcattaaaggttgcccggcatttgacgttgcagcagcctgcgcaggtttcacctatgcattaagcgtatccgatcaatacgtgaaatctggggcggtgaagtatgctctggtcgtcggttccgatgtactggcgcgcacctgcgatccaacagatcgtgggactattattatttttggcgatggcgcgggcgctgcggtgctggctgcctctgaagagccgggaatcatctccacccatctgcatgccgacggtagttatggtgaattgctgacgctgccaaacgccgaccgcgtgaatccagagaattcaattcatctgacgatggcgggcaacgaagtcttcaaggttgcggtaacggaactggcgcacatcgttgatgagacgctggcggcgaataatcttgaccgttctcaactggactggctggttccgcatcaggctaacctgcgtattatcagtgcaacggcgaaaaaactcggtatgtctatggacaatgtcgtggtgacgctggatcgccacggtaatacctctgcggcctctgtcccgtgcgcgctggatgaagctgtacgcgacgggcgcattaagccggggcagttggttctgcttgaagcctttggcggtggattcacctggggctccgcgctggttcgtttctaggataaggattaaaacatgacgcaatttgcatttgtgttccctggacagggttctcaaaccgttggaatgctggctgatatggcggcgagctatccaattgtcgaagaaacgtttgctgaagcttctgcggcgctgggctacgacctgtgggcgctgacccagcaggggccagctgaagaactgaataaaacctggcaaacccagccagcgctgttgactgcatctgttgcgctgtaccgcgtatggcagcagcagggcggtaaagcaccggcaatgatggccggtcacagcctgggggaatactccgcgctggtttgcgctggtgtgattgatttcgctgatgcggtgcgtctggttgagatgcgcggcaagttcatgcaagaagccgtaccggaaggcacgggcgctatggcggcaatcatcggtctggatgatgcgtctattgcgaaagcgtgtgaagaagctgcagaaggtcaggtcgtttctccggtaaactttaactctccgggacaggtggttattgccggtcataaagaggcggttgagcgtgctggcgctgcctgtaaagctgcgggcgcaaaacgcgcgctgccgttaccagtgagcgtaccgtctcactgtgcgctgatgaaaccagcagccgacaaactggcagtagaattagcgaaaatcacctttaacgcaccaacagttcctgttgtgaataacgttgatgtgaaatgcgaaaccaatggtgatgccattcgtgacgcactggtacgtcagttgtataacccggttcagtggacgaagtctgttgagtacatggcagcgcaaggcgtagaacatctctatgaagtcggcccgggcaaagtgctaactggcctgacgaaacgcattgtcgacaccctgaccgcctcggcgctgaacgaaccttcagcgatggcagcggcgctcgagctttaaaagaggaaaatcatgaattttgaaggaaaaatcgcactggtaaccggtgcaagccgcggaattggccgcgcaattgctgaaacgctcgcagcccgtggcgcgaaagttattggcactgcgaccagtgaaaatggcgctcaggcgatcagtgattatttaggtgctaacggcaaagggctgatgttgaatgtgaccgacccggcatctatcgaatctgttctggaaaaaattcgcgcagaatttggtgaagtggatatcctggtcaataatgccggtatcactcgtgataacctgttaatgcgaatgaaagatgaagagtggaacgatattatcgaaaccaacctttcatctgttttccgtctgtcaaaagcggtaatgcgcgctatgatgaaaaagcgtcatggtcgtattatcactatcggttctgtggttggtaccatgggaaatggcggtcaggccaactacgctgcggcgaaagcgggcttgatcggcttcagtaaatcactggcgcgcgaagttgcgtcacgcggtattactgtaaacgttgttgctccgggctttattgaaacggacatgacacgtgcgctgagcgatgaccagcgtgcgggtatcctggcgcaggttcctgcgggtcgcctcggcggcgcacaggaaatcgccaacgcggttgcattcctggcatccgacgaagcagcttacatcacgggtgaaactttgcatgtgaacggcgggatgtacatggtctgaccgcgatttgcacaaaatgctcatgttgcgcgcagtctgcgtggttatgagtaataattagtgcaaaatgatttgcgttattggggggtaaggcctcaaaataacgtaaaatcgtggtaagacctgccgggatttagttgcaaatttttcaacattttatacactacgaaaaccatcgcgaaagcgagttttgataggaaatttaagagtatgagcactatcgaagaacgcgttaagaaaattatcggcgaacagctgggcgttaagcaggaagaagttaccaacaatgcttctttcgttgaagacctgggcgcggattctcttgacaccgttgagctggtaatggctctggaagaagagtttgatactgagattccggacgaagaagctgagaaaatcaccaccgttcaggctgccattgattacatcaacggccaccaggcgtaagtgaacatctccaggcggtcgttcgaccgcctgagttttatctttttgtcccactagaatcattttttccctccctggaggacaaacgtgtctaagcgtcgtgtagttgtgaccggactgggcatgttgtctcctgtcggcaataccgtagagtctacctggaaagctctgcttgccggtcagagtggcatcagcctaatcgaccatttcgatactagcgcctatgcaacgaaatttgctggcttagtaaaggattttaactgtgaggacattatctcgcgcaaagaacagcgcaagatggatgccttcattcaatatggaattgtcgctggcgttcaggccatgcaggattctggccttgaaataacggaagagaacgcaacccgcattggtgccgcaattggctccgggattggcggcctcggactgatcgaagaaaaccacacatctctgatgaacggtggtccacgtaagatcagcccattcttcgttccgtcaacgattgtgaacatggtggcaggtcatctgactatcatgtatggcctgcgtggcccaagcatctctatcgcgaccgcctgtacttccggcgtgcacaacattggtcatgctgcgcgtattatcgcgtatggcgatgctgacgtgatggttgcaggtggcgcagagaaagccagtacgccgctgggtgttggtggttttggcgcggcacgtgcattatctacccgcaatgataacccgcaagcggcgagccgcccgtgggataaagagcgtgatggcttcgtactgggcgatggtgccggtatgctggtacttgaagagtacgaacacgcgaaaaaacgcggtgcgaaaatttacgctgaactcgtcggctttggtatgagcagcgatgcttatcatatgacgtcaccgccagaaaatggcgcaggcgcagctctggcaatggcaaatgctctgcgtgatgcaggcattgaagcgagtcagattggctacgttaacgcgcacggtacttctacgccggctggcgataaagctgaagcgcaggcggtgaaaaccatcttcggtgaagctgcaagccgtgtgttggtaagctccacgaaatctatgaccggtcatctgttaggtgcggcgggtgcagtagaatctatctactccatcctggcgctgcgcgatcaggctgttccgccaaccatcaacctggataacccggatgaaggttgcgatctggatttcgtaccgcatgaagcacgtcaggtcagcggaatggaatacacgctgtgtaactccttcggcttcggtggcactaatggttctttgatctttaaaaagatctaagttgtcattttccacccttataaaaggtccgcttgcgggccttttttcttagcttttattccgacttgttccgtagtgaacatgctgccacactaacaattctctgataaggagccggtatgttcttaattaacggttataagcaggaatcgctggcagtaagcgatcgggcaacgcagtttggtgatggttgttttaccaccgccagagttatcgacggtaaagtcagtttgttatcggcgcatatccagcgactacaggatgcttgtcagcggttgatgatttcctgtgacttctggccacagcttgaacaagagatgaaaacgctggcagcagaacagcaaaatggtgtactgaaagtcgtgatcagtcgcggtagtggcgggcgagggtacagcacattgaacagtggaccggcaacgcggattctctccgttacggcttatcctgcacattacgaccgtttgcgtaacgaggggatgacgttggcgctaagcccggtgcggctggggcgcaatcctcatcttgcaggtattaaacatctcaatcgtcttgagcaagtattgattcgctctcatcttgagcagacaaacgctgatgaggcgctggtccttgacagcgaagggtgggttacggaatgctgtgcggctaatttgttctggcggaagggcaacgtagtttatacgccgcgactggatcaggcaggtgttaacggcattatgcgacaattctgtatccgtttgctggcacaatcctcttatcagcttgtcgaagtgcaagcttctctggaagaggcgttgcaggcagatgagatggttatttgtaatgcgttaatgccagtgatgcccgtacgtgcctgtggcgatgtctccttttcgtcagcaacgttatatgaatatttagccccactttgtgagcgcccgaattagtcatgaaaaaagtgttattgataatcttgttattgctggtggtactgggtatcgccgctggtgtgggcgtctggaaggttcgccatcttgccgacagcaaattgcttatcaaagaagagacgatatttaccctgaagccagggaccggacgtctggcgctcggtgaacagctttatgctgataagatcatcaatcgcccacgggtttttcaatggctgctgcgtatcgaaccggatctttctcactttaaagccgggacttaccgctttacaccgcagatgaccgtgcgcgagatgctgaagttgctggaaagcggtaaagaagcacagttccctctgcgactggtagaagggatgcgtctgagcgattacctcaagcaattgcgtgaggccccgtatatcaagcatacgctgagcgacgataagtacgccaccgtagcgcaggcacttgaactggaaaacccggagtggattgaaggttggttctggccagacacctggatgtataccgccaataccaccgatgtcgcgttactcaagcgagcgcacaagaaaatggtgaaagcggtcgatagcgcctgggaagggcgtgcggacggtctgccttataaagataaaaatcagctggtgacgatggcatcaattatcgaaaaagaaaccgccgttgccagtgaacgcgatcaggttgcctcggtatttatcaaccgtttacgcattggtatgcgcctgcagaccgacccaaccgtgatttacgggatgggagagcgttataatggcaaactttctcgtgcagacctggaaacgccgacagcgtataacacctataccattaccggtttgccgccgggtgcgatagctacgccgggggcggattcgctgaaggctgctgcgcatccggcaaaaacgccgtatctctattttgtggccgatggtaaaggtggtcacacgtttaataccaatcttgccagccataacaagtctgtgcaggattatctgaaagtgcttaaggaaaaaaatgcgcagtaagtatatcgtcattgaggggctggaaggcgcaggcaaaactaccgcgcgtaatgtggtggttgagacgcttgagcaactgggtatccgcgacatggttttcactcgggaacctggcggtacgcaacttgccgaaaagttaagaagcctggtgctggatatcaaatcggtaggcgatgaagtcattaccgataaagccgaagttctgatgttttatgccgcgcgcgttcaactggtagaaacggtcatcaaaccagctctggctaacggcacctgggtgattggcgatcgccacgatctctccactcaggcgtatcagggcggaggacgtggtattgaccaacatatgctggcaacactgcgtgatgctgttctcggggattttcgccccgacttaacgctctatctcgatgttaccccggaagttggcttaaaacgcgcgcgtgcgcgcggcgagctggatcgtattgagcaagagtctttcgatttctttaatcgcacccgcgcccgctatctggaactggctgcacaagataaaagtattcataccattgatgccacccagccgctggaggccgtgatggatgcaatccgcactaccgtgacccactgggttaaggagttggacgcatgagatggtatccatggttacgacctgatttcgaaaaactggtagccagctatcaggccggaagaggtcaccatgcgctactcattcaggcgttaccgggcatgggcgatgatgctttaatctacgccctgagccgttatttactctgccaacaaccgcagggccacaaaagttgcggtcactgtcgtggatgtcagttgatgcaggctggcacgcatcccgattactacaccctggctcccgaaaaagggaaaaatatgctgggcattgatgcggtacgtgaggtcaccgaaaagctgaatgagcacgcacgcctaggtggtgcgaaagttgtctgggtaaccgatgctgccttactgaccgacgccgcggctaacgcattgctgaaaacgcttgaagagccaccagcagaaacctggtttttcctggctacccgcgagcctgaacgtttactggcaacattacgtagtcgttgtcggttacattaccttgcgccgccgccggaacagtacgccgtgacctggctttcacgcgaagtgacaatgtcacaggatgcattacttgccgcattgcgcttaagcgccggttcgcctggcgcggcactggcgttgtttcagggagataactggcaggctcgtgaaacattgtgtcaggcgttggcatatagcgtgccatcgggcgactggtattcgctgctagcggcccttaatcatgaacaagctccggcgcgtttacactggctggcaacgttgctgatggatgcgctaaaacgccatcatggtgctgcgcaggtgaccaatgttgatgtgccgggcctggtcgccgaactggcaaaccatctttctccctcgcgcctgcaggctatactgggggatgtttgccacattcgtgaacagttaatgtctgttacaggcatcaaccgcgagcttctcatcaccgatcttttactgcgtattgagcattacctgcaaccgggcgttgtgctaccggttcctcatctttaagagagacatcatgtttttagtcgactcacactgccatctcgatggtctggattatgaatctttgcataaggacgtggatgacgttctggcgaaagccgccgcacgcgatgtgaaattttgtctggcagtcgccacaacgttaccgggttatttacacatgcgggatctggtaggcgaacgtgacaacgtcgtattttcttgtggcgtgcatccactcaaccagaatgatccctacgatgtagaagatttacgccgtctggcggcagaagagggtgtggttgcgctgggtgaaaccgggctggattattattacacgccggaaactaaagtacgtcagcaagagtccttcatccatcatatccagattggtcgtgaactgaacaagccggttatcgtccatacccgtgacgcccgcgccgatacgctggcaattctgcgcgaagaaaaagtgacggattgcggtggcgtactacactgttttacagaggacagagaaacggcgggtaaattactggatctcggattttacatctccttttccggcattgtgaccttccgtaatgcggagcaactgcgcgatgctgcgcgttatgtccccctggatcgattactggtggaaactgactcaccttaccttgcgccggtaccgcatcgaggaaaagagaatcaacctgcgatggttcgtgacgttgcagaatacatggctgtgttgaaaggtgttgccgttgaagaactggcgcaggtaaccaccgataacttcgcccgtctgtttcacatcgacgcttcccgccttcaatccatccgttgaatgagtttttttaaagctcgtaattaatggctaaaacgagtaaagttcaccgccgaaaattgggcggtgaataaccgcgtttgaaatattgtgacatatgttttgtcaaaatgtgcaacttctccaatgatctgaagttgaaacgtgatagccgtcaaacaaattggcactgaattattttactctgtgtaataaataaagggcgcttagatgccctgtacacggcgaggctctccccccttgccacgcgtgagaacgtaaaaaaagcacccatactcaggagcactctcaattatgtttaagaatgcatttgctaacctgcaaaaggtcggtaaatcgctgatgctgccggtatccgtactgcctatcgcaggtattctgctgggcgtcggttccgcgaatttcagctggctgcccgccgttgtatcgcatgttatggcagaagcaggcggttccgtctttgcaaacatgccactgatttttgcgatcggtgtcgccctcggctttaccaataacgatggcgtatccgcgctggccgcagttgttgcctatggcatcatggttaaaaccatggccgtggttgcgccactggtactgcatttacctgctgaagaaatcgcctctaaacacctggcggatactggcgtactcggagggattatctccggtgcgatcgcagcgtacatgtttaaccgtttctaccgtattaagctgcctgagtatcttggcttctttgccggtaaacgctttgtgccgatcatttctggcctggctgccatctttactggcgttgtgctgtccttcatttggccgccgattggttctgcaatccagaccttctctcagtgggctgcttaccagaacccggtagttgcgtttggcatttacggtttcatcgaacgttgcctggtaccgtttggtctgcaccacatctggaacgtacctttccagatgcagattggtgaatacaccaacgcagcaggtcaggttttccacggcgacattccgcgttatatggcgggtgacccgactgcgggtaaactgtctggtggcttcctgttcaaaatgtacggtctgccagctgccgcaattgctatctggcactctgctaaaccagaaaaccgcgcgaaagtgggcggtattatgatctccgcggcgctgacctcgttcctgaccggtatcaccgagccgatcgagttctccttcatgttcgttgcgccgatcctgtacatcatccacgcgattctggcaggcctggcattcccaatctgtattcttctggggatgcgtgacggtacgtcgttctcgcacggtctgatcgacttcatcgttctgtctggtaacagcagcaaactgtggctgttcccgatcgtcggtatcggttatgcgattgtttactacaccatcttccgcgtgctgattaaagcactggatctgaaaacgccgggtcgtgaagacgcgactgaagatgcaaaagcgacaggtaccagcgaaatggcaccggctctggttgctgcatttggtggtaaagaaaacattactaacctcgacgcatgtattacccgtctgcgcgtcagcgttgctgatgtgtctaaagtggatcaggccggcctgaagaaactgggcgcagcgggcgtagtggttgctggttctggtgttcaggcgattttcggtactaaatccgataacctgaaaaccgagatggatgagtacatccgtaaccactaatccgtaagacgttggggagactaaggcagccagatggctgccttttttacaggtgttattcagaattgatacgtgccggtaatgctgaaattacgcggtgcgccgtagacgatagaaccttccacgttggtatcgtaggttttgtcgaacaggttattgacgttcccctgtaacgagaagtttttcgtcacctggtagcgggtgaagagatccaccagcgcgtagctaccttgctcggcgcggaaggtgccatacggtgtcacggtgtcggtatacacgcgattttgccagttaacaccaccgccgactgtcaactctggcatgacaggcaaccgatagctggtgaacattttaaccgtggtgcgtggcagattaggattaacggcgtttccttcgttatcctctgcaatatagcgcgttgcgccaaatgtcagctgccagttgtcggtaattgcgccgttgagttcaaattccacccctttactgactgtcccatccaccgctttataggcggtttcgccgttgctgccggggataggtgtaccggtggactgagcgacattatcctgctcaatacggaagatggctaatgtggtggtcagacggctattcatccagtccgatttcagacccagctcgtagttgttaccggtgattggagccagatatttgcctgaactgtcacgatcattttgcggctggaaaatagaggtatagctggcgtaggtcgaccagttgtcattgatgtcaaacaccagaccagcgtaaggcgtggtgtggtttttctccatgctgtaagtcagcgtatcaacccgccagttggtataacgtgcgccgaggatcagatgcagcggatcggcaagggtgacacgagtggcagcatataacgatttcatatgtgtggtatcgtcctgcgccaggctctgtggtgaccagtcggtttgtgggaaattgccattaaagttgtagaaactgccaatttcatccgggaagatgttggcccatgaactgaagtaacgattgttttgtttgctgtaactgccaccaaacattagattgtgctgacgaccaaacaattcataactaccgtcagcgaacaaatccagcgcatcaactttacgtttgccactgttccaaccggtgccgccgacataatcaaagccaggtccataattactgtatggcccaaccagcataccatccgctttgtttacataggcatcgacatacatcattttgctgtcaaattcgacttcagagtgggtggcattcagtgtcgcttgccaggtatcagcaaaccgctgcttcagggtcataaagaccttgttgatctctttatcgttgtacgcccagtcaggtgcggtactgcgtgcacgatcgtaactgttgctgctgccatcagtattccagcgcggtaaaccgccccaggtagggctattaacatcaatgcgctgatattcgtaaccggctgaaagcgtcgtaagatcgcctaaatcagcatcgacaatgcccgagaagaaggtcttttcactgttgtagcggtccagccatgagtcgttattctggtagccgccgacaattcgcgcgcggattttaccgtcttcggtgagtgggctttgtaaatccgccacataccgttctttgttccagctaccgtattccgccgagacatcgcctttaaattcacgactggtcgcgtgttttcgaaccatattaattgccgcagatggattacccgtcccggtcatgagtcctgtcgcgccacgcactacttctacgcgttcaaagagtgccatatcagaaagtgcgtcgcccagattccagcgcgattcaaaataggtggggataccatcaaccatatagttatcgatctggaatccgcgggaataataaagagcacgatcggaatccgcctgacttttgctgatcccctgcgtgttttccatcacttcgcccagcgtttgtaactgctgatcttccatccgctgctggctaacaatagtgaccgactgaggaatatcacgttgagtcatctgcattttggtacccgcagaggtagacgttacgctgtaatcattttcgccatcatctggagctgtggctgaaccctcaacaatcaccgtttcttcagtggctggtgcagcaaaagcggcagaaggtaatagtgccagtgctatgcaaccggcaagtagtgacggtttggtgatggcttgatattgattatccctgttaaattgtgttgaaagcatttgaaatctcttggtttatgttgtcgtcaggctcatgccggaggagggggatgagcgattatatttagtgtgcgaataattttgtttgtaaatgcaaatgagaaatatacgcattcatatttgtcgtgtaaaccaaacagagaatgtcttttcagcgcattcgcaggcagaaatgggaataatggcgatatatacggcagcaaaacgattttttgcttaagaaatcgtgagttaaggttgaaagagcaggtttaactcgaccatactctatactcgcagtgtggcgcggcgtagcatggcgcaacgcatggctatttgaaaaaggaaaatgtcgtggcagaagaaactatattcagcaaaattattcgtcgtgagatcccctccgatatcgtctaccaggatgatctggtaacggcgtttcgcgatatttcgccgcaagcgccaacgcatattctgatcattccgaatatcctcattccgactgtgaacgacgtctcagctgagcatgagcaggcgctgggacgcatgatcaccgtagcggcaaaaattgctgagcaagaaggtattgccgaagatggctatcgtctgatcatgaataccaaccgccatggcggacaagaggtttaccacatccatatgcacttgttgggtggccgtccgctgggaccaatgctggcgcataaaggtctgtaacgatgagaaaaggatgctttgggctggtgtctctggcgttgttactgctggtgggctgtcgttcacatccggaaattccggtgaatgatgagcaatcgctggtgatggagtcatctttattggctgcgggcatcagtgcagaaaagcccgtcctttcgacgtctgatattcaaccttcagcatcctcaacgctttataacgaaaggcaagaacccgttaccgttcattatcgtttttactggtatgacgccagagggctggagatgcatcctctggaaaggccacgcagcgttagcattcccgcacattcggcggtaacgctgtacggcagcgccaattttctgggggcgcacaaagtcagactttatctatatttgtaaggggtgaatcttgatgacaaaaatgagtcgctacgccttgattaccgcgctggcgatgtttctcgccgggtgtgtggggcaacgtgaacctgcaccggtagaagaagtgaaaccagcgccggaacaaccagccgagccacaacagcctgtccccacagtgccctcggtgccgacgatcccgcagcagccaggcccaattgagcacgaagatcaaacggcaccgcctgcgccgcatattcgccattatgactggaatggcgcaatgcagccgatggtcagtaagatgcttggggctgacggggtgactgcgggtagcgtcctgctggttgatagcgttaacaaccgtactaacggttcgctgaatgccgcagaagcgaccgaaacgctgcgaaatgcgctggctaataacgggaaatttaccctggtttccgcccagcagctgtcgatggctaagcaacagttaggtttgtcgccgcaggacagtttaggtacccgtagtaaagccataggaattgcccgcaatgtcggcgctcattacgtgctgtactccagcgcctctggcaacgttaacgctccgaccctacaaatgcagctgatgctggtgcagacgggcgaaattatctggtcaggtaaaggtgccgtttcgcagcaataatcccatcatgcgcgacgaattgctgtcgcgctttttcccgcagtttcatcccgtcacgacgtttaatagtgggcttagtggcgggagttttctcattgaacatcagggccagcgttttgttgtgcgtcagccgcacgatcctgatgcgccgcagtccgcgttcttgcgccagtatcgggctttatcacaactacccgcaagcattgcaccgaagccgcatttatatctccgtgactggatggtagtcgactatctgcccggcgcggtaaaaacgtatttgccggataccaacgaactggcaggcttgctgtattatctacatcaacaaccacgttttggctggcgaataacgctgttgccgttactggaactgtactggcagcaaagcgatccggcgcggcggacagtgggttggctgcgaatgttaaaacgtctgcgcaaagcgcgggaaccacggcctttacgcttaagtccattgcatatggatgtccacgccggaaatttagtgcatagcgcgtcagggttaaaactcatcgactgggagtatgccggagatggtgatatcgcgctggaactggcggcggtgtgggtggaaaatactgaccagcaccggcaattggtcaatgactatgccactcgcgcgaagatttatccggcgcaattatggcgtcaggtcaggcgatggtttccctggctgctgatgctcaaagcagggtggtttgagtaccgctggcgacaaaccggcgatcaacaatttatcaggctggccgatgacacctggcggcagctattaataaaacaataaggagagcagtgtgggtccagtaatgttggatgtcgaaggttacgaactggacgcggaagagcgtgaaatacttgcgcatccgctggtgggagggctgattctctttacgcgtaactatcatgatcctgcccagttgcgtgaactggtgcgccagatccgcgcagcttcgcgcaatcatctggtggtggcggtagatcaggaaggtggacgcgtgcagcgttttcgtgaaggttttacccgcttgccagcggcgcaatcattcgctgcgctgtcaggaatggaagagggcggcaaactggcgcaagaggcgggttggctgatggccagcgaaatgatcgctatggatattgatatcagctttgcgccagtgctggatgtcgggcatatcagcgcggcgattggcgagcgttcttatcatgccgatccacaaaaagccctggcaattgccagccggtttattgatggtatgcatgaagccggaatgaaaacgaccgggaaacacttcccaggacacggtgcagtaacggcagactcacacaaagaaacaccgtgcgatccacgtccacaagcggagattcgcgctaaagatatgtcggtcttcagttccttaatccgcgaaaataaactcgacgccattatgcctgcgcatgtgatctacagtgatgttgatccgcgtccggcgagcggttctccctactggctgaaaaccgttttgcgtcaggaactgggttttgacggcgtgattttctctgacgatttatcgatggaaggtgccgcgattatgggcagttatgccgaacgcgggcaggcatcactggatgcgggttgcgatatgatcctggtctgcaataatcgtaaaggggccgtcagcgtgttagataatctgtcaccgatcaaggcagaacgtgttacacgtttgtatcataaaggttcattttcgcgacaggaactgatggactcggctcgctggaaagcgatcagcacccgtctgaatcagttacatgaacgctggcaggaagagaaagcaggtcactaaccctggcttatgtgaggaagcgatgattatctatttacacggttttgactctaacagtccgggtaaccacgagaaagtcttacaattgcagtttattgacccggatgtacgcttgataagctacagtacgcggcatccgaaacatgatatgcagcatctgctcaaagaagtggacaaaatgttgcaactgaacgtcgacgagcgtccgctgatttgcggcgttggtctgggcggatactgggcggaacggattggttttctttgcgatatccgccaggtgatcttcaaccctaatttgttcccttatgagaacatggaaggcaagattgatcgcccggaagagtatgccgatattgccactaagtgtgtgaccaacttccgtgagaagaatcgcgatcgttgcctggtgattttgtcgcgtaatgatgaagcgcttaacagccagcggacatctgaagagctgcatcattattacgagattgtctgggacgaagagcagacgcacaaattcaagaatatctccccgcatttacagcgcattaaagcgttcaaaaccctcgggtaaatgccctcgtcgcatcaggtaaccttgccggtacctgatgcgctccggattctgtgggtcggataaggcgttcacgccgcatccgacattcgagcatcaatgcctgatgcgcctcttatcaggacgaccaaacgccctcgatatacgcttcaccctatatcgcccttccggacttgctcaaataataaacaataaactctgttttttgatctcacccggtaaagtcgcctatcttttcagcaacaaaacttgattaacatcaattttggtatgaccaatgcaccattcatgttattctcaatagcgaagaacattttcattgctgtaacctgttgttaattaagagctatgttaataaccattaattaacaattggttaataaatttaagggggtcacgttgactacgccattgaaaaagattgtgattgtcggcggcggtgctggtgggctggaaatggcaacacagctggggcataagctgggacgcaagaaaaaagccaaaattacgctggtcgatcgtaaccacagccatctgtggaaaccgctgctgcacgaagtggcgactggctcgcttgatgaaggcgtcgatgcgttgagctatctggcccatgcgcgcaatcatggtttccagttccagctgggttccgtcattgatattgatcgtgaagcgaaaacaatcactattgcagaactgcgcgatgagaaaggtgaactgctggttccggaacgtaaaatcgcctatgacaccctggtaatggcgctgggtagcacctctaacgatttcaatacgccaggtgtcaaagagaactgcattttcctcgataacccgcaccaggcgcgtcgctttcaccaggagatgctgaatctcttcctgaaatactccgccaacctgggcgcaaatggcaaagtgaacattgcgattgtcggcggcggcgcgacgggtgtagaactctccgctgaattgcacaacgcggtcaagcaactgcacagctacggttacaaaggcctgaccaacgaagccctgaacgtaacgctggtagaagcgggagaacgtattttgcctgcattaccgccacgtatctctgctgcggcccacaacgagctaacgaaacttggcgttcgcgtgctgacgcaaaccatggtcaccagtgctgataaaggcggcctgcacactaaagatggcgaatatattgaggctgatctgatggtgtgggcagccgggatcaaagcgccagacttcctgaaagatatcggtggtcttgaaactaaccgtatcaaccagctggtggtggaaccgacgctgcaaaccacccgcgatccagacatttacgctattggcgactgcgcgtcatgcccgcgtccggaagggggctttgttccgccgcgtgctcaggctgcacaccagatggcgacttgcgcaatgaacaacattctggcgcagatgaatggtaagccgctgaaaaattatcagtataaagatcatggttcgctggtatcgctgtcgaacttctccaccgttggtagcctgatgggtaacctgacgcgcggctcaatgatgattgaaggacgaattgcgcgctttgtatatatctcgctataccgaatgcatcagattgcgctgcatggttactttaaaaccggattaatgatgctggtggggagtattaaccgcgttatccgtccgcgtttgaagttgcattaatcgacgtacactggcggatgtggcataaacgccttatccgcccttgaggaacagcgcgatcggcagccgcgtcgcatcaggcattccttcagactcctccgaatccttaagtatttccagccattcccgcgcttttcatcttctgtctgatagctgcttttctccttcgcttgcatgattggcataactgcaaagaaggaggtgttcccgtgaataaatcaatgttggcgggtatcgggattggtgtcgcagctgcgctgggcgtagcggcagtggccagtctgaacgtgtttgaacgtggcccgcaatacgctcaggttgtttctgcaaccccaatcaaggaaacggttaaaacaccgcgtcaggagtgtcgcaacgtcacagtgacccatcgtcgaccggtgcaggatgaaaatcgcattaccgggtcggtgctcggcgctgttgctggcggcgtgatagggcatcagtttggcggtggtcgcggtaaagatgtcgccactgttgtgggggcgctgggtggtggatatgccggtaaccagatccagggctctctccaggaaagcgatacttacacgactacgcaacagcgttgtaaaacggtgtatgacaagtcagaaaaaatgctcggttatgatgtgacctataagattggcgatcagcagggcaaaatccgcatggaccgcgatccgggtacgcagatcccgctagatagtaatgggcaactgattttgaataacaaagtataacaaggctgtactctgcaatttggcccctcattcgctcaggctgaggggctttttttgcgacttatttcaccagttcgggccataaacgcaaagtcgttccggcaatctgcattagtttttccagcgatgcaccttcgcgtgcgctgatcgacatcccctgaataatacaattaaggaattctgccagatgtgtcacgtcacagtgggtcgggatttccccgcgcgcttgtcgttgacataaaaactgctgcaaagtgcgctcttgcatcgcatggcgtgatttcaacgtattggcgatatctcctgaatctggggagagggtggtgcagttgttgatcatgaagcagcctgccggggtgtctttgctggtaaagcagttggcgatggcagcaaaatagtcagccagcgcagactccacgcttttctcttcacaaaacagctgtgcttcatgcttagcggcaaaacgatcgatatagcggtcgagaacggcacgaaataacccctctttgttggtaaattccgcgtatagcgtgggcgctttggctccggtcgcttcgacgaggtccgcaagagaagtcgcttcataaccgtgttgccagaacaatttcatggccttatcaagcgcggcatccctgtcgaacacttttgggcggccacggcttttttttacacattgtgttgagtcagttgccatgatgccgttgtacctggtgactgtgaatgaaaggttattataaaaataatcacctccgttcaccagtccagatcccataaaaataattgctttctatttaactgaaatttaaagatttttaaattaattaatgattgttataaaaaatatcttgtatgtgatccagatcacatctatcatttagttatcgatcgttaagtaattgcttgcgacgtcattcatctgcataaggccactattatgaaaaacgtaaaaaccctcatcgctgcggcgattttaagctccatgtcatttgccagctttgcggctgtcgaagttcagtcaacgccagaaggccaacaaaaagtcggtacaatcagtgctaacgcggggacaaatctgggatcgctggaagagcagctggcgcaaaaagcggatgagatgggcgcaaaatctttccgtattacttctgtaaccggtccgaataccctccatggaacagcagtaatttataaataagcattaaccctcattaatgcctgctactgctgattttttccccgcgacatgccgtgtcgcggggattttttttatccaggatttacagagtttgtgggctcacttgatgacggcggacatccaccggcatcccggaacggacatccatcacatgttgcatcacttcagcgtcagtttgtgctgcatctttaaatgattgcattgcgctattcagcgtaattggcagcagctgcggatcgtcatcaatcttctctgacagcggctgatgtacttcaaccagacgcgcaccgtttggttcggcagagacttttatcggagtgttgatgatattcactttggtgcctggggtgacctggctaaagagtgttttgatatcgtcatcccgcagacgaatacagccagaacttacccgcatgccaatgccgaaatcggcgttcgtaccgtgaagcaaataaacgccgccataggccgccagacgaatcgcatgatggcccattgggttatccggtccagccggcactaccgcaggcaactcaattccctgtgctttataacgggcgcggatgtttgccgttggcgtccaggttgggtttgcacgtttgtctgaaacggtggtcaccattgtcggtgtcagcgtgtcaccacctaactgaccaatacctattggatacacggttaccgaatttttacccggcgggtagtaatagagacgcagctccgcaatattgatcacaatgccttcgcgcggcgcatctggaagtagggtttgcaacgggatcgttaacacgctacccgcgcgcggtacgtaaggatcaacgccagggttagcctgtaacagagcgagaaagccgacgttatattttttggcgatggcttccagagaaccaccgtcattttccaccacatgaaatttgttttcgccaaccagacgactgcccgctggcggcagcggccaggtgttggcttttgccggtagcgccagcgccacggcagcggcgaacgtaaaaaacgttagccagcgagaaaaacgcgttttgatcatcaccaaaaatccataataaatataaggttattgtaataaacagataagcctgaattatggatggtgacagtgtcggatagtgcagggaagtgcaaagaatttgtaaatgttgcagatgggggcgcagaaacgcccccgatttaccattaagcgatcgcgttctcttccagttcacgcataaactggcgtacccattcgatacgcgttttccgctcactcaaatcctgaataaatttcaggcgcgtcggaccatcaaggcggtaatgctgcggctgtttttgcagcaaaccaatcaaccaggccggattaacgtgattcttctcggcaaattcgatcaccccgcctttctcattaccttccagcttcctgatccccagtttctgcgcttgctggcgcagacgggcaacatccagcagggtacgcgccggatccggcagcaggccgaagcgatcgataagctcgactttgatctcttccagttcgttttccgttttggcgctggcaatacgtttgtagaacgacagacgcgtgttcacgtcagggatgaaatcatctggcaatagcgacggcatccgcagctcgacttctgtttgctggctggtgagatcttccagcgacggctcgcgtccggctttcagtgcatcgacggcgttttccagcaactccatatacagcgagaaaccgatggtttccattgagccgctttgttcttcgccaagcagttcacccgcgccgcgaatctccagatcgtgcgttgccagcgcaaaacctgccccgagatcttccagcgaggcaatcgcttcaagacgtttttgtgcatcggtagtcatcgcttttggatgcggtgtcagcaaccatgcatatgcctgatgatgcgaacgtccgacgcgaccgcgtaactggtgcagctgcgccagaccgaagtgatccgcacgttcaatgataatggtgttggctgtcgggatgtcgatcccggtttcgataatggtggtacaaaccagcacgttgaaacgttgatgatggaaatcattcatcacccgttccagttcgcgctcgcgcatctgcccgtgaccgatggcaatccgtgcttcaggcaccagttctgccagccgttcggcagctttctggatgttttccacatcattgtagagataataaacctgccccccgcgcaaaatttcacgcaggatcgcctcccggaccaccaggctgtcatactcacggacaaaggttttaactgccagacgacgggcgggcggcgtggcgataatcgacaggtcacgcattccgctcattgccatattcagcgtgcgtgggatcggcgttgcagtaagcgtcagaatatccacgttcgcgcgcatcgctttaatgcgctctttatgacgcaccccgaagcggtgttcttcatcgacaatcagcaggcctaaatctttaaacttgacgtcactttgcagcagtttgtgcgtaccgatcagaatatcgattttcccttccgccacttccgcaaggatttgcgtctgctctttggcgctgcggaaacgggagatcatttcgatacgtaccggccagttggcgaaacggtcgcggaagttgtcgtaatgctgctgcgcgagaagggtggtaggcaccaacaccgccacctgcttgtggttatctactgccaggaaagcggcgcgcatcgccacttctgttttaccaaagccaacatcgccgcacaccagacgatccattgccagcggctgacacatgtcgctaagtaccgcattaatggcctgcgcctgatccggcgtggtttcaaacgggaagctgtcgcagaacaactgatactgctcacgatcgtgtttaaacgcgaagccctctttggcggcgcgttgcgcgtagatatccagcaattccgccgccacatcacgcactttttccgccgctttctgccgcgcgcgtgaccacgcatcgccgccaagtttatgcagcggggcgttttcttccgcgccacctgcgtaacggctaatcagatgcagtgacgacaccggaacatacagtttggcgtcgttggcataggtgagcatcaaatactcgccagtaatgccgcccgcttcgagcgtggtcattccggcatagcgcccgacaccgtgctccagatggaccaccggctgaccaatatgcagctccgcaaggttacggatcagtgtatcggggttgatggtgcggcgagaatcctgacgacggcgggcaacacgttcaccgagcagatcgctttcgcagatcagcgccagattacgcaccttatcgacaaaaccatgttcggcagcgccaatcatcagataacgcccacggtcgctggcttcatcaagacgcataatgcgttgcggagcaattttaattcgtgcgagcagttcacccagcgcttcacggcgaccttcactttctaccgagaacaccaccggaccgtcgaaagtctcgaggaacttacgcagcgcatccagcggcgctttttgttgtgcctgaacggccaggtctggcagtttctggaaacctaaattggcattcgcggcttttgtcggtaaatgttcagtttttagctgcacccggggccagtttttcagctctgagaagagctcgtccacccgcagccagagcgattgtggtggcaacagcgggcgcatcggatcgacgccgcgattctcaaaacgcgccagcgtgtcagcctggaaacgttcggcactggtttccagatcgccagtattcacgagcaaggtattggcagggaaataactgaacagcggcggcagtggttcgctgaagaacaatggctgccagtactcgatcccggcaggtaatgtgcctttactcacttgctggtaaatatgttccggatcgcgcttcacttcgaaggtatcgcgccactggctgcggaacagttcaattgccgctttatcggtcggaaattcgtgcgcgggcagcagattgatcgcttctacttcctccagcgtgcgctggctgtcgacgtcaaacacccgcaggctgtcgatttcatcatcaaagaaatcaagacgataaggcagctcactccccatcgggaagagatccagcaacgcgccgcgcgtggcgtattcgccgtgctccatcacctggtcaacatggcgataaccggcgctgtccagttgggttcgtaatgcatctcgtgacaggcgctgaccttttttcatcaccagcgcatgaccgtggagaaaactgtgtgggcaaacgcgctgcataagcgtattcaccggaacaatcagtacgccacgctgcatcgtcggtagctggtaaagggtggaaaggcgcgaggagataatgtcctgatgaggcgaaaaactgtcgtagggaagagtttcccagtccgccagattcatcaccatctgatcggtgaactggctgatttcatcatgcaaacgcagagcattttgcatatctggtgcaatgagtaccaccggaccggcgtgacgttcggcaatttccgctaccagcgttgcacaggctgcgccggttaactcgcccagcagacgctgctcacccgctttgacgggcagcgtataacgatattgttcaggcataacggttgtcagattctcgttaggatatgcctcaacatatgggggcatatctctgataagcaatgctgttcattatccgtaatcgacatggtttagcaaattgaatcgccccggctggggcgatggcttagcgggagtaactgacggcagcgggcagtgaaggcggggagaacaacagatcgctgaatgcacgctgtgaaagttttcttaccagcaagcccgcaacagtacagatgaacaaactgacaaagggataaaccagcaggagtgtcagttcgacttgcggcgaccagcgtgctgcgttcatttgcgcaagcagagttaagctgaatatttcaaccagaatgcgatgggtggtgtagatagcaatggtgttggagccaatcacattcagcaggctggtggagcgcataccgaatcgttgctcgtattgataaaacagcttcatgatcaccacaatcgataccagcgacaacagcagcgagatagtaaacaaccaggcaccgaccgccagaacggtaagcaaagaagccatcagcagatggcggcgcaacggcacctctttaacacaggtcattattgttgcgccaaaccatgcgccaaggctgtaataaggcaaattgcggatcacactgttcattccccaccacggcgtgggaacgaaattaaccgccacactcaacagtacaaacaaggcgaatagtggcagcgccagacggctaaaaattttacataccacgaaatagacaattaacgcatacagataccacaagctggtgctggcggtgatcatcccgtgcaggaactcaccggtggaatcggcataagcggcattggaggcattgcttaaatcgcgctcaggtgccagccactggttcagcgcacttaacgccagccactgcaccacgccccaaagcgccagcacccagaagatgttccagatccgtttatcgagacaatttccccacggtacgctgtcgatatagcggcgaatcaaatagccggaaataaagaaaaaaaccggcatacgaaagggggcaaggtaaagattgaaatagatccagcatttgctcaggacttccgataacggatgctgaaaagtggtcagatgcggataaaaggtaatgaccgagtgataaatcaccaccagacaaatacataaccctttgatctggttaatccatagctctttttgtttcatcaggacaacacgctcttttttaatttacatgcggttgatcctgcgggttatgacccgaggtgtaatgggtatctgtctgtattggatgatttttcagattaagatcaggcggcaagattgatgataaaacatggcaatttagccgattgatttacgggggcttttcagattagccctgacgatcacttacagttcagacgtttacccatcttgctttcgcttatatactcgtgtctttgctacagcaaccagacggatttcatgtaccaacctgtcgctctatttattggcctgcgttacatgcgtgggcgtgcagcggatcgcttcggtcgtttcgtctcctggctttctaccatcggcattaccctcggggtgatggcgctggtcacagtattgtcagtgatgaacggctttgagcgcgagctgcaaaacaacatccttggcctgatgccacaggcaattctctcttctgagcatggctctcttaacccgcagcaactcccggaaacggcagtcaaactggacggcgttaatcgcgtcgcacctattactaccggtgatgtggtactgcaaagcgcgcgcagcgtggcggtcggggtgatgctcggtatcgacccggcgcaaaaagatccacttacaccgtatctggtcaatgtgaaacaaactgacctcgagccggggaaatataatgtcatcctcggcgaacaacttgcctcacagctaggcgttaatcgcggtgatcaaatccgcgtgatggtaccatctgccagccagttcacgccgatggggcgtattccaagccagcgcctgttcaatgtgattggcactttcgccgccaacagtgaagtcgatggctatgaaatgctggtgaatattgaggatgcctcgcgtctgatgcgttatccggcaggcaatattaccggctggcgtttgtggctggatgagccgctgaaagttgactctttaagtcagcaaaaactgcctgaaggcagcaaatggcaggactggcgtgaccgtaaaggcgagctgttccaggccgtacgcatggaaaaaaatatgatgggcttgctgctgagcctgattgtcgccgttgcggcgtttaacattattacctcactagggctgatggtaatggagaagcagggcgaagtcgcgatcctgcaaacgcaaggcttaactccgcgacaaatcatgatggtctttatggtgcaaggggccagcgccgggattatcggtgcgatcctcggtgcggcgcttggcgcactgcttgccagccagttaaataatctgatgccgataatcggcgtcctgcttgatggcgcggcgctgccggtggctatcgaacctttacaggtcattgttattgcgctggtggcgatggctatcgcgctgctgtctacgctttacccttcatggcgcgctgccgccacacaacccgctgaggctttacgttatgaataagatcctgttgcaatgcgacaacctgtgcaaacgctatcaggaaggcagtgtgcaaaccgatgtactgcacaatgtcagtttcagcgtgggcgaaggtgaaatgatggcgatcgtcggtagctctggttccggtaaaagtaccttgctgcacctgctgggcgggctggatacaccaacctccggcgatgtgatctttaacggtcaaccgatgagcaaactgtcttcggcggcgaaagcagagctgcgcaaccagaagctgggctttatttatcagtttcaccacctgctgccggattttaccgccctggaaaacgtggctatgccgctgctgattggcaagaaaaagcccgctgaaatcaacagccgtgcacttgagatgttaaaagcggtggggctggatcatcgtgcgaatcaccgcccatctgaactttctggcggcgaacgccagcgtgtggcgattgcccgtgcgctggtgaataacccgcgcctggtactggcggatgaacctaccggtaacctcgatgcgcgtaacgccgacagcatcttccagttgcttggggaattgaatcgcttgcagggcaccgccttcctggtggttactcacgacctgcaactggcgaaacgtatgagccgccagttagaaatgcgtgatggtcgtctgacggcggaactgagcctgatgggggcggagtaatggcgatgcctttatcgttattaattggcctgcgttttagtcgcggacggcggcgcggcggcatggtgtcgctgatctccgttatttctaccattggcattgccctcggcgtggcggtattgatcgtcggcttaagcgcgatgaacggctttgaacgcgaactgaacaaccgtattctggcggtggtgccgcatggtgaaatcgaggcggtggatcagccgtggactaactggcaggaagcactggatcacgtgcaaaaagtgccgggtattgccgctgccgcgccgtatatcaatttcaccgggctggtggaaagtggcgcgaatcttcgcgcaatccaggtgaagggcgttaacccgcaacaggaacagcgtctgagcgcattaccctcgtttgtccagggcgatgcgtggcgcaattttaaagcgggcgaacagcaaattatcatcggcaaaggcgtggcggatgcgctgaaagtgaagcagggggattgggtgtcgattatgatccccaactcgaatcccgagcataaactgatgcagccaaaacgtgtgcgtttgcacgttgccggtattttgcagttgagtggtcaactcgatcacagttttgccatgatcccgctggcggatgcccaacaatatcttgatatgggttccagcgtgtcaggtattgcccttaaaatgacggatgttttcaacgccaataagctggtacgcgatgcgggtgaagtgaccaacagctatgtttatattaaaagttggattggtacttacggctatatgtatcgcgatatccagatgatccgcgccattatgtatctggcgatggtactggtgattggcgtggcctgtttcaacatcgtctccaccttagtgatggcggtgaaagacaagagtggcgatatcgcagtattaagaacgctgggggcgaaagatggtttaattcgcgccatctttgtctggtatggattgctggcagggctgttcggcagcctgtgtggggtgattatcggtgtggtggtttcactgcaacttaccccgattattgagtggattgaaaagttgatcggtcatcagttcctctccagcgatatctattttattgatttcctgccatcggaattgcactggctggacgtcttctacgtactggtcacagcattgttgctgagtcttttggcaagttggtatccggcgcggcgcgccagtaatattgaccctgcgcgagtccttagcggccagtaaaggcagtacattaaaacaaggagcggcaatgtattacgggtttgatattggtggaacaaaaattgcgcttggcgtgtttgatagcggtcggcagttgcagtgggaaaagcgggtgccgacaccgcgtgacagctatgacgcatttttagatgcagtgtgtgagctggtagctgaagctgaccaacgttttggctgtaaaggttctgtcggcatcggtattccgggaatgccggaaacagaagatggtacgctgtatgccgccaatgtccccgctgccagcggtcaaccgctgcgtgccgacctgagcgcacgtcttgatcgcgatgtacgccttgataacgatgccaactgttttgccctttcagaagcctgggatgatgaatttactcaatatccactggtgatggggttgattctcggcaccggcgttggcggcgggctgattttcaacggcaaaccgattaccggtaaaagctacattaccggcgagtttggccatatgcgtctgccggttgatgcgttaaccatgatggggttggatttcccgttacgccgctgcggctgtggtcagcatggctgcattgaaaattatctgtctggtcgcggttttgcgtggctgtatcaacactattatcatcaaccgttgcaggctcccgaaattattgcgctttatgatcaaggcgatgagcaggcaagggcgcacgttgagcgttatctggatttattagcggtttgtctgggaaatatcctgaccattgttgaccctgacctggtcgtcattggtggtggcttatcgaatttcccggcaatcacaacgcaactggcggacaggctgcctcgtcatctcttacctgtagctcgtgttccgcgcattgaacgcgcgcgccacggtgatgcgggaggaatgcgtggtgcggccttcctacatctaaccgattaaacaacagaggttgctatgctgtcgcgtcggggtcatcggttaagtcgttttcgtaaaaataaacgccgcctgcgcgagcgtttgcgtcagcgtatttttttcagagataaagtggtgccggaagcaatggaaaaaccaagagtactcgtactgacaggggcagggatttctgcggaatcaggtattcgtacctttcgcgccgcagatggcctgtgggaagaacatcgggttgaagatgtggcaacgccggaaggtttcgatcgcgatcctgaactggtgcaagcgttttataacgcccgtcgtcgacagctgcagcagccagaaattcagcctaacgccgcgcatcttgcgctggctaaactgcaagacgccctcggcgatcgctttttgctggtaacgcagaatatagacaacctgcatgaacgcgcaggtaataccaatgtcattcatatgcatggggaattgctgaaagttcgttgttcgcaaagtggtcaggttctcgactggaccggagacgttacgccagaagataaatgccattgttgccagttcccggcacccttgcgcccgcacgtcgtttggtttggcgaaatgccactcggcatggatgaaatttatatggcgttgtcgatggctgatattttcattgccattggtacttccgggcatgtttatccggcggctgggtttgttcacgaagcgaaactgcatggcgcgcacaccgtggaactgaatctcgaaccaagtcaggtcggtaatgaatttgccgagaaatattacggcccggcaagccaggtggtgcctgagtttgttgaaaagttgctgaagggattataaagcaggaagcattgcctgatgcgctacgcttatcaggcctacaaggggacgcaattaattgaatttgcgggttttgtgggccggataaggcgttcgcgccccatccggcataatacacgcgcacttttccggcctcttttatcgtttactcgtcaataacaatgcggcaataaacgtacagacaccaattagccctgcccagagtggcgatattctggtaatcgcaaagctattatcgatatacaaacataaagcctgataacccatattggcaatagtcatcgccactgcaaattttaacgcataaataaaacgagtcgtgtagcaaaagatccaggaaaataagataaacgtcgcagcccaggcgataaaacctaatgtgttggtgctgccggggggagcattttcatgctgttgtcctggatgcggataatacgtcagtggcggcgtcggttgttttaatatctgtgcttgtagaacagccaatgcattattgattccctgataccagagatctgcatttaaataagccagcgtgtgattttctatcagaaggccgagatgtttatcgtccagaccactttcaacctggccgttggtgatcataattaaccgtggttcgcgggtagtaaatagtaacagaacacttccttttacattactcaatgaagatgacgcatgcgccagcatcgctttaccattttgtctgagactggcttcattattaatgtcgggtaaaatcacaataaacggtgcaattcccgtttgttggcgaaaaagctcggctttacgtgcgatctcttcagcatccggtacagtaccggtaacatccgtaaaaagtgtcttcattattggaatcaatggtttactggttgctaccagaggcaggagtattagtaaactgagcagtataatgaattttttcatgggcgggacttccgtttcctgcgagattttttggtggaggggagcgtgattatcagaccgacactaccgaaaataatgcctgctatgccaacaaagccccatttaaaaaaattaacccagggattgtttatttcggcttgttctggatgccctggcggataatagacattgactctgtcaccttcgctatcttcataaaaatcactaccgatattcgaattgaaaattagcgtgtaatctggcgtagggcgaaaggcaaccactggataccaggaaccattatcatcgacgtcgtttgagtgattgttgtaccaaacggcatcaacaatgattccttctgtatgaaccgcgcttttggtaaaagtaaaatggtaataaaagatgattgcagaaataacgagcaatatcagaccgataccgagaaaagcgcgggataacactttactgtcctgactcattagccacatccttgctaaataaaaaacgggcggtaatgccaccgcccgcttgctgaattaacgtcctgctttcagcttctgataatactcttcataaatgctgctggctgcgccaacgtcattctgccattcaccatttttaatggtttcagcatccgggtagagcgttttatcgttcgccacttccgggcttaacagcttacgcgccgcaaggtttggcgttggataaccgatagtttcagcaacctgttttgccacatccgggcgcagcaggaagttgatcaatttcagcgcgccttctttgtttttggcatttgccgggatcgccaggctgtccatccagaaaatgccgccttctttcggccacaccacgtcaattggcgtacccgcctggcgtgcaacgaaagcagaaccgttccagatcatgccgaggttaacttcgccttccatgtacgggttagccgggttatcggagttaaacgctgcgacgtttggcatcagttttttcagctcgttatatgcagcttcaatctctttcggatcggtggtgttaccggagtagcccagcttacgcagcgccatctggaacacttcacgggcatcgtcggtcagcagcaggctgcctttgtactctggcttccacagatcggcccagctggtgacagatttcggatccaccgcatcaccgttaacaccaatcgccgtcgcaccccagatatacggaatggagtagtcgttattcgggtcaaaaggcttgttgagcatgtctggatcgagattgctgaagttcgttaacttcgacttgtcgatcttctggatcatcccttctttacgcattttatcgacgtaataggttgaaggaaccaccaggtcgtaggcaccgtctttgtacgttttcagcttggcgtacatggtttcgttcgactcgtaagtcgaatagataaccttaataccggtttctttggtgaactgttcaagcagtcctggcggcacgtactcggtccagttgtagaaatacagcgtgttgttgtcatcggcgtgagcggcgctcatgcccagtgccagagcacccgccgcgagcaggtggcgtgaccattttttcatttaacgtcccctgtgttacctttcgttttatcacgagcaataagctgactggcaataaccatcaccagcgacagcaccagtaatatggttgccagcgcgttaacttccggcgatacgccgactttgaccatcgaataaatttttaacggcagaatttcataacttggtccggtgacgaacgaagaaactaccacatcgtccatcgacagggtaaagcttaacacccagcccgccgccaccgcaggcattgccagtggcagaatgatttttcgcagaatggtaaattcactggcaccgagatctttcgccgcttccagcatccgcacgtcaaaacctttcaggcgcgaatacaccgtcaccaccacaaacggcaggcagaaggtgatatgcgagaacagcagcgaccagaagccaagctgaatacccagcagcataaacagcaccagcagagaaatcgccatcacgatatctggtgacatcatcaccacaaacagcattccgctaacgaacggcttaccacgaaagcgataacggtacagcgcaactgccgtcagtgaaccgataagcgtagcaaatgtcgccgaaaacaccgccattgttagtgaatgctgcgctgcctgtaacaggctgtcgttgttcatcagcaggctataccatttggtggtaaaaccctgccagttgatgccaaagcgcgagctgttaaaggagttcacaatcaaaataatgattgggatatacaggtacgcgtagatagcggtcataaaaccgccgcgaagcagtcgaccgatcattcgagttccacctttttattcataaggtggagcactttcaggattttgaatttattcaattttttcctttctccaaaatctctccaaaacttttccccaaaacaggaccacgcattttacagcatttttatacatggcgagcacactaggacagaaaagtattccagtttgtttacccatatcactttccgaatgagatttttgatgcgatttcttcgtgttgaaaaaacacataatgtggtattagaattacctaacatgattcactttgaatccgtttgaaatctcattgaactcaggagtgactatgaagcgtaaaagagtggctttgttgcaagccattggctcggttatagccctgagcccagcggtcgtttcagcaaatggtatgccagcgaatccagttgccgctttgcgtcaggatgctgcggctatcagaggcgatttccaaagagcaatggtatccgttaacgttgaaaagctgaacaatgccagatcaaaaagaaagtgagaacaccaaactcacttgtgaagaacaaaaggacaatgaactggtttctcgagtaatcgaaaatccagaagtcttaaacagggttttggagagcccgcaggtgcgagctattgtttgccagcattttcaggggccggttcctccgccatcaatgcttaaaaagtatgatcaactgatgccagggcttgcaaataggcttgttgagttgactgaaaaggagcaggctcatcgccacaaaacggtggctgataccattgatattgccagagatggtcaaacaaaggctttttggctggcgatattgattatcttcgttgctgctgtctttggtgtcatgggggagactgttcttgctggagctctcgtttcaatagatcttgttgcattggttacggcatttattgttggaaaacattattctaagcaggaacctgatcaagattagtctccaaaccccggcatcagccggggtttttacatcagtaaagcaatatcaacatttttatcggttgttaattactggcaacgttacagctgtatttatttcgtcaaacaaccaatttaacccattcctgaccacgagtatcgttataacgatcggtggttgcttggactttatgtcccagtaatgtttttgtatcgataccctgtgcgcggtacagtcgttctgactgagctggccccctgaaataccagacagtagatgtatcttaaaataagagataggcttggatatatgtctaacactagttctaattttgagatggctggcgttttgttaggaaaagaggtgcgtaaa

SEQ ID NO: 40 - DNA, 68628 bp, Escherichia coli
  source 1..68628: mol_type = genomic DNA
cgctcgtaacattttagcggcggggcacgccgttcttgcctgtggggagatggtgcagtcaggccgcccgttgaagcaggaacccaccgaaatgattcaggcgacagcctgaacgtagcagggatcctcgtcattcagggcgtggaggatgtcaagacacggaaaacgaacatgatgtttgtggttggtaattatcaccgatcgttgatggcgcaatttctgcgccatcgcaaaaaaatcctccgtgatgctcgtcacaaatcttgccctcccgatgttgtgctatgctttttatcagcgactaacccgctaatgcaaaacagataagtgaggaaacaatgggcattctgtcatggattatttttgggcttattgccggtattctggcgaagtggatcatgccaggtaaagatggtggtggattctttatgactatcctgctggggatagtcggtgccgtagttggcggatggatcagcacgctgtttggctttggtaaagtcgatggcttcaattttggcagcttcgtggttgccgttattggtgcgattgtcgtgctatttatctacaggaagattaaaagttaacgcttaaattgcacaaaggctgcacacaggcagcctttgctattttttagaggtgacgttaccaccatcccagctcagtgccgagtacgacaataatcgccacacccatcataataatcgttgtttttttcatctttatgctcccggggcagcatagccgccaataaaaaaccatgctaaaaatacgaccgctgtaataaagattacaaccggaaaaataataccgattcgcatgttatcaccaatcaaaaggatgtgaatacgcctcaggaatgtggcgctgaatgcgcgacaaaaggtgttttctgtttgtgttttttctcctgatacatcgcgatatcggcagcatgcagggcactgtctgcatcggtcgtttcaggatcgacttctacaatgccaagactggcaccaggataatacaaatcaacatcacctaagtgatattctccacgtatttgctgttgaatacgttctcgcagcgacgaaatatccgcattctcgttatttagtgaaacaaccaaaaactcatcaccgccgagacgaccaataacttcgccattttgctggagcgtattaaggcgctcgccaacctgaatgagaaacagatcgccactattatgaccaaaacgatcattgattaatttgaagttatccagatcgataaacgcgatcattatcttatggttaagatgccgggcgagagaaaacagcgtcgtcagattttcaaaaatcgcccgccgattcggtagcccggttaacgagtcggtatacgattgcgcaatcagcgcggcattggcttcgcgcagctgttcaaccaacgcctctttttgaatatattgtgcaatcagtccggcgaataactgtaaaacctgttccgcgcgttcactccactggcgcttctcactgctggcggcgcaaagcgtgccatagaatgatccatccggtaagtgaattggtgtactcagaaatgtggtgattccaagattgcgtgccgcaatacagtcgccccaacggtcagggacttcatcgctgaaaaagcagttttcatcaatagcgcgtttgcataacgagtaatcccacgagacggtaaaattctccgggatgtgcattttctggctgttacgggcaaacataatatgctgcaggcgcgcttcgacatccactttggtcaggtaggttgattccatatcagtgaccatttccagcatctccagaagctgtcggaccagactttccagtgactgttctttggcaagggattgcgagacgcgggcgataatctgatctgacacgaaacaactccaggatacggcgggtaaatgctgattatttaatctttgcaggcatgataaaacatcatcaacaaagatgaaacaagacgtaatatgttttgagtgaatgtaataaaaatagtgctgcaaaacaaaacgataccgcgatactctaagtctggataaatatgtgagatcaataaatgaaaattatcagttttgttctgccttgcttgctggtcctggctggttgttcaaccccttctcagccagaagcacctaaaccgccgcagattggtatggcaaatccggcgtcggtctattgccagcagaagggcgggacgctcattccagtgcagacagcgcaaggggtcagcaacaattgcaaattaccgggcggtgaaacgattgatgaatgggcattgtggcgacgggaccatccggctggtgaaaaataaccgccggatgctgtactaaaatcacaagctacgtagccagtcggccagcaccagcgcatggttctgcgtggtgttttttgctgcgtagagcagggtcagcggctgttttttggcgatgtccgccagccgctttccttcttgctcgtgttgcgccagttctgcaagatattgctcgcgaaaggttgcaaaatcgacgacttcgccgtgaaaggctttgcgcagttccgttgacggcgtgatttctttatcccactcatcaagggctaaatcggtttttttgataccgcgcggccagaggcggtcgaccagtacgcgataaccatcgctctgttcagccggatcataaacgcgtttgcactgaatattcatcgtgtttgttctccctttcacgcatgatttgtcacgtcactatagcaccggatattagcgaatttctttgtctctcccggcgcaaagtccgaaaatcgccatcagtagtgaaagtattgcaacacccatcagtggtacggaccagtcaccgttagcatcgtgtattttacccatcagcggcggcccacaggctgccagcaaatacccgacggattgtgccatccccgagagtgccgccgcctgatgcgcagaacttgcccgaagaccaatgaacgtcaaccccagtatcattgttgcgccggaaccaaaaccgaaaagcagagtccaggtgatcgcgtgcgctggcataaagcagagcccaacagcgcccactgcgcacatcaaggcaacgaacgctgcaataccacgctgatctttcacatgatgtaagaaaagagggatcagcaaaccgggagctgctgtggctagttgcagcaaaccatgcagtgaacccgcctgtgcttcgctatagccgcgactgatgaggatcgccggaagccagccaataatcacgtaatagaccagtgagttgatcccaagaaacaatgtgacctgccaggcaagcggcgaacgccagataccccgagtatgtaaggcgcgcgaggtactcaaatttgcatgttgttggcttcgccactgtggcagccataaaaaaagagccagcagaggaaaacacatcagcatgaacaacgcgccttgccagccaaaaccgttcaaagccagcggcacgaccatagccgatcccagtgccgctgcagctcccattgtcagggaatatgcgccggtaagtctggcgacggaatgagggaaatcgcgtttaattaatcctggcagtaagacattgcctaatgcaatcccaccgccaatgaccgctgtaccgccaaataataagtaaggcgaagggagagaacgaattgcgatacctgcacagatcaaaagtaacgcggcaaacaggctacgttccataccaaaacgtcgcgccaccggggcagccaaaggtgagattagcgcaaaggccaataatggcagggtggttaataagccggtttgcgctgtcgtcagcgagtaagcggaacgaatcgtatcgagtaacggtgctgcgccggtgaaggtgacgcgtaatgtagtggcaatcatcagaatgccagcgataaggacaatcctgtttttgccgcttaatgaagttgaacaggtcatatgcttctcattgttacaaacgaggctgtaccttaccgtttttattgttatgttgaatcaagctaaaatgacaaattatcgctaaattcggacaaaatgatgcacaggttgaatctcaatggctatgaacccgaccgacaccatgaagccgcggtcgcattttgtattcacgccggaacggatgagttaaccagtcctgtacatcagcaccgcaaaggacagctgatactagcattacatggtgcaattacctgtacggtggaaaatgctttgtggatggtgccgccgcaatatgcggtttggataccgggcggggtggaacatagcaatcaagtgacagctaacgctgaactctgttttctgtttatcgaacccagcgcagtgacaatgccgacaacatgttgcacattgaaaatatcgcccttatgccgggaattgattttaaccctggcaaacaggacgacgactcagcgtgctgagccgatgacccgcagattaattcaggtcctgtttgatgaactccctcagcagccacaacaacagctgcacctgcccgtttcttctcatcctaaaatccgcacgatggtggagatgatggcgaaagggcccgtcgagtgggggtcattagggcaatgggctggcttttttgcgatgagtgaacgcaatcttgcgcgactgatagtaaaagagacggggttgagttttcgccagtggcgtcagcagttacagctgattatggcacttcagggattagtgaaaggcgatactgtacagaaagttgctcatacgctggggtatgattcaacaacggcctttattactatgtttaagaaaggcctggggcaaacgccaggccgatatattgcgggattaactactgtttccccacaatcagcgaaaccagacccgcggcaataagcgggccgaccggtacgccgcgaaacagcgccacgcctaaaacagtgcctaccagcagcccggcgaccagttgcggctggctgcccattaaggtcacgccgcgcccacccagccaggagacaataacgcctactgcaattgccaccagcgatttccagttcagaaacgagtgaatcaaggttgagggcggtagcgtcccgctggcgatgggggccataacgccaatcgtcagaatgattatcccgatacttagcccctgtttttcaatccacgggaaaaaggtgcttaacggtgtgacgcggacaatgatcaacaccagaattgaaacggcgacagtggtgttatgactgataaagcccagcgcagctaacccgagcaggatcagcaaagtgacatcaaacatcgtggtttccttgccaaaaaataataagcctgcttactttacgcttgctgcaggaaggaagtagaaaatctttacgttttttgcataaaaaatcaggcgaactgtcatcaaactgccatttgtgcacgctaacaataacgtgaaaacagctatctcccgggggcatgctatgaacgatcaaatgttcgtcgagacactgattatcacgtcatcgttttttgccattgctgttgtgctggttttgtccgttctgcttattgaacggacaggctagttacgcagtgcggcggaaattgagcagttctggttgcgcaatgcgcaaataatccgtggttttcaaaataacggatttatccagcatccctgcattgaaggcgatttcatcaaatcgttcgaagagtagagggtcggcaaccagtttgagttttggatggaagctgaaaggggggatcgcgccgaagacacagcctgtgagttcatcgacttcagcagggctggctaacgaagcgcgtaatccgcctatatggctggcaagttggctcagatcggcctgttgatcggcagcgaggatcgccagaacatgttgatttacgccattgcctttgactttacataccagtgccttagctccctggcctaaagcggtgccacgaatttctgacaccgcttcacatttacctaccgcttcatgggtaacgacgcggaagttagcaccttcttgtgataataaagcgattaaccgctgatgcgtcacgcttcctttagccatttcagtcatttcacgctcctgagattacaagcaaacaaccacagaaggttatcatgaacggctgtttttgttctgcttattgacatataaacgctcatcggaagctttatacgcatcatgtaacgtatcgttttctttcatcgcgtaaataccggaagagaagccgatttctttctgcggcgcgatatgttgcagacgtttttcgatacgttcagacagttgtgctgcaatttgcggcgtcgaatcgacaagaatgatgcagaattcatcgccaccgagtcggatggcataatcacttttacgaatcgattgtttaatcgcctgagctaataacgtaatcgctaaatccccctcctgatgaccgagggtgtcatttatttgctttaacttgtccatgtcaattgcaataaacatcaccgaagaaccggattgcaccagtttctgcaaccgctgctccagttcaggggttaaaattttgcgattatacagtccagtcatcgcatcactaatattttctcgcgacacattttggtataaacggaagtgcatccgcaccatattcagcaaaattaacgccgtcaaaatccagaacagaacgcttttccacgaagacgtgataaagtaaagaatatcaatggataacgagacacgaatgccgcccggtaagtcatggacgtaactgacatactggaacagattatcttcgctctggttgatgataatgtcgcgccccgaatcggtatcggttagcgtgacattgagaaaacgccagaggagagggcggtcatgagtgtaaaagatattccgcaaattgtttttgttaatatccagcagcacaatcccttttagctgccctgcgacatataccggcgtcagcaaactcatcacgttctgtttagtacgctgatcctggtaaatgctcgacaatacggtacgcccggtaaataccttttcaatatctttgcgatcgatgccaatacttcctgactgcaggaaggaccagttattcatcgcaaagtattcaacattaaccggctcataaaaatagacatagcggtcattgagatcgagataatagtgaaatttctcttcggccatcccaagacctgaaccgtaatcatcctggtggcggttgccttccactgcctgatcaaaagcgggtaatagtgctgcagcttccacaattgtgtcgcagtcagtggatgcggtttgtagtgtgccgcgtaagcccgggtatttatgggcagtcaggtttaagccatgggtattattggcagactcaaaagcctcgcagatggcgcgccgctgttctggcgacacttccgactgctcagcagcgagagcgcgcatcacatgcgcggcaatactctgattctgatacttatcataaagaaaggaggagtctgctttctgcacgatatagcgcagataggcactcattgctctgtcgctggcgacaagttcaaaaataaggaaggaagatgtcagcacaatgacacttgcggcgataaaatgccggagcattctatggtgcaatttcatgataaatggcactccttcggttagtgaaacgagaaaaccagataaagttcgattgcggcctggcacaggggcgctaattatactcatctctgcgccgctggggaggggaaatttaggggtaatagtaataaattgtatgcaaaagccacgcaaaaagcatggctctgaatatttttgcacttaaatatgatgaataatcactttgttgcccccctcgcttttcgcttcgcgtaaggctttatctgcttccgtcatgacaagcgagatattacgcgtgtcacccgttgaaaaaaccgtgccaatactgatggtcatttgttcaggaacatcatatctgttactaaagccggtcaggagttcgacatttttacgcatacgttccgcaatgatttttgcctgggcactattgagttcggtaaatagcaagccaaacacctcaccctccagtcgcgctaaaatatcatcagggcggatgctttgctggataatatcgacaattgaaaccagcactttatcacccacacgatgtccccattgggcattgatgcgtttgaactgattaatatcaaccagcatgacacagaagtccttaacaacaggtcgcgacaataatgactctacgctgttgaaaaagtagcgccgattataaatattggtcagcacatcatgaactgccagtttgctggagagttgcagttcctgaaaaatgttataaatcagaaaagacacaacaaacagtttactggaaacttcaatcccgcgactgatataccagatggtgtaattatactcatccagagtcagtagaagtaagttgcagcatagcgatgccagacataataatgctattaacggccatagttcgctggctaatcgtgtacgcatgataataaagaacagtaaaaatgcccacagacaaaccaatatttttgtatagttgattccccaggtcgcagtatggttgtccggacagtagtcgacgacatacaaagaatagtcagcgttataactgctcagattgtgtgccagaaggggaaaaactaaaaaaggaatcagcgccagcaacaggattcccgtttttttcttattgttgtcaaggatgttgtcttttccataacaaaagagtgccagcgaggttaaacaaataaaactgagttggcggaaaatatagaaaatagaaacatcattcgactttgtctggatcagtgtactgccgttaattggtttatggataattacaatggtttcaactaaatagataaggccacttaaaaatgcaaggcttaaaatgagtgttggtaaaatttgtttgttagtgaaatatttcattaacatgaaaagaaaaatgacggcgttaaggaaaaacaaagccacaacaaccatcaggtaattcatctgtgggatgagttttacatttgtgttttcgttatataatgtggtgatgcaaaataaaattaacgtcagcaataaactgaaaataaaaaagctttgagcttttaatttttgtgtacccatagaaaccataaaaaggagagcaatgtgagtgctggattttattgatggcagagatatatagttttgaccaggatcaattttcgttaacgataaaaaatatttaaagaataaccccatggaaatacgtgttgactgaatcatttttccgaatgattgttttctggaactaaattatgtaaaggttatgctgtcatatttaaagcgattgtaagctaatgtatgtaataaatgagataatttacagtaagctaaaaatcagccaggcgataatgacctggctgatagttttagtctttagctgttgcattttgtttatgaaacagttcacggaacaccggataaatatcatcctggtcgcggatgtgctgcatcgcaaagttgtcgaaagtagattgcagatgctcatattctcgccacaatgtctgatgtgcacgacgggtaatttcgatatagctgtaataacgaacaacaggtaataattttttcgccaggatttcatggcaaagcggagagtcatcggcccagttatcgccgtccgatgcttgtgcagcgtaaatattccactgtgccgggttataacgctctttcactacctcatccatcagtttcagggcgctggaaacaatggtgccgcctgtttcctgcgagtagaaaaactcatgttcatcgacttctttcgcctgggtatgatggcggatgtatacgacttccacgttcttatacgttctgctgaggaacagatacagcagaatataaaaacgcttagccatatctttagtggattgatccattgaaccggaaacgtccatcaggcaaaacatcactgcctggctggagggatcgggccgcttctcgtagttcttgtaacgtaaatcgaaggtgtcaataaaagggacgcgttcaattttggcacgtaattctgcaatttctttgcgcagacgttcctcttccagcagctgcgcaggttcactgttgctgatgatggccaaattctcttccagtgcatgaagttcccgccgcttgcctgccgtcatggctgtgcgtcgcgccagtgagttctgcaaggagcgcacaacgctgatatttgccggaacgccgttagcggtataacccgcccgatgcgttttatattcggtcagctggcgttgttggttttgtttcagattcggtaaggccaaatcttcaaagagcaaatcaagatactcatctttcgaaatctgaaagacaaattcatcctgaccttcaccatcctggctggcctggccctgaccactgccggaacctccgccgccaccctggggacgttcaattcggtcgttctggacgaaatggtcattgcccggatgcacgcggtggcgcagaccgccacgcccctgatgaaacatcggttcgctaatatcttccgtgggaatggatacggattcgccgctgtcgacgtcagtcaccgaacgcttattaatggcctcggagatcgactgtttaatttgcgctttataacggcgtaaaaaacgctggcgattcaccatgcttttgtttttgccgttcagacgccggtcaataaaccaggtcatatgccccccgtactacatttgccaactgtatgctacgcctgtgttgccgcttctcaggcccacggttcgctgtcgttgtaggcccggtaacatgtgtaccgggccagggttgttaagacgatttacgtacgcgcaaataccattcgcacagtaaacgcacctgtttacgggtgtagcctttttccatcatacggtcgacaaagtcgtcgtgtttcttctgctcgtcggttgacgttttggcgttaaacgagataaccggcaacagctcctcggtattggagaacattttcttctcgataaccgtgcgcagtttttcatagctggtccagttcggattgcgtccgctgttattcgctctggcgcgcagtacgaagttaacaatctcgttgcggaaatcttttggattactgatccccgccggtttctcgattttctccagctcggcgttaagagactcgcggtcaaacagctgcccggtatccggatcgcgatactcctgatcctgaatccagaaatccgcgtaggtaacataacggtcgaaaatgttttgcccatattcggaataggattcaaggtaggccgtctggatctctttgccgataaactcggcatatttcgggatcagataacctttcaggaactccagatagcgttctgcctgctcttgtgggaactgctcgcgctcgatctgctgttccagtacgtagaacagatggaccgggtttgccgccacttctacatgatcgaagttgaacacgcgggagaggatcttaaacgcaaaacgcgtcgacagaccgttcatcccttcatcgacaccggcgtagtcacgatattcctgatacgacttggctttgggatcggtgtctttcagactttcgccatcataaacccgcatctttgaataaatgctggagttttctggctctttaaggcgcgaaagaatggaaaaacgtgacagcgtttccagcgtgccaggggcgcagggggcgtgagtcaattcactgtgattaagcaatttctcgtagattttgatctcttcggaaatgcgtaagcaatacggcaccttcacgatgtaaacacggtcgaggaaggcttcgttgtttttgttattacggaaagtgacccattcggattcgttcgagtgggcgagaataatcccgttgaacggcagggcggagataccttccgtcccgttgtagttaccttcctgagtggcggttaacagcggatgcagcacttttatcggtgctttaaacatctcgacaaattccatgatcccttggttggcgcggcacagcgcaccggaatagccgtaggcgtccgggtcattctgcgcgtagtgttcgagtttacgaatatcgactttcccaaccagcgcggagatgtcctggttgttctcatcaccgggttccgttttggcgatagcaatttgttgcagaattgacggccagaccttcactacccggaacttagtgatatcgccaccaaattcatgcaggcgttttgccgcccatggcgacatgatggtgccgagataacggcgaggaatgccatactctttttccagaatctgagcatcttcctgcggattgaaaagacagaacggatgatcgttgaccgggctacgctcaccgttggcgctcaatacataaatcggtacgagctgcattaatgatttcagtcgctcagcaagcgatgatttacccccacccacaggccccagcagatacaggatttgtttcttctcttccagcccctgagccgcgtgtttcagataagagacaatctgttcaatcgcgtcttccatgccgtaaaactcttcaaacgccggataacgtgcaatgacccggttagaaaagagtcgagaaagtctgggttcctgggctgtatcgaccatgacaggctcaccgatagccatcaatagccgctcagccgcgttggcataagcactgcgatcttgccgacaagtggtaagaaactcctgcagtgtgaactcttcgtccttggcagcttcatatcgctggcgatagtgatcgaatatattcatggtatgccgtcctttcgttttttagcacaggttaagagccgttcatatgaatagtagaggctcccggaagaggtaaactgaacgacgtctcttgctaaaacacagcaactctcatgccattttatcgacgatgagaacaacgtgcccggtgatacaccttcaaaattaagcgtagatggcaaatggaaaacttgcctgcacggctttcttaatttcaatggcatatcaacaactcatccataaattttgcataattaatgtaaagaccagggtagccagtaacgctaaattcatttggttgtaagcgcggtgtcatccgcgtcaggaaaattaaacagttactttaaaaaatgaaaacgtaaaaaggttgggtttcgatgtattgacgggtaaactttgtcgcccgctaaacatttgtttaaggaatgattaattgtgaccaaactcaaacttctggcacttggagtgcttatcgcaacgtctgcaggcgtagcgcacgctgaaggtaaattttccctgggcgcaggcgtaggtgtcgttgagcacccatataaagattacgataccgatgtttacccagtaccggtaatcaactatgaaggcgataacttctggttccgtggcttaggtggtggttactacctgtggaatgacgcaacggataaactttcaattaccgcttactggtcgccgctttacttcaaagcgaaagacagtggcgatcaccaaatgcgtcacctggatgaccgtaagagcaccatgatggctggtctgtcttatgctcactttacccagtacggttacctgcgtaccaccctggctggcgataccctggataacagcaacggcattgtctgggatatggcctggttgtatcgttacaccaacggtggcctgaccgtgactccgggtattggtgtgcagtggaacagcgaaaaccagaacgaatactattatggcgtatcgcgcaaagagtccgctcgcagcggtctgcgtggctataacccgaacgacagctggagcccttacctggagctgagcgccagctacaacttcctcggcgactggagtgtttacggtaccgcgcgctatacccgtctgtctgatgaagttactgacagcccgatggtggataaatcctggactggcctgatttctaccgggatcacctacaaattctgataatgcatctttccagggcattttgtgcataaaaacagggcgtcacgccctgttttgcattacggtggtgcaatacctgggaggaaacaatgcaacaaaaaatgattcaatttagtggcgatgtctcactgccagccatagggcagggaacatggtatattggcgaagatgccagtcagcgcaaaacagaagttgctgcactacgcgcgggcattgagctcggtttaaccctcattgataccgccgaaatgtatgccgatggcggtgccgaaaaggtggttggggaagcattaaccggtctgcgcgataacgtctttctcgtctctaaagtctatccgtggaatgctggcgggcaaaaagcgataaatgcatgcgaagccagtttacgccgtctcaatactgattatctcgatctctacttattacactggtctggcagtttcgcttttgaagagactgttgcagcgatggaaaaattgatcgcccagggaaaaatccgccgctggggcgtttctaaccttgatcatgctgatatgcaggaactctggcagctgccggggggaaatcagtgtgccactaatcaggtgctttaccatctcggttcacgagggattgagtacgatctactcccctggtgccagcaacagcagatgccggtgatggcttacagtccattagcccaggccgggcggttgcgcaatggactgttaaaaaacgcggtagtcaacgaaattgcacatgctcacaatatcagcgcggcacaagtattgttggcgtgggtaatcagccatcagggtgtgatggcgattccaaaagcggccacgattgcccatgtccaacagaatgcggctgtgcttgaggtcgaactttcgtcagcggaattaaccatgctggataaagcgtatccggcaccaaaaggaaaaactgcgctggatatggtgtgatgttgatacgtgccggatgcatcgcacccggcacacaacattaacgcaaattaacgtttcgcaacgcgaatggattgcgccagatgtgcaggtttctctttggtcactttttgcgtttctgaagcgtaagccgtttctacacaaacaaatgttttgtagccatcatccggcatgtcgcccatgctaactgaaagcgccggtcccgggttccagccgacaacgttcagatgatgctggtggcctacggcgataatacgattcagcgcttcatcattaatcacgctgcaatcttgcggattcagatacacgcgatcggtacggtcagggaaggtctgaataccgtcggtcagtacatcttctttcgcgtcatttactttatcaatgaagcgatcgcccagcccactgacgcttaccttagcgatatcacccacgttaaagtaggtatgcagggcagaggtggtttcaaattcgccatgtgattcaagatcgatttcacaggttttacccacgcggaaatgcgctaacagcgtaaagtcgtgcggccagaattttttcgtctcttcgctttgtgtcaattcaaaagtcagcgctacgccatcagcatcttcacgatgtgatttcagcgtccacggcaggttgcgggcaaaaccgtgcgcaggcagaccttgttgtgccgccggaccaaaccacggccagcaaaccggtacgccaccgcgaatagcgacgccatttttgaacggtgtgttgttgctcaaccacagaacttcttcttcacccgcaggtttccacgagagaaggtgtgcgccctgtaatgcaaaagaggcttttacctggggatgatcgaccacaatgaggtccagttcatccagtttacgacgggagaggacaggggagatttgttcgatgaccggaagggcaaaaattttcttaatcatgacgcagtcctttaacttcattttatcaggtaaaaaaaagagcgaccgaagtcgctctttttagatcacagtgtcatctcaacttatttggagatgtgagcgatcaggtccagaactttgttggagtaaccggtttcgttgtcgtaccaggataccagtttcacgaagttgtcgttcagagcgataccagctttagcatcgaacacggaagtgcaaacttcgccgttgaaatcggtagatactacgtcatcttcggtgtagcccagaacgcctttcatttcgccttcagcagcagctttaacggcagctttgatctgctcgtaagttgcagctttttccagacgaacggtcaggtcaactacggatacgttcggggtcggaacgcggaacgccataccagtcagtttgccattcagttctggcagtactttacctacagctttagcagcaccggtagaggacgggatgatgttctgggaagcgccgcggccgccgcgccagtctttgtgagacgggccatcaacggttttctgagtagcggtagtagcgtgaacggtggtcatcagaccttcgatgatgccgaagttatcgttgataactttagccagcggagccaggcagttggtggtgcaggaagcgttggaaacgatgtcctggccagcatatttgtcgaagttagcgcctttaacgaacatcggagtgttgtctttagacggaccagtcataaccactttcttcgcaccagcggtgatgtgtttacgagcagtttcgtcagtcaggaacagaccagttgcttcagcgacaacgtcaacaccaacttcgtcccatttcaggttagccggatcacgttcagcggtaacacggatttttttaccgttaacgatcagatgaccgtctttcacttcaacggtaccgtcgaaacggccgtgagtggagtcatatttcagcatgtatgccatgtaatcagcgtctaacaggtcgttgattgcaacgatctcgatgtcagaacgtttctgagcagcacggaaaacaatgcgaccgatacggccaaaaccgttgatacctactttgatagtcatatattccaccagctatttgttagtgaataaaaggttgcctgtaaaattacaaaaaccttacgcagcgtcaagcggaatcgtgtcaatcattgcgacaaatcaatcctgtgcctaagcattacgcgactgactcgcctcactcttcctttgggcttgagaccacatggggtcggcgccccgaattttaaagggcaattacgataaaaatgtgattttcatcacgatttaggtgcagccatttcgtcgagatcaagtttaggacaaaattttgccagttggtgttaatgttttgttagaatcagtcacgtaatgtgagcacgattaaagtgagatgtgagcaaatggctaataaaccttcggcagaagaactgaaaaaaaatttgtccgagatgcagttttacgtgacgcagaatcatgggacagaaccgccatttacgggtcgtttactgcataacaagcgtgacggcgtatatcactgtttgatctgcgatgccccgctgtttcattccgaaaccaagtatgattccggctgtggctggcccagtttctacgaaccggtgagtgaagaatccattcgttatatcaaagacttgtcacatggaatgcagcgcatagaaattcgttgcggtaactgtgatgcccatctggggcatgtctttcccgacgggccgcaaccaacaggcgaacgttattgtgttaactctgcttctttacgcttcactgatggcgaaaacggcgaagaaatcaacggttgaaaaaacgattcagcaacttattccacaggagcggaaaaattatgaatcttgatgacattatcaacagcatgacgcctgaggtataccagcgtttgtcgaccgccgttgaactggggaaatggcctgatggcgttgcgttgaccgaggaacaaaaagagaattgcctgcaactggtgatgctgtggcaagcccgccataataccgaagcacagcatatgacaattgacacaaatggtcagatggtcatgaagagcaaacagcagttaaaagaagattttggtatctcagcaaagcctattgctatgtttaagtaagtggtttatcccctttttgccgcggctatgaaggggatagccaacaatgaccccacgactcgtctcaattatctcgacccgacctggctaagtcccagtccgatctcttgcagtcgcgttcacgcctgaatgacttctcctgaacttaagtctcagacctatttggccggtaatccctctcgaatttgctctttttgcgtcccgccttccaccaacctgtaacagacccagccattttctgcgtaattgtgatctaagttgtaaaacgcagatcattatctgtgttttacagatttaatgttgacctcaaaaatcatgtgggtaagtatgatggccatctaagcaaaacaaaacacagaggatgacgcaatgaaagcactggctcggtttggcaaggcctttggcggctacaagatgattgatgtcccacaacccatttgtggcccggaagacgtagtgattgaaattaaagccgcggcaatctgcggcgcagacatgaagcactacaatgtcgatagcggttctgatgagtttaactctatccgcggccatgagttcgcaggttgtattgcgcaggttggtgaaaaagtcaaagactggaaagtggggcaacgcgtcgtgtcggataacagcggtcacgtttgcggcgtttgtccggcctgtgaacagggtgattttctgtgttgtacagaaaaagtaaaccttggtctggataacaatacctggggcggtggtttttccaaatattgtctggttcctggtgaaattctcaaaattcatcgtcatgcgttgtgggaaatccctgatggtgttgattatgaggacgcagccgtacttgaccctatctgtaatgcctataaatccatcgcgcagcaatcgaaattccttcctggtcaggatgttgtcgtcatcggcactggcccactcgggctgttttccgtacaaatggcgcggattatgggggcggtaaatatcgtcgtcgttggtctgcaagaagatgtggcggtccgcttcccggttgcaaaagaactgggggcgacggcagtagtaaatggttctaccgaagatgtggtggcgcgctgccagcaaatttgtggcaaagataatctgggactggtgattgaatgctccggtgccaatatcgcactgaaacaagccatcgaaatgctccgcccgaatggggaagtggtacgcgttggaatgggcttcaaacctcttgatttctcgattaatgacattaccgcctggaataaaagcatcattgggcatatggcctatgactccacctcatggcgtaacgctatccggctattagccagcggcgctatcaaagtcaaaccgatgatcacgcatcgtatcggcctgtcgcaatggcgcgaagggtttgatgcgatggtcgataaaaccgcaatcaaagtgatcatgacttacgactttgatgaataactactctcctgaaggaacgttatcgcatggaacagataacaaaaccgcattgtggtgcacggctggatcgcttaccggattgccgctggcattcgtcaatgtttgccatcgtcgcgtttggcttgcttgtctgctggagtaatgccgttggtggcttgatcctcgcgcagctgaaagcgttgggctggacagataattccaccacagccacattctcagcaatcacgaccgccggaatgtttctcggtgcgctggtgggcggcatcattggcgacaaaaccggtcgcagaaatgcgttcatcctctatgaggccattcatattgcctcgatggttgtcggtgctttctcaccgaatatggattttcttattgcctgccgttttgtgatgggcgttgggctgggagctttactggttacactgtttgctggtttcaccgaatatatgcccggtagaaatcgcggaacgtggtccagtcgggtttcctttattggcaactggtcatatccgctctgttcattgattgcgatgggactcacgccgctgattagtgcagagtggaactggcgggtacaactgcttatccctgcaatattgtcgcttatcgctacggcgctggcctggcgctactttcctgaatccccgcgctggctggaatcgcgcggacggtatcaagaagccgagaaagtcatgcggagtatagaagaaggcgtcatacgccagacgggtaaacctttgccgcctgtggttattgctgatgacggtaaagcgccacaagcggtgccgtattcagccttactgacaggagtattactgaaacgcgtgatattaggctcttgtgtgctgattgccatgaacgttgtgcagtacacactaattaactggttgccaacaatattcatgacccaggggattaatttaaaagactcgattgttttaaataccatgagtatgtttggcgcgccatttggtatttttattgccatgctggtgatggataaaattccgcgtaaaacaatgggtgtggggctattaatcctgattgcggtgctcggatatatctattcactgcaaaccagtatgttgctcataacgttgattggtttcttcctgattactttcgtctatatgtacgtttgctatgcctcggcagtgtatgtccctgaaatctggccgacagaggccaaactccgtggctccggtctggcgaatgcggtagggcgaatcagtggtattgccgcaccttatgccgttgcagtgctgctcagtagttatggcgtaacgggagtctttattcttctgggggctgtttcaattgttgtcgcaattgctatcgccaccattggaattgaaaccaaaggtgtctccgttgaaagtttaagtattgatgcagtagccaataaataatacgggtggattcaaaatgaaaaattcaaaagcaatattgcaggtgccgggcacaatgaaaattatttcagcagaaataccagtgcctaaagaagatgaagttttgattaaagtagaatatgtcggtatttgtggttcagatgtacatggttttgaatcaggcccgtttattccgcctaaagacccaaatcaagaaattggcctgggtcatgaatgcgccgggacggttgtggctgtgggaagccgcgtgcgcaaatttaaaccgggggatcgggtaaatatcgaacctggcgttccttgcggtcactgtcgttactgtctggaaggcaaatataacatctgcccggacgttgattttatggcgacacaacccaactaccgcggcgcattaacgcactatctgtgtcatccggagagctttacttacaaactgccagacaatatggacacgatggaaggggcgctggtggagcctgccgcagtcgggatgcatgccgcgatgctggcagatgttaaaccgggtaagaagataattattctgggagcaggttgtattggtttgatgacgttgcaagcgtgcaaatgcctgggcgcaacggaaattgccgtcgttgatgtgctggaaaaacgtctgataatggcggaacaacttggtgcgacagtggttattaacggcacaaaagaagacactattgcacgctgtcagcaatttaccgaagacatgggcgcagatattgttttcgaaacagcgggttctgcggtcaccgttaaacaggcaccttatctggtaatgcgcggcggtaaaattatgattgttggtactgtacccggcgattcggcaatcaatttcctcaaaatcaatcgcgaagtcactatccagacggtattccgctatgccaatcgttatccggtcacgattgaagctatttcttcagggcgattcgatgtgaaatcgatggtgacgcatatttacgattatcgggatgtacaacaggcatttgaagagtcagttaacaacaaacgcgacattattaaaggcgttattaaaattagcgattaattaatacgggagaacagaacatgctcgcagatatcagatattgggaaaacgatgccacaaataaacattatgcaattgcccattttaacgtatggaatgcagaaatgttgatgggcgttatcgacgcagccgaagaagcgaaatccccggttattatttcttttggtacaggttttgtcggtaacacctcatttgaagatttctctcacatgatggtatcaatggcacaaaaagcaacggtgccggtaataactcattgggatcatggtcggagtatggagattattcataacgcctggactcatggtatgaattcattaatgcgtgatgcttccgcgtttgatttcgaagaaaatattcgtttaaccaaagaggctgtcgatttcttccatccgctgggtattccggtagaggcggaattagggcatgtcggtaatgaaaccgtttatgaggaagcgctggcgggctatcactataccgatcctgaccaggcggctgaatttgttgaacgtacgggctgtgattcattggctgtcgccatcggcaaccagcatggggtttatacgtcagagccacaattgaactttgaggtcgtcaaacgcgtacgcgatgccgtttctgttccgctggttttgcacggtgcatcggggatcagtgatgccgacattaaaactgcaatttcgttgggtatcgcgaaaatcaacattcatacggagctctgtcaggccgcaatggttgcagtgaaagaaaaccaggatcagcctttcctgcatttagaacgtgaagtacgtaaagctgtaaaagaacgggcattggaaaaaattaaactgttcggttctgatggcaaagcggaataatgatatggataatctcgacgttatttgtataggtgccgctattgttgatattccattgcaaccggtcagtaaaaatatctttgatgtggattcttatcctcttgaaagaatcgcaatgaccaccgggggtgatgcaataaatgaagcaacaattatttctcgtctgggccatcgcacagcattaatgagtcgtattggtaaagatgccgcagggcaatttattctcgaccattgccgcaaagagaatattgatattcaaagcctgaagcaggacgtcagcatagatacctctattaacgttggactggtgacggaggatggcgagcggacgtttgtcacaaaccgtaatggcagtctgtggaaattgaatattgacgatgttgattttgcgcggttttctcaggcgaaattattatcactggccagtattttcaacagtccactattggatggtaaagcgctaacagaaatttttacgcaagctaaagcccggcagatgattatctgtgccgatatgatcaaaccgcggttgaatgaaacgctggatgatatttgcgaagcattgagttatgtcgattatctgtttcctaattttgccgaggcaaaattactcaccgggaaagagacactggatgaaattgctgactgctttcttgcgtgcggcgtaaaaacggtggtgattaaaacgggtaaagacggctgctttatcaagcgtggtgacatgacgatgaaggtgccggcggtcgcaggaataaccgccatcgacaccattggcgcgggcgataactttgcttcaggttttattgcggcactgttagaaggcaaaaatctgcgtgaatgcgcacgctttgccaatgcaacggcggctatctcggttctaagcgtcggtgccaccaccggcgtaaaaaacagaaagctggtcgaacaattgctggaagaatacgaaggataatgaaggcaaatgaaaaagatacctttaggcacaacggatattacgctttcgcgaatggggttggggacatgggccattggcggcggtcctgcatggaatggcgatctcgatcggcaaatatgtattgatacgattcttgaagcccatcgttgtggcattaatctgattgatactgcgccaggatataactttggcaatagtgaagttatcgtcggtcaggcgttaaaaaaaactgccccgtgaacaggttgtagtagaaaccaaatgcggcattgtctgggaacgaaaaggaagtttattcaacaaagttggcgatcggcagttgtataaaaacctttccccggaatctatccgcgaagaggtagcagcgagcttgcaacgtctgggtattgattacatcgatatctacatgacgcactggcagtcggtgccgccattttttacgccgatcgctgaaactgtcgcagtgcttaatgagttaaagtctgaagggaaaattcgcgctataggcgctgctaacgtcgatgctgaccatatccgcgagtatctgcaatatggtgaactggatattattcaggcgaaatacagtatcctcgaccgggcaatggaaaacgaactgctgccactatgtcgtgataatggcattgtggttcaggtttattccccgctagagcagggattgttgaccggcaccatcactcgtgattacgttccgggcggcgctcgggcaaataaagtctggttccagcgtgaaaacatgctgaaagtgattgatatgcttgaacagtggcagccactttgtgctcgttatcagtgcacaattcccactctggcactggcgtggatattaaaacagagtgatttaatctccattcttagtggggctactgcaccggaacaggtacgcgaaaatgtcgcggcactgaatatcaacttatcggatgcagacgcaacattgatgagggaaatggcagaggccctggagcgttaaatactcaacacgattcacctctgtttctgtgaaaactgtgatgaaaatctgtgattcaaacaggttattttgaaagtaaacatcggttatgcgataatcgcgctaatgtgatgtaaaaagatacaggggtgtaatcgtggcggcaaaagacaggattcaggcaattaagcaaatggttgccaacgataaaaaggtgacagtctcaaatttgagtgggatttttcaggtaaccgaagaaaccattcgccgcgatcttgagaagctggaagatgaaggctttttgaccagaacctatggtggtgctgttttaaatacagcgatgttgacggagaatatccatttttataagcgcgcttcatcgttttatgaagagaagcagcttattgcacgcaaggcactaccctttatcgacaataaaaccaccatggcagccgattccagtagtaccgtaatggaattgctcaaattgttacaggaccgtagtggcctgacgttgctaaccaactcggcggaagcgattcatgttctggctcagtcagaaattaaagtcgtttcaacgggtggggaactaaacaaaaatacactttcactgcaaggaagaattactaaagagatcatcaggcgctatcatgtcgatatcatggtaatgagttgtaaaggtcttgatattaacagcggcgcgctggactctaatgaagcggaagctgaaatcaaaaagacaatgatccgtcaggcgacagaagttgcgttattggttgatcactctaagtttgatcgcaaagcttttgtccagttagctgattttagtcatattaattacataataactgataaatcaccgggtgcagagtggatagcattttgcaaagacaataatatccagctggtgtggtaatttaagcacacgttgtcaatattatttgttcctgcgccttgaaataaaatgatgataaagatgcggcaagtgaatttgccgcaattgctacctttttagcaaatccgaggcacctaatggaacaatatgatcaaattggcgcaagactggaccgcttgcctttggcccggtttcattatcgtatatttggtattataagctttagtctgttattaacagggtttttgagttactccggtaatgtcgtcttagcaaagctggtaagcaatggatggtcaaataatttcctcaatgccgcctttacctcggcattaatgtttggttatttcatcggctcacttactggtgggtttattggtgactactttgggcggcgcagggcgtttcgcataaatcttctcatcgtcggtattgctgcaacaggggccgcttttgtccctgatatgtactggctcatcttctttcgcttcctgatgggaacaggaatgggggcgctgattatggttggctatgcctcatttacggagtttatccccgcgacggtgcgtggaaaatggtccgcgcggctctcatttgttggtaactggtcgcccatgctgtctgcggcgataggcgtggtggttatcgctttttttagttggcgaataatgtttctgctgggtggtattggcatactgttagcctggtttctctcaggtaaatactttatcgagtcgccacgatggctggcagggaaagggcaaatcgccggtgcagaaagccaacttcgtgaagtagagcagcaaattgaaagagagaagagtattcgtttacccccgcttacttcgtatcagagcaacagcaaggttaaagtaatcaagggtactttctggctcctgtttaaaggtgaaatgttacgacgtacattagtcgcgattactgttttaattgcaatgaacatctcgctttataccatcaccgtatggataccgaccatatttgttaactccggcattgatgtcgataaatcaatactaatgaccgctgttattatgattggcgctccggtaggaatatttattgcggcattaattattgatcattttcctcgtcggttatttggctccaccttacttattattattgccgtgttaggctatatctattcaattcagactacagagtgggcgattttaatctatggcctggtgatgatcttctttttatacatgtatgtttgcttcgcgtcggcggtttatatcccggagctttggccaacgcatttacgcctgcgcggttcgggtttcgttaatgccgtcggacggatcgtcgcagttttcacgccctatggcgttgcggcattattaacacattatgggtcgatcacggtgtttatggtacttggtgtcatgttattgctttgtgcgctggttctctccatttttggcatcgaaacgcggaaggtgtcgttggaagagatttctgaggtgaattaaatctttcgttgatggcatcaattgccagatgtgccactgacgtgttttatttggcctacaatgccagtacagaattgtaggccagcgtaaaattacccctgcgtctcttcccagtctgccagcgtatatagcgttgccccagctgctgacatctccataaacgcgtgcgcactgtcctggggctggatattcacgccacgacaaccatcggtaatcacgtttaccttataacctaactgtaacgcgtccagcacggtaaacttcacgcaatagtcagtagccaggcccataacgatcaattcatcgatttcatgatcgcgtaaccagtcatcgagagaggttttctgccgacggccgttatcaaaaaaggcactgtaactgtcaactaaaggattttcgcctttatggaacaccgctgcgatcgctttttggttcagtaacggatgtaattgtgcgccttcactgttctgcacacagtgatctggccagaaggtttgtggcaaaccgtcgagttggcctggcgtataaggctctacaccgtgctgactggcaaaactgccgtgattcgccgggtgccagtcctgactggcgataaccgcttcaccgcgcgactggcaccagtcaatcaggcggttagcgacatctaccgtactgtcaccttccggcacggcgagcgcgccaccagcacagaaatcattttgtaaatcgaccagtaacagggcgcgatggggcattgcagtctccttaatcatccggcgtcagttcgccgcgcaggttttggctcatggccttgcgaatggtttcagtatccagttcctggctcagcaggtaatgcagtttggttagcgtggcttctacagtcatatctgcaccgccaataacgccggcatgggcgagggcgttaccggtggcataaccacccatattcactttaccggacatacattgtgtcaggttgaccaccacaataccgcgatcgctggcttcttgtaattcctgcaggaaggctttgttttgtggcgcattacccacgccataggagcgcagaatcaatgctttcaccggttggcgcagaaaattgcgcacgacgtcagcagaaatccctggataaatcgtcactacgccaattggttgtggcgtgattggatgaacgattaattccccttcaccgtgcggggcgggtggcgtattcaaacgacgaatatggataccagcttccagtaacggaggaaggtttggagaggcaaacgcatcaaaaccatcggcatgggctttggtagtgcggttgccgcgatacaatcggttattgaaaaagagcgttacttcgttgatcggataattcgccgcaacgtacaacgcattcagcagattaatttgtccgtcagagcgtaactcagccagcgggatttgtgaccctgtcacaatgaccggtttaccgagattctcgagcatgaacgacagcgcagaggcggtatacgccatcgtgtcggtaccgtgtagaatgacaaaaccatcatagtcgtcatagtgcgctttaatatcttcagcaatatgctgccagtcttccggcgtcatatcagaagaatccatcaacggcgtatattcatgaatggtgaaatctggcatctccgggcgatggaattccggcatcagcgccagttggcgttgtagatgacctgacaccggaatataaccctgctcggaacgctgcatcccgatggtcccgcccgtgtaggcgacgtaaattgatttcttttgcatgatattgatatgaatgatatcgaaagagcaaaagtatatacgtgaggcaggaggagcgcacctgatactatgcggataaggaaatatgggtcgagacagcgggaagaggattcgtcgaggtaaaaaataatgtggccgacgatctgtcggccactcagtacaagacttaacgcacgttggcgcaggtcaggcaaaacgcataacggttttgtgggtcgttaaacgcggccagcttgtcgctttcacttttaacggtagaggctaccgaggcaagcggtgcaggtaacatggcctggaacgcatctggcaacattgcccggacagaaccagacatgttgtccatcactttgtcgaagaaggtcggttcatcaacgtagtattccagatgccactgtttcacttttgccagctctgctgctttggcaaccgcatcatcgaaatccccgagactatcgaccagcccgttagcttttgcatcctgaccggtccagacgtggccctgggcgattttatcaatttgctccggcgtcgaatgacgcgcatcagcaaccagcgtgataaagcgtttatagccattctcaatgcttaattgcatcatctgctgcgcttccggcggcagtgccctggttatagaaacatccgccagcggtgaagttgagacaccatcagtatgaacaccaatcgaatccagactattttctacggtggtgatcacgccgaagataccgatagaaccggtcagggtgctggggttagccacaatgtaattagctggcgtggaaatccagtaaccaccagatgccgccatgccgcccatcgatacaaccacaggcttacccgctgcccgggctgctgccagttcagcgcgaatcacttcagacgcggtaacgctgccgcctgggctattaacacgcaggacaatcgctttcactttcgggtcaaggcgagcgtcgcggatttgtgccgcagtggtatcaccgccaacattcccctgagtttcctcgccatccataattgcgccattagcgaagacgacaccgatgctgtcaccggtatctgccggcgttttcaatgcgtaatcgtaataactgatggcgcgataatttttatcagtcttactccagccgaactctttggtcagagctttttcgatttcggcactcgatgccagtgcatcgaccagcttgttttccagtgcatatttcgcggtatcgccaccggttttggttaaaccctcaagcaacccttgcgcgccagggaatacctgctgagcagggatctgccggttagcggcaacagtattcagatagttttgccacagctcaccaatccagcggctgtcagcttcgcgggctgccggtgacatatcatcacgaataaacggttcaacggcagatttatacgtacccacgcggaacacatgggtggaaactttcagcttatccagcaacgatttgtagtacagaccgttggtagcaaaaccgtgcagatcaaccacgccttgcggtgacagccaaattttattggcgaaactggcgagataatattgcccctggctgtagttctcgccaacggcataaaccggtttcccgctgtcacgaaactctttcagggctttgccgatgtactgcatagacggctggtcgccgcctgcgaagtttttcagatccatcacgataccggtgatattgcggtcgtccttcgcctggcgaatggtgttgacgatatcaaacagtgagttttcctgcagacgatcggaactggcaccaagcagctggcggcttaatttactaaaccgctgagaactgtcgggtttatcgacgatcacaccagaaatgtccagcagcagtgcgccacgactggccgtttctttcgaatcaccaccactgacctgcatccagatccccacaccaaccagtacgaggaaaataaagaacaggttaagtaccatttcacggacgaaattcagcagacgccacgtccatttaaaaaatccggcaataaatcgccaaagggttcgcatgtattctcccaacttaaggtcacacctgtcacaggcgcaatagatgtggttatcgtaatgacccaaccggcacttgtcagcaggaattgcggactgtgctgtaacaaaatccactctcgtgttaattttgtgaataaatatcacgacaggagttaatcaaatggatgcactcgaactattgatcaatcgccgtagcgcctcccgcctggctgaacccgcgccaacgggtgaacaactgcaaaacatcctgcgtgcgggtatgcgtgcgccggaccataagtccatgcaaccgtggcatttttttgtgattgaaggggaagggcgcgagcgtttcagcgccgtactggaacagggggcgattgctgccggtagtgatgacaaagctatcgacaaagcccgtaatgcgccgttccgcgcaccgctcatcatcacggtggtggcgaaatgcgaagaaaatcataaagtcccgcgatgggaacaggaaatgtctgccggatgcgcggtcatggcgatgcaaatggcagccgttgcccaaggatttggcggcatctggcgcagtggcgcattaactgaaagtccggtagtgcgtgaagcattcggttgccgtgagcaggataaaattgtcggttttctctacctcggcacgccgcagttgaaagcatctacgtcgattaacgtcccggacccgacgccgtttgtaacttatttctgataattgtcgcgaaactgtctggattgtgagcaaaggcgcaggaattcagacactctcacttatcacttcacggaatgagggttaccatacccggattgcattgacaggagatgtccatgagcgagaactcgattcgtttgacccaatacagccacggagctggttgcggctgtaaaatttccccaaaagtgttggaaaccatcctgcacagtgagcaggcgaagtttgttgatccgaatttgcttgtgggtaatgagacccgcgacgatgcggcggtgtacgatctgggcaatggcaccagcgttatcagtaccaccgacttctttatgccgatcgttgataatcctttcgattttggccgcattgcggcgactaacgccatcagcgatatcttcgcgatggggggcaaaccgattatggcgattgcgatcctcggctggccgattaacaaactttccccggaaattgcccgcgaagtaaccgaaggtggacgctatgcatgccgtcaggcgggtattgcgctggcgggcggtcactccatcgatgcgccggagccgatttttggtctggcggtaacggggatcgtaccgaccgagcgggtgaagaaaaacagtaccgcacaagccggatgcaaactgttcctgacgaaaccgctggggatcggcgttcttaccacggctgagaaaaaatcactgctgaaaccagaacatcagggactggcgacagaagtgatgtgccggatgaatatcgcaggcgcgtcctttgccaacatcgaaggcgtaaaagcgatgaccgacgttacgggctttggtctgctgggccatttgagcgaaatgtgtcagggcgcaggtgtgcaggcgcgcgttgactatgacgcgatcccgaaattgccgggggttgaagagtacattaagttgggcgcagtgccaggcggcaccgaacgtaactttgccagctacggtcatctgatgggtgaaatgccgcgtgaagtgcgcgatctgctgtgcgatccgcaaacttctggcggtttgctgctggcggtcatgccggaagcagaaaatgaggttaaagctacagccgccgagtttggcattgaactgacggcgattggcgaactggtgccagcgcgcggcggtcgtgccatggttgagatccgttaattcaatgcggttgtttattgccgaaaaaccgagtctggcgcgcgccattgctgatgtcctgcccaaaccgcaccgtaaaggcgatggctttatcgagtgcggtaatggtcaggtggtgacctggtgtatcggtcacctgcttgagcaggcgcagccagacgcctacgacagccgctatgcgcgctggaatcttgcggatttgccgattgtcccggaaaagtggcaattacagccccgaccctccgtgaccaaacaacttaacgtcatcaaacggttcctgcatgaagccagcgaaatcgttcacgccggggacccggatcgcgaagggcaactgctggtggatgaagtgctggactatctacaactggcaccggaaaagcgccagcaggtgcagcgttgcttgataaacgacctgaacccgcaggcggttgagcgggcgatcgaccgtcttcgttccaacagtgagtttgtaccgctgtgcgtttctgcgctggcgcgagcgcgtgccgactggctgtacggcatcaatatgacccgtgcgtataccattctcggtcgcaatgccggttatcagggcgtactttccgtgggacgcgtgcagacacccgtgctcgggctggtggtgcgccgcgatgaagagattgaaaacttcgtggcgaaagacttctttgaagtcaaagcgcatatcgtgacacctgccgatgagcggtttaccgctatctggcaaccgagcgaagcgtgtgaaccgtaccaggatgaagaagggcgcttgttacatcgtccactggcggagcatgtggttaaccgcattagtggtcaaccggctattgtcaccagctataacgataaacgggaatcagaatccgcgccgctgccgttttcgctttcggcgttgcagattgaagcggcaaaacgcttcggtctgagcgcgcagaacgtgcttgatatctgccagaagctgtacgaaacgcacaagctaatcacttatccgcgttccgattgtcgctatttgccagaagaacattttgccggacgccacgcggtgatgaatgccatcagcgttcatgcaccggatctgttgccgcagtcagtggtagatccagatatacgcaaccgctgttgggatgacaaaaaggtcgatgcgcaccacgccatcattccgaccgcaaggagttctgcgatcaacctgacggagaacgaagcgaaggtctataacctgattgcccgtcagtatctgatgcagttctgcccggatgcggtgttccgcaagtgtgttatcgaactggacattgccaaaggcaaatttgtcgctaaagcgcgttttcttgctgaagcaggttggcgcgcgctgttaggcagcaaagagcgcgatgaagaaaacgacggcacgccattgcctgtggtggcgaaaggcgatgagttgctgtgtgaaaaaggtgaagtggtagagcggcaaacccagccgccgcgccattttaccgatgcaacactgctttcggcgatgaccgggattgcgcgctttgtgcaggacaaagatctgaaaaagatccttcgtgcgaccgatggtctggggacagaagcaacgcgtgccgggattattgaactgttgttcaagcgtggtttcctcaccaaaaaagggcgctatatccactccaccgacgccggaaaagcgttattccattcgctgccagaaatggctacgcgaccggacatgaccgcgcactgggaatcggtgctgacgcaaatcagcgaaaagcagtgtcgctatcaggactttatgcagccgctggtggggacgctatatcagcttattgatcaagccaaacgtactccggtgcggcagtttcgcggcattgtggctccgggcagtggtggcagtgctgataagaaaaaggctgcaccgcgtaaacgtagtgcgaaaaaaagtccgccagcagatgaagccggaagcggggcgatagcgtaagcgagcgaatctttcgtgctattcgagtcatattctgaaatatccagcggatcaagaaaattcgttggatattttttttgcatggataaaattatcgcctctaaagtatgtaataacagggaatgtgatgaaaaaagttttattacaaaaccatcctgggagcgagaagtattcttttaatggctgggaaatatttaatagtaattttgaacggatgattaaagaaaataaggccatgctgctttgtaagtgggggggggtatttaacatgtgttgtcgctgtaatgtttgtattcgcagcgataacatccaacggtttgaatgaaagaggcctgattactgcgggatgctcttttctttatctattaattatgatggggcttattgttcgggccggttttaaagcaaaaaaagaacaactgcattattatcaggctaaaggtattgagccgctcagtatcgagaagttacaggcgctacaattgatcgcaccttatcgattctatcataagcaatggtctgaaacgctggagttctggccgcgaaagcctgaacctggcaaagataccttccaatatcatgtgcttccttttgactcgatcgatatcataagtaaaagacgcgagtctttagaggatcaatggggtatcgaagatagcgaaagttattgtgccttaatggagcattttctttctggcgaccatggagccaatacctttaaagcaaacatggaggaagccccagagcaggttatcgccttgttgaataaatttgctgtttttccctcagactatatctctgattgcgctaataatcgctccggtaaatcctcggcgaagctaatatgggcggcggaattatcatggatgatctcgatatcaagcacagcttttcaaaacgggacaattgaagaagaactggcctggcattatataatgcttgcttctcgaaaggcgcacgagttgttcgaaagcgaagaagattatcaaaaaaatagtctaatgggatttctttactggcatatctgctgctatcgcagaaagttaacggatgctgaacttgaagcgtgttatcgttacgacaagcagttttgggagcactacagtaagaaatgccgttggcccataagaaatgttccctggggagcatcatccgttaaatactcataaacgcctgaaattttgccgggggcgctgcgcttgcccggcctacattagagcgtaactgcaatgaattgtgcccatttgtaggcctgataagcgtagcgccatcaggcatttacaacttaaatcacaccctgcgccagcatcgcatcggcaaccttcacaaaaccggcaatgttcgcgccctgcacgtagttggtttgctcaccttcaccaccatgctcaacacaggcatggtggatatccagcatgatgtgatgcaaacgtgcgtcaactttctcggctttccagcccaggcgcgcagcgttttgcgccatttcaaggcctgacgttgctacaccgccagcattagccgctttacccggtgcaaacagtacgcctgcctgctggaacagttcagtcgcttcgatggtggtcggcatatttgccccttcggcgacggctttaacgccattggcgataagctgatgcgcggcgtcaacatccagttcgttctgggtggcgcaaggcagggcgatatcaaccggtacagaccacggctgttggccttcgagatagaccagaccaaattctttggcgtaatctgccactcgaccatcgcggctggctttgatttcgataagacgtgccagtttctctttcgtgaatccgctttcatcaactacagtgccgctggagtctgacgcagtgatcacacgagcaccaaattccatcgctttttcgatagcgtactgggcgacgttgccggagccagaaacggaaacgcgcatcccttcaaaacccataccgtggcgttttaacattgcttctgtgaaataaaccagaccgtagccggtagcttccgggcgaataagactaccgccaaatgaaaggcccttaccggtgaagacgcaggcggtattgttggagagctttttcatcatccccgccataaagccgacttcacgaccaccaacgccgatatcacctgccggaacgtcggtatccgcgcccagatgacgataaagctcggtcatcagcgcctggcagaaacgcatcacttcgccttcgcttttacctttcgggtcaaaatcgctaccgcctttaccaccgcccatcggcagggtagtcagggcatttttgaaggtttgttcgaagccgaggaatttgagaatggagaggttaactgacggatggaagcgcataccgcctttgtacgggccgatggctgagctgaactgcacacgccatgcacggttgacctgtacctggttgcgatcatcaacccataccacgcgaaactggatcacgcgctccggttcaaccagacgctccagtaatgacatctggcgatattttggattttgttcaagaaaaggccagagtgtggtcattacttcacgaacggcttgcgcgaactcggtttgattcgggtcgcgcttttggacatggttgaggaatgactccagagaatatgtctgatccatagatataaaacccttatatattaatacgattgtgcttatgttgtttatgtgatgtgcttttgcagttttcgactataccatcaagaatgtgacggtaagcaagaaaaaaatgacccaggaaagcaaattaataacgagagtaatctcataaccaaatgcgataactcagacgctaaagttttgccacccggctaccgttatcagtagcagagacaataacgttaaggagttccctgtgagtcgagcattgttcgccgtagtattagcatttccattaattgcactggctaacccgcattatcgtccggacgtggaggtaaacgtaccgccagaagtgttcagttcaggcgggcagtcagcgcagccctgtactcagtgctgcgtttatcaggataaaaattattctgaaggcgcggtaattaaagccgagggaatactgctgcaatgccagcgggatgacaaaacccttagcactaatccgctggtctggcggcgcgtaaagccataaacgcctctaataatggaatgtcagcaggggccagcggatattgcagcgcctcttcaggtgagcaccagaccagcgcctgatgttcatgtgcctgtaacgtcccgtggaagtcgggtacgtgccaggcatgaagatggataatccggcccgaaacttctcgctgatggctggtaacatactcacccacagttgcttcgatgcccagttcttcgcgtaactcacgcaccagcgcctgccgctggctttcatccggctcgactttaccaccggcaaactcccataatcccgcctgatcgctctgggcggggcgttgcgcgagtaaaattttgccatcacgttcaatgatggcggcaacaacttcaatcattttcataaattacacacgggcagataagcgaaaaatgccataatatccgcactgttgctcaatcagaaaggctttatatttaaggagtgcctgtgctagaccgccatcttcatccccggattaaaccgttgttgcatcagtgcgtgcgggttcttgataaaccgggcattacgccagatggtttaacattagtgggatttgccatcggcgtgctggcactgccttttctggcgctgggctggtatctggcggcgcttgtcgtcattttgttgaacaggctgcttgatggtctggacggtgcgctggcgcggcgcagagggcttaccgacgcgggcggctttcttgatatttctctcgattttcttttttacgcgctggtaccttttgggtttatcctcgccgcaccgcagcaaaacgccctggcaggcggctggctgctgtttgcgtttatcggcacaggcagcagttttctcgcttttgctgcgctggcggcgaaacatcagattgataatcccggttatgcgcataaatcgttttattatctgggcgggttaaccgaaggcacagaaacgatcttactgtttgtgctgggatgtttattccctgcatggtttgcgtggtttgcgtggatcttcggtgcgttgtgctggatgacgacctttacgcgggtgtggagtgggtatctgacgctgaagtcgcaccagcgtcagtaattgcaatgttatttgctactgtccgggccgcgttcaccggttgctaccggattttttggatcgctgctccattcgtaccagccgccgtcatacacggaaacattcttccaacccatggcgcgtgcgtacataaaggtttcggacgcgcgccagccggtgccgcagtagaatgaaacttgctgctctggtttgatattccacgctttccacatagcggtaatatcatcggcgctgcgcatggtgccatccgggttatgaaaatcttccatatgcgtcgagtcgctaccagcgtgtccccaacgtgctccggctatttcaccttttggtttaatatagctgtaaccgctggtcgtaccgataaattctggccacgaacgaatgctcaccagcgatgcatcctggcgatgcagcagtccacgggcctgttctatatcgagcatcaactgcggttgtgcagggatcttcacgccgaaatccggttccgctttcactttcggtggcgttcctcgctcaacaggcagtcccgcgtcggaccaggtttgccagccgccatccagcagacgcacatctttcacgcctgcgtagagcataatttgcgccacacgcgctccagcgtatacgtcacgcccgtacagaatgaccgtggtgtcatggcgaatgccgtgttttgccagcatcgcttttagttgttcatcagaaactttgttccacagcggttcgctttccacttcgttggtatcgatgtagtcagcaccgggaatatggctgataaggtaaagcttaggagcgccccaggccgcttcaatgactttccagtcaccggcaggtttcgccgtaacctctttaccttgttgcaggtcgtgcagccattgcggataaaccagctgctcaaagtgcggcagtttttgtagacgggaaggttcgcttagcgcgtcactcagaatggagatatgcgtaaaacctgctttttgcagtcgcgttttgacggcgtcgacatctttgtcattaccgtacagcgccaccggggcatcggctttcaggttatgttgcttgatccacgcgttgagctgttcggtgctcattttgtcgagccagctggcagagaggtttaaggcggcaggttcatgaccagaagggccatttaaggtttgtggccagccgttataaaacgcgctggggcgagtatctatcgctttgccattttgttgttgaagctggtcaagtgtaagaggcttcgccagttcagcggcccacgaagaagcgcaagccagccctaaagccattgccagcgcggtcatttgagaaacacgtttcatcgaaaatcccgacattgtagttttgagtgcgccattctgaactgacgcattgagaaaaactttgcgttatcgcagtttgttgtaattttctgaccactgcgccatatccagaacagaactatcagcaggaacatcctggagatcgtgcgttacctgaacgacggggatcgccagttcgcgaacttcgctgaacacccactggcgaaaattatcgcgcagagccacatcaagacggctgaatggctcatccaggagtaacgcttttggctgagcgagaagggcgcgcagcagggccacccgcgctcgctgaccgcctgataatgtcgcagggtcctggtgataagtttcagccagtcccgctcgatcaagcgcgtctttcacggcattgcgcctggcagtccccttgagcgtcgacggtagcgccagcagtaaattttgcccgacgctgaactggtcaaataacagtgcatcctggaaaagaatgccaatctgacgctgtgcggtgggtagcatgtcaatccgttgctcattgaaccatagctcacctgtacaagaaaactgtccagccagtgcaccaatcatccatgaaaacagagtggattttccacagccagacggccccattaacgtgacaatgtcacctttatcaaccgtaaagttaacgtttgtcagcaagcggctttctggtaaacgtagcgaaacatttttcacgcagagcattagcggagtccttgtctgacataacctacccattttgcgactaacgcggtcagggcaaaaataataagcggtaacaacagttgccataaagcctgggcggcgagaataccgttgctgccgccgctgcttaatgccaccgcctcagtggtgagcgtcggaaaacgccccgcgcccagccacagcgtcggcatatactgcgcaatactgactgaaaatcccaccgcgaaggcaatcagcacagggcgcaacatgagtgggcatttcacgtaaaagaagattttggcccgcgaccagcccagtgtttgcgcaatcaaaattaaccgtgaatcaatgcgctgccaggcgggttgcaggataaacagcatccacggcattacccacagcagatgcccccagaccaccgccgtccagcttccatccaggttcagccatagcgccagcgtgtactggcccgccaccagtggcagagcgggcaatagaatgggcaaccagagccacaactggcgacgctgtggcccccattccagccacagcagtaacaggagcaaagcgatgaatgtcgccaccagccccattgtcaggctgttgatgagtgcttcactattgatcgtcgactgatccgcgaggatcgccagcagaaccacacacagcacaccggttaagggtaaaaaactcgccagcgtagtgcctggtaataaaggtgtggcaggcttgcgaatgccatctacgcggggaatagtgcgccgccagctgcgccatagcagatagctcagcaaaacgtaggcggcgagtaacagcatcagcagcagactggcgagtgcgcctttcgtttgttgatccgcgtcgccctgagttaaccactgccagctaattactgccagcgtcggtggattacctggcccaagaataatcgccacatccacgaccgaaagcgaccaggcaacaatcgccagcatcgccattgccagcgaaggcgcgacggagggcaacagcagccagttcaggcattgccagcggctgtagcccagcgaatccagcacaatgacctgctgcaacagccgtttttcgctcaatactgccgctaagatccacagcagaaatgcgctttctttcactgcaagggtgaggcccagaccgatgccaaatcggtccattggcggagtgaaatacgggaaatagtcatatagcagccctccgtcagcaaagagcagcagggcgctggtggcaaaagccacatggggaatggcgagcagccacggcagacgggcgcacatacgctgccatttcggcccaggccatagcgccacaatcaccagcagggcaatcaacaatgccccgaccgccgcgatggttgtcgacaccagcgttgccagtaatgcatgcggtaactgtggatcggcaaataacgcctgccagtgtgtcaacgacaacgcaggcgatatcagcgtgagagctgccgggatcagcggtgcataaatcaccgccaccatcgcccacagcaaaaagattaatgcgtaccgtaacggcgtaaccattcttgttccagtgcattcacccatcctgcgtgcggttcagccagtaccggcggcagatcctgcggcattcttgattgcaatgtttcgcgctgcccatcaggcagtttttgcggatcgagaacagaaggatcgccccagacagcgggatccgctttacgcagttgcgcattgggtgagagcaggaagttggcaaccaccttcgccgcagcactggcatttgcgttagcaggaatggtgacgaaatgcacgttgccaatcatcccctggttaaaaccaaaactgtaactgcttgcaggcaaatcgccgctggcgattttttgctgggcatgagcagggttaaaggtcagcgacaggcgcaatgtgccggctttcagcagagcatccatccgcgcgggcgaaggcgggaaatcctttcctttgcgccataaatagggatgtagcgcgtcaagatattgccacaagggcgcagtgacgcgggcgaaagtggctttatccggggcaacttttaacgcggcgggatcgggcgtcagcataatcagcaactgttcaagaaacgccgtgccggtaaagtccggtgggcgcggataggtaaccgtgccgggattggctttagcaaactccagtaaggcttgcggcgtttgtggtggctgtggcgtaacatcgcggcgggcgataaacgtcagttgtgcgccgccccagggcgattcagccccttctgtaggcactgaaaaatcttcccgcaccggcagctgtgtgtcgacatagcgccagttgggcagagtctccgcccagcccgtttgtaataaattggcctcttttaaggtgcggaagttttcgccgttcacccagagcagatccaccgagccgcccgttttacgtccggcagcagcttcggtctgaatgcgcttcaccgcgtctgcggcatccgccagacgaacaatcttcaggtttatagcgtaatgggttttcatctcgccgctaacccagtcgagatagcggttaattgcggtatcgccgccccaggcgttaaaccagacggtttgccctttggcctcatttttaatttcctgccagtcactggcatgtgttgccagagaaaacagcgataacaatcccagcaaccacccacaatggcgcatcttctctccttaagaacgtttttccggaatacggcacagcccctgagcgggaatgtccatggcagaattaaaacgagccgacaggttttgcaggccgatcaatgccgtcagttcggtgagcgcctgagcgtcaaaatgcgcagccagtcgggtgcgcagggcatcatcgaccgttggcggcgttacgcttgcggcttcggcgtactccagcgccagccgttcttcatcgctgaagagcgggctttgccgccagtcagccactgccagcagtttatcggtgctgccggtacgctcggcgactttcatactggtgatatccacgcaaaactcacacaggcacatttgcgcaatgcgcgcgctgacaagcgatcgcactaccggatcgagcggtgagcgtttgcgctccagccacccaacaaacattgacaccaaataaaagataaacgggatccgcccccaccagcgaatcgggcttagcacctcgccgtaatggcgacgatgcagccacgcctgcggacgtaaaatgaaaggaattttgctaagcggcggtaaacccatcaggcattcctcttctggcgctcaagccatattttcttcgccataaaaatcaccacggtcagggcaaacagaataaacagtccggtgacaaaccagaaagtaccgcctgttaacatgctgcccgcccaggaataaacaatagtcgccggtaattgaccaagcccggtggcgataaaaaacgagcgaaaacgtattgaagtcagaccggcagcatagctgattggatcgaaagggacaaaaggcaataaccgacagaccaggatggtgtgtttgccgtagcgagtgaaaaagccgtccatactgtcaagcacggttttgccggttaatttttccaccacttcgcggcccatcactctggcgataaaaaagcacagcgccgcgccggccatcgaactggtccacgacagcaagccgccccagaacgcgccaaacagcgacgcattggcaaaggtgatcaaaaacgcaggtagcggtgcagcaatggcctgtaaaatcatcaacaagaacgagacaactgccgccagtgcgccgtaagactgaataaagcgttctataccctgttggtccacggcggcaaacgccgcaacgctgcgattgataaactcatggacgccgggaagcagcgcccatgcgagcagcatagcgaacaacaggatgatgagggttatacggtagtaccagattttacgcgattgtatcttcatcatcctttatcctggctttattcggtgattttaaaggtaaccgttgccagcgtgttatccgccgggagaactgaggcattgcctttgaatttcacttcgccgcgtttttccaccgcaccataagtgtatgttgcattgctgacgatgccgaccgggcagctatccagacacaccaggcaacccgttttcttctcttctgctgccgttaaattaccgccaaagcgcatgtccagtttcttgccattactgtcaacaatcacttcatcgaaggaatacgcttttgccgccccttgccagttgaccgaaatatccagtttgctgcctgtgacatgagtcgtttctttattatccatcgtcatgttttcgcccggcgtaccacctgcctctttcagggcttcataaaatgctttcggggtcgcataagccataaacagcgatttatgtccgttggagccatctttaaacacaataccgtgacgagtgtcgtcggtgaggaaacgaccattaatttgcaccagcatggttaccgtatggttattggcatcgacgcgcagcggttggctgttcgaaagtccgtcgtattccacttttgccgccgcattctctttttgatcgcagccgctaagcccggcaacagccagtaagcagagtgcagccagtccttttttccatgacactgaataatgttgcgacatcgttctatccttcattttttgggtgagtaagtgggctgcggcgcgaagcagacagatccacatgtttgtgtcgggcgtagagttttgcgagctggacgagaataaacagcgccaggcccgccagacagagttgtaaaataaagcgcagcgtaatgccttcattggcgagatcgcttgccatcacggtataaataacaataccgggcagggtcgtgagtgccgaaataagggtataaggccagaaggcgatggtggttaatccgtaagcgtaattttgaatattgtaaggaaacaacgggattaagcgggtcagaataagaaaatcaataccgttacgcgcaatgcctttttcaatggcctggaaggtatggctatggcccacgtatttcagcagtaaatcacgtcccagccagcgcgccagcaggaatgagcacgaggaggccagcgttgcggcaattaatgagagtagtgtccctaagagcgggccaaaaactattcctccagcgatcaccagtatgcttcctggtaacagaaagagggtggcaatgatgaataacagaatatagaggctataaccgaacaatccgctctggcgaatgagtgtctgtaagtggggtaaatcggtgagcagatcgaataaaccgaaagcgtggatagcgtaaatgaccagcgcaaaaataagacaggcaaacagaaagttacgctcagcgttcatcgtggagtttcctatatcaaacttgataatagagaagtggtcagacaactaaaaacgcagtgacggtataacaaaggacggcaggcaacaaatcattactgacagtttgttgatttttctcaaggttaattctcctgacccagtttgagccaggagagctgctaaattagcggcggaaggtcgcccagacgggggcgtgatcggacggtttttccatgctgcgaatttcatagtcgatgccggtttctacgcaacattctgccagcggttggctggcgagcagcaggtcgatgcgcagaccacggttatcgtcaaaaccttttgagcggtaatcaaaccatgagaaacgatctgctgtttgcggattagcatggcggaaggtatcgaccaacccccagctcatcagcctgtccatccattcgcgctcttccggcaggaaagagcatttaccggtacgcagccagcgcttacggttttcttcgccaatgccgatatccagatctgtagggctgatattcatatcgcccataatcagtaccggattatcacgtttgagttcggtttccaggtagttttgcagattctgataaaactgcgcttttgccgggaattttatcggatggtcgcggctttcaccctgcgggaagtaaccgttgatcacggtgacattacccagcagtgaggggatttccgccataataatccgccgctgcgcctcttcgtcgtcaccgggaaagccgcgacgcacggcaatcggcgtctctttggtcagcagcgccacgccataatggcctttctgcccgtgataaaacacgttgtagccgagcttcgccacctcttcgagcggaaacatatcgtcatgaacttttgtctcctgcaggccaatcacatccggttggtgcttttcgacgatggcttcaagctggtgaggtctggcgcgcaggccgttgatattaaaagagacaaatttcatagtcgctgccatttattcagataaagagtgcgtggatggtagcagaatttcgcgttgcttaccgcctgttgttaagtgatttgatcgatggttgttaatgatgtcaacgatggcgcaaaaaatgcccgcttttggtgcgcgctgcgtcagaatggcgcagtaatttccagtaaatttcgtcaatgatcacaattccagaattatattttacttctgcataacattgcgttttttattctttttattcacccacatcgcaaacgtattcactttatatgcactttaaatgcatatggtttggttataactccttgatttccagttagcctccgccgtttatgcacttttatcactggctggcacgaaccctgcaatctacatttacagcgcaaacattacttattgttaacatataaataacgaattatttactgtagaggtcgctatgtctcagccaattacgcgtgaaaactttgatgaatggatgatacctgtttacgctccggcaccctttataccggtacgtggcgaaggttcgcgcttgtgggatcagcaggggaaagagtatatcgacttcgcgggtggcattgcggtgaacgcgctgggccatgcgcatccggaactgcgtgaagcgctgaacgaacaggcgagtaagttctggcataccggcaacggttacaccaacgagccggtactgcgactggcgaaaaaattgatcgacgccacgtttgccgatcgcgtcttcttttgtaactccggtgcggaagccaacgaagcggcgctaaaactggcgcgtaaattcgctcacgaccgctacggcagccataagagcggcatcgtggcgttcaaaaatgcgtttcatggtcgcacgctgtttactgtcagtgcgggtgggcagccagcctattcacaggattttgcgccactgccggcggatattcgtcatgctgcatataacgatattaactctgccagcgcgctgattgacgactctacctgtgcggtgattgtcgaacccatccagggggaaggcggtgtggtgccagccagcaacgcgtttttacaaggtctgcgtgaattgtgtaaccgccacaatgcgctgttgatttttgatgaagtacaaaccggcgtcgggcgcaccggggaactgtatgcctatatgcactacggcgtgacgcctgatctgttaactaccgccaaagcgctgggcggcggtttcccggtcggtgcgttgttggcaaccgaagagtgcgcccgcgtgatgaccgttggcactcatggcaccacctatggcggtaatccgctggcctcggcggtggcaggcaaagtgctggagctcatcaacacaccagagatgcttaatggcgttaaacagcgtcacgactggtttgttgagcgtcttaatactattaatcaccgctatggtttgttcagtgaagttcgcggcttaggtttgctgattggctgtgtactgaatgccgattacgccgggcaagcgaaacagatctctcaggaagcggcgaaagcaggcgtgatggtactgattgcgggtggcaacgtggtgcgttttgcgcctgcgctcaatgtcagcgaagaagaggtgacgaccggactggatcgctttgcagctgcttgcgaacactttgttagccgaggttcatcatgatggtcatccgtcccgttgagcgatcagatgtctcggcgctgatgcagcttgccagcaaaacgggcggcggcctgacgtcgcttcccgccaatgaagccacgctttcggcgcgtatcgaaagggcaatcaaaacctggcaaggcgaactgcccaaaagtgagcagggctatgtgttcgtgctggaagatagcgagacaggcaccgtggcggggatttgtgccattgaggtggcggttgggctgaacgatccctggtacaactatcgcgtcggcacgttggttcacgcctcaaaagagctgaatgtctataacgcattgccgacgctgtttctcagtaacgatcacaccggcagcagcgagctgtgcacgctgtttctcgacccggactggcgcaaagagggcaacggctatttgctgtcgaaatcgcgctttatgtttatggcggcttttcgcgacaagtttaatgacaaagtggttgctgaaatgcgcggggtgattgacgaacacggctattcaccgttctggcaaagcctcggtaaacgcttcttttcgatggattttagccgcgccgattttctctgcggcaccgggcaaaaggcatttattgcagaactgatgccgaaacatccgatctatacccactttttatcccaggaagcccaggacgtcatcggtcaggtacatccgcaaaccgcgcctgcccgcgcggtgctggagaaagaaggttttcgttaccgcaactatatcgacatcttcgacggcgggccaacgcttgagtgtgacatcgaccgcgtgcgcgccattcgtaaaagtcggctggtggaagtggcagaagggcagcctgcgcagggcgattttccggcctgcctggtcgccaatgaaaattatcaccatttccgcgtggtgctggcgcgtaccgatccggcaaccgagcgtttgattttaaccgccgcacaactggatgccctcaaatgccacgcaggggatcgcgttcgtctggtgcgcctgtgcgcagaggagaaaacagcatgactttatggattaacggtgactggataacgggccagggcgcatcgcgtgtgaagcgtaatccggtatcgggcgaggtgttatggcaaggcaatgatgccgatgccgctcaggtcgagcaggcttgtcgggcagcccgtgcggcgtttccgcgctgggcgcggctctcattggctgaacgtcaggtcgttgtcgaacgctttgccggattgctggaaaggaataaaggcgaattaaccgcaatcattgcccgagaaaccggcaagccgcgctgggaagcggcaaccgaagtgacggcgatgatcaataaaatcgcgatatcaattaaggcgtatcacgctcgtaccggcgagcagcgtagcgaaatgccagacggcgcggcgagcctgcgacatcgcccgcacggcgtgctggcggtgtttgggccgtataatttccctggtcatttgccgaacggacatatcgttccggcattgctggcaggtaacaccattatctttaaacccagcgaactgacaccgtggagtggcgaagcggtaatgcgtttatggcagcaggctggcttgccgccgggcgtgctgaacttggtgcagggcgggcgtgaaacgggtcaggcgctgagtgcgcaggaggatctcgacggtttgctgtttaccggtagcgccaataccggctaccagctgcatcgccagctctccggtcagccggagaaaattctcgcccttgagatgggcggtaataatccgctaattatcgatgaggtggcggatatcgatgccgctgtccatctgaccattcagtcggcgtttgtcacagccggtcaacgctgcacctgcgcccgccgtttattgctgaaaagcggggcgcagggcgatgcgtttcttgctcgtctggttgccgtcagccagcgattaacgccgggcaactgggatgacgaaccgcagccgtttattggcgggctgatttctgaacaggccgcacagcaggtggttactgcctggcagcaactggaagcgatgggcggacgaaccctgcttgcgccgcgcttattacaatcagagacatcgttgctgacgccggggatcattgaaatgacaggcgttgctggcgtaccagatgaagaggtgttcggaccgttattgcgcgtctggcgttatgattctttcgaggaagcgattctaatggcgaataacactcgcttcggactctcttgcggtctggtttcccccgagcgggaaaaattcgatcaactgttgctggaggcgcgggcggggattgttaactggaacaaaccgcttactggtgctgccagtaccgcgccattcggcggcattggtgcatccggtaaccatcgccccagcgcctggtatgccgcagattactgcgcatggcctatggcgagcctggagtcggactcgttaactttgcccgcaacgcttaaccccgggctggatttttccgatgaggtggtgcgatgaacgcctgggaagttaatttcgacgggctggtagggctgacgcatcattacgctggcctgtcgtttggtaatgaagcctctacccgtcaccgttttcaggtgtctaacccgcgacaggcggcaaaacagggcttactgaaaatgaaagcccttgccgatgcgggattcccccaggccgtgatcccgccgcacgagcgtccgtttattccggtgctgcgtcagttgggattcagtggtagcgatgagcaggtactggaaaaagttgcacgccaggcaccgcactggctttccagcgtcagttccgcttcgccaatgtgggtagccaatgcggcaacgatcgcgccatctgccgatacgctggatggcaaagtgcatctcaccgttgccaacctgaacaataaatttcaccgctcgctggaagcgcacgtcaccgaatcacttttaaaagcgatttttaacgacgaagagaaatttagcgttcattcggcgttgccgcaggtagcgttgctcggtgatgagggggcggcaaaccacaatcgtctcggcggtcattacggtgagccgggtatgcaactttttgtctacgggcgagaagaaggcaatgatacccggccttcccgttatccggcgcgacagactcgcgaagccagcgaggcggtggcaaggctgaatcaggtgaatccccaacaggtgattttcgcccagcaaaacccggacgttatcgaccagggcgtttttcataatgacgtgattgccgtgagtaaccgccaggtgctgttttgccaccaacaggcgttcgctcgccagtcacagttactggcaaacctgcgtgcgcgggtgaacggttttatggcgatagaagttccggcaactcaggtttccgtgtcggatgcggtgtctacctatctgtttaacagccaactgttgagccgcgatgatggttccatgatgttggtgctgcctcaggagtgtcgggaacacgccggagtatggggttatctcaatgaactccttgccgctgacaacccgattagcgaactaaaagtctttgatttacgtgaaagcatggcgaatggcggcggcccggcgtgcctgcggttgcgggtggtattgacagaagaagaacgccgggcggtgaatccggcggtgatgatgaacgatacgctgtttaatgcgctcaatgactgggtggatcgttactaccgcgatcgccttactgctgccgatctggccgacccgcaattgctgcgcggagggcgggaagcactggatgtattgagccaattactgaatctcggttcggtttatccgttccagcgcgagggagggggcaatggataattttcttgctctgaccttaacgggtaaaaaaccggttatcaccgagcgagaaatcaacggcgttcgctggcgctggctgggcgatggtgtgctggaactgacgccattaacgccaccgcaaggcgcactggtgatttcagcgggaatacacggtaatgagacggcacctgtggagatgctggacgcgttgcttggcgcgatatctcacggcgagatcccgttacgttggcggttgctggtgatcctcgggaatcctcctgcgctcaagcaagggaaacgttattgccatagcgatatgaatcgaatgtttggcggtcgttggcagctatttgctgaaagcggagaaacctgtcgggcgcgcgaactggaacagtgcctggaagatttttatgacctgggcaaagaatctgtgcgctggcaccttgatctacataccgcaattcgtggctccttgcatccgcagttcggtgtattaccgcaacgcgacattccctgggacgagaaatttctgacgtggctgagtgcggcggggctggaggcgctggtgttccatcaggaacctggtggtacgtttacccatttcagcgccagacattttggcgcgctggcctgtacgctggaacttggcaaagcgttgccctttgggcaaaacgatcttcgccagtttgcagtaactgccagcgcaattgctgcgctgctatctggtgagagtgtcggtatcgtgagaacaccgccgctccgttatcgggtggtttcgcaaattactcgccactcgccgtccttcgaaatgcatatggcaagtgacacgctgaattttatgccgtttgagaaaggaacattgctggcgcaggacggagaggaacgttttaccgtaacccatgatgtagagtatgtgttattccctaatccgttggtagcgttgggattacgcgcgggattaatgctcgaaaaaataagctaatacttacccgcagaaatcattctgcgggtattaagttgctttcttataaattaatacagattaatcctggttatttgctttatttatcaccagtcatccggtatagttcttcataatctctgcaaaatcatcgtgttgtaatattctctcatcactctccatcaaattttctttttttctccataattggcgcaaaagtgttttttacactttcattgttttaccgttgctctgattaattgacgctaaagtcagtaaagttaatctcgtcaacacggcacgctacttaagaaagccgtaataaataactgaaaggaaggatatagaatatgcgtaaattaactgcactgtttgttgcctctaccctggctcttggcgcggctaacctggcccatgccgcagacaccactaccgcagcaccggctgacgcgaagccgatgatgcaccacaaaggcaagttcggtccgcatcaggacatgatgttcaaagacctgaacctgaccgacgcgcagaaacagcagatccgcgaaatcatgaaaggccagcgtgaccagatgaaacgtccgccgctggaagaacgccgcgcaatgcatgacatcattgccagcgataccttcgataaagcaaaagctgaagcgcagatcgcaaaaatggaagaacagcgcaaagctaacatgctggcgcacatggaaacccagaacaaaatttacaacatcctgacgccggaacagaaaaagcaatttaatgctaattttgagaagcgtctgacagaacgtccagcggcaaaaggtaaaatgcctgcaactgctgaataatctttcagccaaaaaacttaagaccgccggtcttgtccactaccttgcagtaatgcggtggacaggatcggcggttttcttttctcttctcaaacagttgtaaaaaaagcctgatcaccactaacgtaaatcacccgagttgccgataaccatccacggttacctgaacgataacaatgaaaagaacgggccgggagcgagtatggaatactttgatatgcgtaaaatgtcggtgaatctgtggcgaaatgctgccggtgaaacgcgcgaaatttgcactttcccaccggcaaaacgtgatttttactggcgtgccagcattgcatccatcgcggcgaatggggagttttctttgtttcccggcatggaaaggatagtgacgttgctggaaggcggcgagatgctccttgaaagcgcagaccgctttaaccataccttaaaaccgttacagccttttgcctttgcagcggaccaggtggtaaaagcgaaactgacggcagggcagatgtcgatggatttcaacatcatgacacgcctggatgtctgtaaggcgaaagtcagaattgccgaacgtacgtttactacctttggctcacgcggcggggtggtgtttgtgattaacggggcgtggcaactgggcgataaattgctcactaccgaccagggcgcgtgctggttcgatggcaggcacaccctgcggcttttacaaccgcaaggtaaactgttgttcagtgaaatcaactggctcgctggtcattcgccggatcaagttcagtaatttcatagttaccggaaagcagcggcttacaaagaattttataaccgtcgtgatcaaacccggcgggtgtccgaattaacgttgtcgcttcttccagcgaattaaccgcccccagccacagccagttttgaataatatgatattgagtcatttccgggtgctgttctttcagtgccaccgcaccttgccaaggccaacacaccacccgcaaacgctccagagactggcgcaagcgtagcgcatgttcctcatggctctctttaccgcagcatgctccggcgcaacgttttagcgctgaacgaaaacatgcacgaccgcgacttaacggttccagtcccaacaggccataacaaagtttttgttcatcagcgatgctctgcaatgcttgcaaagctgcgcgcctattggcaaacaggccaaacaggttgggggctcgtgaaaaatccacctctttggcatacaccacatcgacgcgcttttcatttaattgcagggcgcagagctggcgattgcggcgcaaccgtttattaaacagcggctgttgttctttgattaatcgcgcttcaaggagcagagcgccgatttcgcctgcggtgcagatccagctgatgcgtcgggattgccgtagcatggcggcttcatccggggtacgtaaatgagaaaggacgcggctgcggatgttaatgcttttgccgatatagagcggcatggtgtcactttcgccatgaaacagatacacccctggtcgggtgggtaagtcattaaggaatgaacgtaaatgttcgggatattcataaattgccgcagcttcaaattcgagccgcggagaagttaaacgccgtaccactgttgactccgaatgctggttatctatccagtgtaacaggcgggaagcgattaaaaaagaggcgggtcgatgacaaaggttacaccgtctgacgtgctacgcctgtcaggcctattcgactcctgcaatatattgaatttgcatagttttgtaggtcgaataaggcgttcacgccgcatccggcgtgaacaaattactctttttcgcacaaaccattatgtgcaaattattactttttccagaaatcatcgaaaacggtaattggcggacggcgtttatgttcggttttcagataccagttctctattgttctggcgacctgttcaggtacgtttttcccttccagatagtcgtcgatattgtcataggtcacgccgagtgccacttcatctggcagagaagggcgatcatcttccagatcggccgttggggctttcttataaaggtgttccgggcaacctaatgccgtcagcaactgtttaccctggcgtttgttgagacgatacagcggattaatatccgtaccgccgtcaccatatttagtgaagaatccggtaatggcttctgctgcatgatcggtgcccaccacgacaccgctggtcatacccgcaatgctatattgtgctttcatccgctcacgcgctttttcattgccacggacaaaatcgctcagttcaatgcctgcttcccgcaatgcctgttcgctggccaataccgcgcccttgatattaacggttaatacgcgatccggttgaataaaggcaatggcatcctggcaatcttgttcgtcggcctgaacaccatagggcaggcgtacggcaataaattgcagtgattcgttgccggtttccaggcgcagctcattaatcgccatctggcacagctttccggcaagcgtggagtcctgaccgccgctgatcccgagcaccagtgatttaatgaacggataagtttgcaggtagcttttcagaaaatcgatactacgacgaatttcctcttcagcattaatctgcggttttgcgcccagcgcctttattatttgttgttgcaatgtcattgaacccctccagacagaaaagacaaaacttccttaaagctaacccgttgccactgaaacgacaagcgacagcgggctgaatggtggttaaaacgtcatacaggaatcctctgaaagcggagccgtttcgttcacgggcttgaaaaagcgcccaatgtattccaggcttatctaacacgctgataaacaagaggacggaatatgaacaagaatatggcaggaattctgagtgcagcggcggtattaaccatgctggcgggttgtacggcttatgatcgtactaaagaccagtttgtacagcctgtggtgaaagacgtcaaaaaaggcatgagccgggcgcaggttgcacaaattgcgggtaaaccttcgtctgaagtgagcatgatccatgctcgtggtacttgccagacctacatcctgggtcaacgtgatggtaaagcagaaacctactttgtcgcgttagatgataccggacatgtcatcaactccggttatcagacctgtgctgaatacgacactgatccacaggctgcgaagtaatcaattcgtctgaaagcttgagtaacaacggaaaccggccattgtgccggttttttttggcctgagttcttaattatcttcgcgaattatttgcccgaaatgtgaagagggtcataaccgcaggtcaaggagagacaatttataaggtcaaagaaatactattgctcaggtctataccgtatactcctttcagccacaaaaaaagtcatgttggtttcgcaagttacccagagcatggaagcaggttaaggcttgcggagtgtctggctgacagataatcgtcgatgagggcagttttatggaaaagaaacacatttatctgttttgttctgcgggcatgtctacctctttactggtatcaaaaatgcgcgcacaggcagaaaaatatgaagttccggtcattattgaagcatttccggaaacactggctggtgaaaaaggtcagaatgccgatgtcgtgttattagggccgcagattgcttatatgttgcccgaaatccagcgtttgttacccaacaaaccggttgaagtaattgactcgctgctttatggcaaagtcgatggtttaggcgtgcttaaggctgcggttgcagcgattaaaaaagccgcagcaaattaatttattttaaattttcccgtcaaagagttatttcataaatcaataccgcaatatttaaattgcggtttttaagggtatttttctatgagtaatgttattgcatcgcttgaaaaggtactcctcccttttgcagttaaaataggaaagcagccacacgttaatgcaatcaaaaatggctttattcgcttaatgccgttaacccttgcgggggccatgtttgtattaattaacaacgtttttctaagctttggggaggggtcgtttttttattccttaggtattcgcctcgacgcctcaaccattgaaacacttaatggtctgaaaggtattggcggcaacgtatataacggaacattagggataatgtctttaatggcaccgttctttattggcatggcgctggcagaagagcgtaaagtcgatgcgctggcggctgggttgttatccgttgcagcatttatgaccgtcaccccatatagtgtcggtgaggcctatgcggttggcgcaaactggttaggtggggcgaatatcatctccgggattattattggcctggtggtggcagaaatgtttacctttattgtccgccgcaattgggtcattaaactgcccgacagcgtacctgcttcagtatcgcgttccttctcggcattaattcccggctttattattctttccgtgatggggattattgcctgggcgttgaatacctggggcaccaacttccatcagatcattatggataccatctcaaccccactggcatcgttgggtagcgtggtgggctgggcctatgtgatctttgttccactgctctggttcttcggtattcatggcgcgctggcgctgaccgcactggacaacggcattatgacgccgtgggcgctggaaaatatcgcgacctatcagcaatatggttccgtcgaagcggcgctggcagccggtaagaccttccatatctgggccaagccgatgctggactcctttattttccttgggggcagtggtgcgactttaggcctgatcctggctatctttatcgcctctcgccgtgctgattatcgtcaggtggcaaaactggcgctgccgtccggcatcttccagattaacgaaccgattctgtttggtctgccaattatcatgaacccggtgatgtttatcccgtttgtactggtacaaccgattctggcggcaatcaccctcgcagcgtactacatgggcatcattcctccggtgaccaatattgcaccgtggaccatgccaaccggtctgggagccttctttaacaccaacggtagcgtcgccgcattgctggtcgcactcttcaaccttggtatcgcaacgttaatttatctgccctttgttgtggtggctaacaaagcacaaaacgcgattgataaagaagagagcgaagaagatatcgctaacgccctgaaattttaatcgatgccggtacgggtaatcgtgccggtaagaatagagaggaacgatgtatgatggatctcgataacattcccgatacgcaaacggaagctgaagagctggaagaagtggtgatggggcttatcatcaactccggacaagcgcgcagcctggcgtatgcggcactgaaacaggcgaagcagggcgattttgctgcagcaaaagccatgatggatcagtcacggatggcattgaatgaagcgcatctggtacagacgaaactgattgaaggcgatgcgggcgaaggtaagatgaaagtgagtctggtgctggtccacgctcaggatcatttaatgacgtccatgcttgcgcgtgaactgattactgaattaattgagcttcatgaaaaactgaaggcataaggagtcgatgatgcagccagtgattaacgcgccggaaattgccactgcccgagaacagcagttgtttaatggcaaaaacttccatgtgtttatctataacaaaactgagagtatcagcgggctgcatcagcacgactattatgaatttactctggtattaaccgggcgttatttccaggagattaacggtaagcgcgtgttactggaacggggcgattttgtttttattccgttaggttcgcaccatcaaagtttttatgagtttggtgccacgcgtatattgaacgttgggatcagtaaacgcttttttgagcagcattacctgccgttgttgccttattgctttgtcgcttcgcaggtataccggaccaataacgcttttctcacctatgtggaaacagtgatttcttcattgaatttccgcgaaacagggctggaagagtttgttgagatggttactttttatgtcattaaccgtttacgtcattaccgcgaagaacaggtgattgatgatgtaccgcagtggctgaaaagtacggtagaaaagatgcatgataaagagcagtttagtgaatcggcgctggagaatatggtgacgttgtcagccaaatcacaggaatatttgacgcgagcgactcaacgatattatggcaaaacaccaatgcagattattaatgagatccgtattaattttgccaaaaaacaactggaaatgaccaactattccgtgacggatattgcgtttgaggccggttatagtagcccgagtttgtttattaaaacgtttaagaaattaacgtcctttacgcctaagagctatcgtaagaaattgactgaatttaatcagtaagtcgttatacctgacaattcacatatctgtcctgttgctggattatttatgtccgtgggggcagatatgccagatatcagtattctgtactgaagggagaaattatgagccagaaattaaaagtcgtcactattggtggcgggagcagctataccccggagttactggaaggatttattaagcgttatcacgaattgccggtcagcgaattatggctggtggatgtcgaagatggtaaagagaaactggatatcatttttgaactctgccaacggatgattgataacgctggcgtcccgatgaagctttataaaacgctggatcgccgcgaagcattgaaagatgctgatttcgttactacccaactgcgcgtaggccaattaccggcgcgcgaactggatgaacgtattccattaagtcatggttatcttggtcaggaaaccaacggcgcgggcggtctgtttaaaggtctgcgtaccattccggtgatttttgacatcgtaaaagatgtcgaagaactttgtccgaatgcatgggtgattaacttcactaacccggcgggaatggtcactgaagccgtttatcgtcataccggatttaaacgctttatcggcgtgtgtaatattccgatcggcatgaagatgtttattcgcgatgttctgatgctgaaagacagcgatgatttatctatcgatctgttcggcctcaaccatatggtgttcattaaggatgtgctggtaaatggcaagtcgcgctttgccgaattgcttgatggtgtggcgtcagggcagttaaaagcgtcctctgtaaaaaatattttcgatctgccatttagtgagggcttaattcgttcgttaaatctgctgccatgttcttatctgctgtattacttcaagcagaaagagatgctggctattgaaatgggcgaatactacaaaggcggcgcacgagcacaggtagtacagaaagtcgagaaacaactttttgagctgtataaaaatccggagttgaaagttaagccgaaagaactggaacagcgcggtggggcttattactctgatgcagcgtgcgaagtgatcaacgctatctacaacgacaagcaagctgaacattacgttaatatcccgcatcatgggcatattgataatattccggcagactgggcggtagaaatgacctgtaagctggggcgcgatggcgcgacgccacatccgcgcattacgcatttcgatgataaagtgatggggctgattcacaccattaaaggcttcgagattgctgccagcaacgccgcacttagcggagaatttaacgatgtgttactggcgctaaaccttagtccgttggtgcattccgatcgcgatgctgagctgctggcacgcgagatgattctggcgcacgagaaatggctgccaaattttgccgactgcatcgcagagcttaaaaaagcacattaaccgaggctgattatggaacgcttactgattgttaatgccgatgattttggcttaagcaaaggtcagaactacggcattatcgaggcctgtcgcaatgggattgtcacatcaacgacggcgctggtgaatgggcaggctattgaccatgcggtgcagttgagtcgtgatgaaccgagtctggccatagggatgcactttgtccttactatgggcaagccactgacagctatgccggggttaacccgcgatggtgtgctgggaaaatggatctggcagttggcagaagaagatgctttaccgctggaagaaattactcaggagcttgccagtcagtatttgcgtttcattgagctatttggacgcaaacctacgcatcttgatagccatcatcatgtgcatatgttcccgcagattttcccgattgttgccaggtttgcggctgaagaggggattgcgttgcgcatcgaccgtcagccgctatctaacgctggtgatttaccggctaatctgcgcagttctcagggattcagtagcgcgttttatggtgaagagattagcgaggcactgttcctgcaagtgctggatgacgcaagccatcggggtgatcgttcgctggaggtgatgtgtcatccggcgtttatcgataatactatccgtcagagtgcttactgtttcccacggttaacggagctggaagtgctgacatcagcgtcgttgaaatatgcaattgctgagcgtggttatcggttgggtagttatcttaatgtgtaagtaaggtggtaaggtcactccccaggggacgtgaccttatccatatttacgccggaattttgtcaatcttaggaatgcgtgaccacacgcggtgtgctgccatcagcgttaacagttcatccataaaactaccgtcggcgctgtcagcttccacaatcccttcttcaccctggtcagcgaccttgattgttgctttaaacttgcgcgcgtctcccgccagcgcaatcggtttaaggtgtttgtaggcttccatcaggtagtagttggcatcgccgttgtcagcgatatccgcgatattgccgcaagggacaatgaccgcatcgaccgtcagcgaaggtgcaccggcaaaggtagcggctataggcaacaccgtaccgtcatccgcagtcacttcacccattcgggagtagagcagtttggcatgaacgcctttggccttcagggccttgagaatggccagaaggtctgccgatctcacttcatcattaagtaaaatcgctaccacgcgacctttcacatcaccgtcaggaatggcgtacaaacttaaggatggatcctttttcagaccgttgacgtccggaggtggggtgatattcagctggtcgtcagtcagttcgataccgagatttttcgccaccgcctgggccagagtgagatcaatatgcgccagctggtcaacaacgcgctcacgaatatacggacgaacgactttgcttaactcaaaactgaaaccatcgacaatatggcgctgctcgaatggcgtctgacttagccagaacagacgcggatgggaataatattcgccaaacgatggactgcgctcacgaactttatttccttccacgcgttcctgatatgattcaaaaccgccgcgtttcggtcccggcggtgtttcgcgcggccagttatcgttgatcgagttcggttcgtaattcgccgggttagtgtcgatccccatacgatgcatgccatcacgctggaagttgtggtaagggcaggtcggacggttaatcggaatctcatggaaattcggcccaccaagacgactgatttgtgtatcggtataggagaacaaacgtccctgcaacagcggatcgttggtgaagtccagaccaggaacaatatgacctggatggaatgctgcttgttcgttttcggcaaagaagttatccggattgcgattgagcaccattttgccgacacgctgaacgggcaccagttcttccgggatcagtttggttggatcgagaagatcgaagtcgaacttgaattcatcttcttcaggaatcaactggaagcccagttcgtattccggaaaatcgcctgcttcaatggcttcccacaactcgcggcggtggaagtccgggtcacgtccggtgagtttttgtgcttcatcccaaacgagtgaggctttacctgccagtggtttccagtggaaacgtacaaacgttgccttcccttcggcattaatcaggcggaaggtgtgaataccgaagccttccatggtgcggtaactgcgcgggatcccgcgatccgacatcgcccacatcacgttgtgcagagtttcaggttgcagagaaacataatcccagaaagtatcgtgggcgctttgcccttgtggaattgcccagtgcggttctggttttaccgcatgaacaaaatcgggaaatttatgcgcatcctggataaagaagattggcgtgttattgccaacgaggtcaaaaataccctcttcagtatagaacttggtggcaaaaccacggatatcacgcacggtatcggcagagccagcaccaccctgaacggtagagaaacgtacaaatactggggtgattttgttcggatctgagaggaaatccgctttggtgatatcgcttaagcttttatatggctggaaataaccgtgagcggctgatccgcgtgcatgaacaatacgttccgggatgcgctcatggtcaaagtgggtgattttctcgcgcagaataaaatcttccagcagcgttggaccacggctaccggcacgcagtgagttttgatcatcggcgatgcgcacgccctgattagtggtcagcgcataattttcactgcctttgcgtacgtcttccagagaattaagtttttcgttacgcgtatcaggggctttcaggctccctggggcggtaggttgtgcacctggcggtgttggttcagccgctggacgatgagatccgtcctcaggtgccagtgagtccatccccggtttcgcttcgctggaatcgtgtagtggtgactggtgctgatgtgggttcttttcgttatgttgcgacattgaactcgtctccttaatttattactgaaagggccgctgttttggtcaaaaaaccctctaactatagaccatcagccagatcccgcttcggagactattctggaaacggtgttatgaaatacacgcaaagtgggacgtacaggggctaaatcggctaaactacagtttttctgatttttaatatgcgtttagtgaagccagtaatgaagaaaccgctccgccagcaaaaccgccagattattagctatgtcccacgcacggaacccgcgccgccagaacatgcgataaagatggattcgtttcgtgatgtctggatgctgcgtggcaaatatgttgcgttcgtactgatgggagagtcatttctgcgctcaccggcgtttactgtgcctgaatccgcccagcgttgggcaaatcagatccgccaggaaggggaagtgactgagtaaagattacgtacctcccggttttgccgggagttacatgacctgaaattctgtatttcattgctacattcattcaaaccaccagtaacaaaaagctgcctttgacgatctattgctataaataagtgatcttttttctttaattgtttttttattttaaaatggttaagttttgctaatcatgatgagctatttttgatagttcatcctgtggcgtcgcgcttaaacttatattgtaaatgacttagatttaaatgagataataattttgttaacaatatgaggtgggagatgttttctacaaacttaatacagagtaattatggtgatttaaatattaaaactctggcttttgactcttttaaagaaaggcttgagtctaccatggcggcactcactttctttatatcaacgggtcaatgtgactgcgatgaaatagcagaatcaaacttcaatcgtatgattgcctatatgtctaacattaactatgatgcctcaaagccaggagcgccagcacttagttttgatacatatctgcaggacaatgttaaatatagagtaataattaataatctttatggtagtgaaattcggataagaggtataaataaagattttattggaatggatgttacttctgtatttcgcccagaaaaaatgaccaatttgatcaatataaaaaacaggttggttattcactatttaaggactatatactatgaagaaaattatatacatcctgccgggagcatttttgctgcgattcaaaaaaatgagagtctcctaaagtttccttcgataatatcaatgcttaatatcaatcttctttttaatccactaaatcttccgggaatgggaagtggtgtgcttgaagatattatgagtattccagatagttcacttagaaaacgtctcgggtatgaggttttaagcttctcgctacaggcacattcattgagccaggaatgtattgataagttggacatttttttcgctggcgatctgtttaaatatgagtcagtatgcatcgccgcgatggaacatttaaaaagtaaggcaacggcccctatacaaaacgggccgttgccagcataagaattaacggtgtgccagttcggcgtcgtcttcgctatccagaatggctttatcggtttgcttcagccactggctggtcagcgtgccagctgtcatcgagccactaacgtttagcgccgtacggcccatgtcgataagcggttcaacggagattaacagcgccaccagggttactggcaggcccatcgcaggcagcacaatcagtgcggcgaaagttgcaccaccaccgacaccggcaacgcctgcggaactaacggtaacaataccgaccagcgtcgcaatccacatcgggtccagcgggttaatgccaaccgtaggcgcaaccatcaccgccagcattgccggatacaaaccggcgcagccgttctgaccaatggttgcaccgaaagaggcggcgaaactggcgatggattcaggaacgcccagacgacgcgtttgtgcttccacattcagtgggatagacgcagcactggaacggctggtaaaggcaaacgtcagcacaggccataccttacggaagtacttcagcggactcacgccattaatgcccagcagaatgccatgcactgcaaacataatcagcagaccgaggtaggacgcgacaacgaaacttcccagtttgatgatgtcttgcaagttagaacctgcaaccactttggtcattagagccagaacgccgtaaggggtcaactgcatgacaaggcgaaccagtttcatcacccagctttgtagggtatcgatagcggctaagacgcgttcacctttcggcgcatcatccttcagcagtttcaatgcagctacgccgaggaatgcggcaaaaattaccacgctgataattgacgtcggattggctccggtaagatcggcaaacgggtttttcgggataaaggacaagaccagctgcggaacgctcagatcagagactttaccaacatagttactttcaatggcgttcagacgtgcagtttctgcaccaccctgaaccagaccttcagccgtcaaaccaaacaggttggtgaccagcacaccgaccagcgccgcaatcagcgtggtaaacaaaagcgtaccgatggtcagaaaactgattttgcctaactgagatgcgttatgcagacgggcaaccgcgctcagaatagaggcgaagactaacggcataacgatcatttgcagcagttgaacatagccgttaccaacgatgttaaaccactgtacagaatctttaagtacctggctgtcagaaccataaatggtatgcagggcaaggccaaaaaccacacccatcaccagacccaccagcacttttttcgccagactccactgtttatggcgggtctgagccagcgcaaacagcagtacaacgaacaccacgatgttcgcaattaatggaaagttcatccccgttctcctgatcttattatttctatcactgcgtagcactgatgaatcccctaatgattttggtaaaaatcattaagttaaggtggatacacatcttgtcatatgatcaaatggtttcgcgaaaaatcaataatcagacaacaagatgtgcgaactcgatat

SEQ ID NO: 41 - DNA, 67647 bp, Escherichia coli
  source 1..67647: mol_type = genomic DNA
gctcagaaacaaggttgggacaagcacttccaggctaacacagtcagaaatcgaaacgtactctcaacagttcgcttaggcatggaagttttgcggcattctggctacacaataacaagggaagacttactcgtggctgcaaccctactagctcaaaatttattcacacatggttacgctttggggaaattatgaggggatctctcagtgcgcagtgttcttttccgtggagccaatattctggtttctgtactactgattttgctggtcgccgcactgttttataaagactacgcctcgttgttccgcaataacaaagagctggtgaaatccttaagcccctctaacagcattgttgccagctggtcatggtactcccatcagcgactggcaaatctaccgctggtgcgaattggtgaagacgcccaccgcaacccgttaatgcagaacgaaaaacgtaaaaatttgaccatcctgattgtcggcgaaacctcgcgggcggagaacttctccctcaacggctacccgcgtgaaactaacccgcggctggcgaaagataacgtggtctatttccctaataccgcatcttgcggcacggcaacggcagtttcagtaccgtgcatgttctcggatatgccgcgtgagcattacaaagaagagctggcacagcaccaggaaggcgtgctggatatcattcagcgagcgggcatcaacgtgctgtggaatgacaacgatggcggctgtaaaggtgcctgcgaccgcgtgcctcaccagaacgtcaccgcgctgaatctgcctggtcagtgcatcaacggcgaatgctatgacgaagtgctgttccacgggctggaagagtacatcaataacctgcagggtgatggcgtgattgtcttacacaccatcggcagccacggtccgacctattacaaccgctatccgccgcagttcaggaaatttaccccaacctgcgacaccaatgagatccagacctgtagcaaagagcaactggtgaacacttacgacaacacgctggtttacgtcgactatattgttgataaagcgattaatctgctgaaagaacatcaggataaatttaccaccagcctggtttatctttctgaccacggtgaatcgttaggtgaaaatggcatctatctgcacggtctgccttatgccatcgccccggatagccaaaaacaggtgccgatgctgctgtggctgtcggaggattatcaaaaacggtatcaggttgaccagaactgcctgcaaaaacaggcgcaaacgcaacactattcacaagacaatttattctccacgctattgggattaactggcgttgagacgaagtattaccaggctgcggatgatattctgcaaacttgcaggagagtgagtgaatgaaaattctgattgttgaagacgatacgctgttattgcagggattgattctggcggcgcaaactgaaggctacgcgtgcgatggcgtgacaaccgcgcggatggcggaacaaagccttgaggccggtcattacagcctggtggtactggatttagggttacccgacgaagatggactgcattttctcgcccgtatccggcagaaaaaatacaccctgccagtactgatcctcaccgctcgcgatacgctgaccgacaaaatcgctgggctggatgtcggtgccgatgactatctggtgaagccttttgcgctggaagagttacacgcccgtatccgcgccctgctacgacgccataataatcagggcgaaagtgagctgattgttggcaatctgacgctgaatatgggtcgccgtcaggtatggatgggcggtgaagagttgattctgacgcccaaagaatatgctctgctgtcacggttaatgctcaaagcaggcagtccggtgcatcgggaaattctctacaacgacatctataactgggacaatgaaccctcgaccaacaccctggaagtgcatatccacaatctgcgcgacaaagtgggcaaagcccgtatccgcaccgtgcgcggctttggctatatgctggtcgcgaatgaggaaaactaattgaatctgatgcattttctgcgccgaccaatatcgctgcgccaacggctgatattgaccatcggggccattttgttggtgtttgagctgatcagcgtcttctggctatggcatgaaagtaccgagcagattcagctgtttgagcaggcgctacgcgacaatcgcaacaacgatcgccacatcatgcgtgagatccgcgaggcggtcgccagcctgattgtccccggcgtctttatggtcagcctgacgctatttatctgctatcaggcggtgcgccgcatcacccgcccgctggcggagctgcaaaaagagctggaagcgcgcactgccgacaacttaacgcccattgccattcacagcgccaccctcgaaatcgaagcggtggtttcggcgttaaacgatctggtcagtcgcctgaccagcacgctggataacgaaaggttgtttaccgctgacgtcgcgcacgaactgcgaacgccactggctggggtgcgtttgcatctggaactgctggcgaaaacgcatcacattgatgtagcaccgttagtggcacggcttgatcagatgatggagagcgtctcccagctgctgcaactggcgcgtgccggacagtcattttcttccggtaattatcaacatgtaaaactgctggaagatgtcattctcccctcgtatgacgaactcagtaccatgctcgaccagcgacagcaaaccctgctattgccagagagcgccgccgacatcaccgttcagggtgatgcaaccctgctgcggatgttattgcgaaacctggtagaaaacgcccatcgttacagcccgcaaggcagcaacattatgattaagctgcaagaagatggcggagcggtcatggcagttgaagatgaaggaccaggtattgatgagagtaaatgcggggagttgagtaaagcgtttgtacgtatggacagccgttatggcgggattggtctggggttaagtattgtcagccgcattacacagttgcatcacgggcagtttttcctgcaaaaccggcaagagacttccggcacgcgggcctgggtacggctgaagaaagatcagaacgtggcaaaccagatataaagaaagctgctgaccaccagcacgctgaacacggtagttaaactttcataaacacggtttttcattgcactctcctccgttaacctggaggagagtatgcgcgtcagagattaagtgaaccttaagagttcaattggcctgataagacagcgtcacatcaggccatccgtttcagcttattcatcaattcgcggatgttgctgcaccaggcgggtacgtttcgcctgcaaatcggcaatctcgtggtcaatattatcgattttctgctcgatattatcgtaatgctcgacgagaatttccttcgcttcctgtatatctgacgccgccggtgtcgcacctttcaacggacgatttgccgtctctttcatggttacgccggtgattaaaccaatcaccgccactaccatcaggtaataggcaggcatcatcagattctgcgagctttcgaccagccaggccgccagtgttggcgtcagaccggcaaccagcaccgaaatattaaatgccgccgccagcgcgctgtaacggatatgcgtcgggaacatcgctggcaaggtagaagccataacgcccgtaaagcagttaaggatcaccgccagcatcagtaacccggcaaaaatcaggccgatgacgttactgttaatcagaataaacgccgggatcgccaacacaaacagggcaacactaccaagtagcacaaacggacgacggccaaaacggtcactcagcaagcccatcaccggctggacaaacagcataccgatcataatggcgataataatcagcaccccgtggtcttcggagtaatgcaggttatgcgacaaataactcggcatataggtcagcaacatgtagtaagtcacgttggtggcaattaccagaccaatacatgtcaacaggctgcgccagtgtttggtggcaatctctttaaacgagactttcgggccatcctgcaaaccttcgcggtcgccctgttccagtttatcgacatgctgctggaacgccggagtttcttccagcgcatggcgcaggtaaagcccgataatccctaacggcagagcaataaagaacggaatacgccagccccagtcgaggaagttcgcttcgccgacaatggtcgaaattaacaccactacgccagcacccagcacaaacccggcaatagaaccgaagtccagccagctgcccataaagccacgtttacggtcaggtgagtattccgcaacaaatatcgacgccccggtatattcaccgccgaccgagaaaccttgtgccatcttacagatcaacagcagaatcggtgcccaaataccaatcgtgtcgtaggacggtattaagccaatacagaacgtactgatcgacataatcacaatagtgatagcgaggatcttctggcgaccatatttatcgcccaacataccaaagaagagcccgccaagcggtcgaatcagaaagggaacggagaaagtggcaagtgcagcaaccatctgcacgctggggtcagcccccgggaaaaaaactttacctaatgcgtaagcaacaaaaccataaacaccaaaatcaaaccattccattgcattacccagtgatgctgcggtaatggctttacgcagtttaccgtcatcaataatggtgacatcacgaagggtaattggttttacttttttccttttcagcatagctttcctcgcagagttggcccatttccgcaaacgccagaaaaatcagcgcgacggccgcaaaaggggagcgggaattgcaggatgcaatctctgtaacaagcgtagcgggtttgcttacaccctccggttaaggaatgtacaatcaaaccagttgacgcctgaattgggcagttaatgacctttttaccctaccagtgtttaaatttgtgatcaacttcacacatggatttcgtttaggactcattgatgtaactgattatttacgccaaatttacagagaagatttcctcgagcattgtccccgccagacgctgcgctgaacagagtcgtggcatccccagcgcgacagtttgccagcgttgggtcactgaccagcaaacgggttgtttatctgccgtggtccactttcccagccaacttaaaaaatcagcatgatccccgcccgtcggaacggtcgaagaggcaaaccactgatggtaatagtgacgcgtggtcggggccgcattgatactctctgccagatgttgtgtcgctttcacgcgcaaatcacccagcaacaacgccaccgcttgcgggcttcccagacgacaggcatcgccaaatgccccccaacgcaactcttcgagaacgataaaacagcgcccaggcaacgaccaggcgttatacgccccagcacgccagcgggtaaaaatttgctcgctctgatcacctgcctgcaccagtaggcctcgttgcgttaacgccttttccttccagcggcaacgggctgaaaaccactcatacaaggcggcaatttgctgggggagctccgggaaagcagagtgctggcggtgatccattttttgcagcagcgccagatgctgcgcgatctgcgtcagcgccagatgaccgggatccagcatcgacgccagtttttccaccattgtcagtcgcaggctaagcggcgcatttaacatgccgccgttcgtccatgtctgaagctgcacgcgcgcaagaagttcctgcatcagtcgttcacgaaactgctgctgatgggcttgtggaaggcgggcatcatcgccctgcgccagatccactaaaaagcggggataaaccgactccagcacgcgaccggggccgtcaagtaacgtcttggtcaatatcgttctgccgtgaaaagtgtttgaatatcatcgcgtaacagctgggcgtcggtgtaaatccagccgtgagtcatcacagtctgctgcaattgctgctgcatcagcctgaccaccgattcattttgttgacgcagagccagactttcgcgtaaacgcgtctgtaattccgtcaaacatgaagcgaactcagcgaaaaaagtattcatgcctgccgtaacagattcatcgacctgctctgcctgaactttagccatttgttggcaataaagatcgacttctgcgcttaaagctcgttgcaacacactgtaatcaaccgtttctgtcggggatttctcatttccccgtccccagtcgggctgattcaaccagcgcgaaaaagtctcacgcacaacgcctaaacgcgtgctctgctcgtccgttgcatcctggcgcgaaatgacttcactgaacagctggcgagtgttgaagtggggaactacgccgtgaaaaacaggaaaatgaaacccaggacgaaaccctgactcgctcaattccattttgacttgttgctcaatgggccgaataacatcggttaacacccggcaaagggtggattcaagctcggcaaaacgcagcgtaaagtcgcgactgatggtgttctgcgccgtctgtaacagtgtctcacagcaggtacgaatctcgcttaacggctccgaatcatcctgaaacaaggcggctaactgcgcattcagcgcatcttgctgttgacgcagaaagtggttggcggaggtcagggccagctcgatttcatgtttaacctcgccgctcacctgcgcctgattgagttgcaatagctgcaaactttcttcgacctgatggatattttgccgcaattgttcacaagcgacgtttaacccgtgcgcacgaaaatccaggtatccccgcgcctgctgcgcgtaattcaacagtttatgcgcagcagatcgcagagcatacaacgaggcgttagcgtaagcggcatgaagcaacgcctgaattggctgggcgaacagcgaatcttcccacaactgatcggcagcatgacgaatatgttcgaggtccgccagatcgtcatgacgccagcgcctgccgagcgcagcatgggcaaaatcttccacccagcgttgttgctctggcgctggtaacttaccgttgttggctaactcatggcgcgctcgattcgccaggtagccccacatcgacgacaccggaaatatctgctgtggcgtaatacagcctttcatcagcgtcccggaaatcagtgcccgcacctggtcggcgtcgtcactgttacgatcctgttgatcgaacttattgaccagcacatacagcggcaccgattgccccaccgccaaaatcgcctcacggacctcttcatcggagatcgatttcagttgcgtataatccagcaccgccagtaccgccgaggcgcgtgccagctgctggttaagcattttttgcagatgcggttgcccggcttcatttggcccgggggtatccagtaacgtcaactgaccgggataactctccagccccgccagatggacaaactccacttcaatcacgggaatatgctcaatggcggcgtaagcagaaaaaggaaaatcgacgtccagcgccttcgccagtcgcactaaatcattcaaacttttcagacaatgaaaaataggctgggcacccagataatatttttcgaaagcgacgccattttcgatccgctgcataagcgcacgcatatctttatctatttccagcacatcggtcagatgcttaatatcgcaatcacgcaggcgctgttgtaattgttgaattaaacaatcgattggcgcgacatgtgaaaaatgcagtaccggttccttttgcccgggcgtatggcgaataagcgtcggcagcgcagtcattgggcgattacgattaggcagaacctccgtaccaacaatggcattaatggtggttgatttccctgctttcatggtaccgacaattgccagcaccatttccagtcgggaaattttacgcaactcattattcagcatcgcgtgacgttcggcgatattaggctgactccagggtaaagccagttgtggcgcgtcgtctccgggtacagagagaggcattttttccagtaactgcaactgttggcgagaaagctgtaacaggcgttcagcctcctgacttaactcatacagggtctgtgtgtacatagaaaattcttccttaaagcaaattttgttacttttatttagccagattgtttttgagttctgttttcggcttttataattactgcaagaaataattttatatttagtgtgttgttttttatcagaataaataacgtcttctgatacgtttaaaacgtcagaaagataaaaatatcatgtgaataaaaaaaagaacaagtagagcattaacattatcttaaataataaatagaggcaaaaagattattttctttttgcgtttcctttcaaatgaaaacgatcgtcgtctaaaatcagcagtacccccgacaaactcagggattttgtgtataattgcggcctttttcggcaatctgccgttttttggcgcttttgccctgctgacttttgaggaaatccacatgtcattaccacactgcccaaaatgcaactccgaatacacttacgaagataacggcatgtacatctgcccggaatgtgcctacgaatggaacgacgcagaacctgcacaggaaagcgacgagctgatcgttaaagatgctaacggcaatctgctggctgacggcgacagcgttaccatcattaaagatctgaaggtgaaaggtagctcttcgatgctgaaaattggcaccaaagtgaaaaacatccgcctggttgaaggcgaccataacatcgattgcaaaatcgacggttttggtccgatgaaactgaaatctgagtttgtgaaaaagaactgattgtattgtgatcggtaagccggataaggcgctcgcgccgcatccggcaacgatgccgactgcctgatgcgacgctgaccgcgtcttatcaggcttccctctcatctgtataaatttcgaactacacttaactggcttctcttaactgaggtcaccatcatgccgttaagtccctacctctcttttgccggtaactgtgccgacgcaattgcttattatcaacgtacgttgggcgctgaactgctctataaaatcagcttcggcgaaatgccaaaatcagcgcaggacagcgccgagaactgcccttccggaatgcaatttcccgataccgccatcgctcatgccaacgtgcgcattgccggaagcgacatcatgatgagcgatgccatgccgtcaggaaaagccagctactccggctttacgctggtgctcgattcgcaacaggtcgaagaaggaaaacgctggtttgacaatcttgccgctaacggaaaaatcgaaatggcctggcaggaaactttctgggcgcatggctttggcaaagtcaccgataaatttggcgtaccgtggatgattaatgtcgtcaaacaacaaccaacgcaataatccgccgggaggcccgccctcccgcactgtcatcgaattcccgttaactcttcatctgttagtcacttttaattaaccaaatcgtcacaataatccgccacgatggagccacttttttagggaggctgcatcatgcaaacgattatccgtgtcgagaagctcgccaaaaccttcaatcagcatcaggcgctgcatgcggttgatctgaacattcatcacggtgaaatggtggctctgcttgggccgtcgggttccggcaaatccacccttttacgtcacttaagcggtttgattaccggcgataaatccgccggcagccatatcgagctgctgggccgcacagtccagcgcgaaggccgtctggcgcgcgatatccgcaaaagccgcgccaacaccggctacatcttccaacaattcaacctggtgaaccgcctgagcgtactggagaacgtgctgattggcgcgctcggcagcacgccgttctggcgcacctgttttagctggttcaccggcgagcagaaacagcgcgcgttacaggcgctgacccgcgttggcatggtgcattttgcccatcagcgcgtttccaccctctccggcggacagcagcagcgtgtggcgattgcccgcgcgctgatgcagcaggcgaaggtgattctggccgatgaacccatcgcctcgctggacccggaatccgcccgcatcgtgatggacaccctgcgcgacatcaatcagaacgacggcatcaccgtggtcgtcacgctgcatcaggtggattacgccctgcgctactgcgaacgcatcgtcgccctgcgccaggggcacgttttctacgacggcagcagccaacagtttgataacgaacgttttgaccatctctaccgcagcattaatcgcatcgaagagaacgcgaaagctgcctgacatccccatcattgaggaaaacgaatgaacgctaagataattgcctcgctggccttcaccagcatgttcagcctcagcaccctgttaagcccggcacacgccgaagagcaggaaaaggcgctgaatttcggcattatttcaacggaatcacagcaaaaccttaaaccgcaatggacgccattcttacaggatatggagaagaagctgggcgtgaaggtgaacgccttctttgccccagactacgcaggcattatccagggaatgcgcttcaataaagtggatatcgcctggtacggcaacctgtcggcaatggaagcggtggatcgcgccaacggccaggtcttcgcccagacggtcgcggcggatggatcgccaggttactggagcgtgttgatcgtcaacaaagatagtccgatcaacaacctgaacgatctgctggcgaagcggaaagatctcaccttcggcaatggcgatcctaactccacctctggcttcctcgtccccggttactacgtctttgccaaaaacaatatctccgccagcgactttaagcgcaccgtcaacgctgggcatgaaaccaacgcgctggccgtcgccaacaagcaggtggatgttgccaccaacaacaccgaaaacctcgacaagctgaaaacctccgcgccagagaagctgaaagaactgaaggtgatctggaagtcgccgctgatcccaggcgatccgatcgtctggcgcaagaatctctccgaaaccaccaaagacaagatctacgacttctttatgaactacggaaaaacgccggaagagaaagcggtgctggaacgcctgggctgggccccgttccgcgcctccagcgacctgcaactggtgccgattcgccagctcgcactgtttaaagagatgcagggcgtaaaaagcaataaaggactgaatgagcaggacaagctggcgaaaaccaccgagattcaggcgcagctggatgacctggaccgcctgaacaacgcgttaagcgcgatgagttcggtgagtaaagcggtgcagtaatgtgctcgatcggtcccctctcccttgagggagagggagaaaacattaaacggagccaaacatgcaaaccatcaccatcgccccatccaagcgtagctggttctcgcttctgagctgggccgttgttctcgccgtgctggtcgtctcgtggcagggcgcggaaatggccccgcttacgctgattaaagacggcggcaacatggcaaccttcgctgccgacttcttcccgcccgatttcagccagtggcaggattacctcaccgaaatggccgtcacgctgcaaatcgccgtctggggcaccgcgctggcagtggttctctccatccccttcggcctgatgagcgccgaaaacctggtgccgtggtgggtttaccagcccgttcgccgcctgatggacgcctgccgcgccattaacgaaatggtcttcgccatgctgttcgtggtcgccgtcggtctcggaccgttcgctggcgtgctggcgctatttattcacaccaccggcgtgctctcgaaactgctttccgaagcggtggaagcgattgaacccggcccggtggaaggcattcgcgccaccggcgccaacaagctggaagagatcctttacggcgtgctgccacaggtaatgccgctgctgatctcctactccctctatcgcttcgaatccaacgtccgctcggcgaccgtcgtcggcatggtcggtgcaggcgggatcggcgtcaccctgtgggaagcgattcgcggtttccagttccagcaaacctgcgccctgatggtgcttatcatcgtcacggtcagcctgctggatttcctctctcaacggttgcgtaagcactttatctgataagcgaggcattgatatctatgcacttgtctacacatccgaccagctacccaacacgctatcaggagatagccgcaaaacttgagcaggagcttcgtcaacactaccgctgcggcgactatcttcccgccgagcagcaactggcggcgcgctttgaggtgaaccgccacaccctgcgccgcgccatcgaccaactggtggaaaaaggctgggtacagcgccgtcagggcgtcggcgtgctggtgctgatgcgcccgttcgattacccgctcaacgcccaggcgcgttttagccagaacctgctggaccagggtagccatcccaccagcgaaaaactgctgtcggtattgcgccccgcgtccggtcacgtcgctgacgcgctggggattaccgagggcgagaacgttatccatttgcgcaccctgcgtcgcgtcaacggcgtcgcgctctgtttaatcgaccactactttgcggacctcaccctttggccgacgctgcaacgcttcgacagcggttcgctgcacgattttctgcgcgagcaaaccggaattgcgctgcgccgcagccagacgcggatcagcgcccgtcgcgcccaggccaaagagtgccagcgtcttgaaattccgaatatgtcgccgctgctgtgcgtgcgcacccttaaccaccgtgacggtgaaagcagcccggcggagtactccgtcagcctgacgcgcgccgacatgattgaattcactatggagcactgaatgcacgcagataccgcgacccgccagcactggatgtccgtactggcgcacagccaaccggctgaactggcagcccgcctgaaagcactgaacatcaccgccgactatgaggttatccgcgccgccgaaaccggcctggtgcagattcaggcgcggatgggcggcaccggcgaacgcttttttgccggcgacgccacgctcacccgcgccgccgtacgcctgactgacggcacgctcggctacagctgggtgctggggcgcgacaaacagcacgccgaacgctgcgcgctgattgacgcgctgatgcagcaatctcgctattttcaaaacttatcagaaacccttattgccccgctggacgctgaccgtatggcacgcattgccgcacgccaggccgaagtgaacgccagccgggtcgacttctttacgatggttcgcggagacaacgcatgaccctggaaaccgcttttatgcttcccgtgcaggatgcccagcacagttttcgtcgcctgttaaaggccatgagcgagccgggcgtgattgtcgccctgcatcagctcaagcgcggctggcagccgctgaatatcgccaccaccagcgtgctgctgacgctggccgataacgacacgccggtgtggcttgccgcgccattgagtaacgatatcgtcagccagagcctgcgttttcataccaacgcgccgctggtcagccagccggaacaggcgaccttcgcggtgacggatgaggcgatttccagcgaacagcttaacgccctttccaccggcaccgccgttgcgccggaagcgggtgcaacgctgattttacaggtcgccagcctgagcggcgggcgcatgctgcgccttactggcgcgggtattgccgaagaacgaatgatcgctccgcagctgccggagtgcattctgcacgaactcaccgagcgcccgcacccgttcccgctcggcatcgacctgatcctgacctgcggcgagcggctgctggctatcccgcgaaccactcatgtggaggtgtgctgatgtacgttgccgtgaaagggggcgagaaggcgatcgacgccgcccacgccctgcaagagagccgacgccggggcaataccgatttgcctgaactgagcgtcgcccagattgaacagcagcttaatcttgcagtagatcgcgtgatgaccgaaggcggcattgccgaccgcgaactggcggcgctggcgctgaaacaggccagcggcgataacgtcgaagcgattttcctgctacgcgcctaccgcaccacgctggcgaagctggcggtaagcgagccgctcgacaccacggagatgcgtctcgaacggcgtatttcagcggtttataaagatattcccggcggtcagttgcttggcccaacctacgactacacccatcgcctgctcgatttcaccctgctggcaaacggcgaagcgccgacgctgaccaccgccgacagcgaacaacagccgtcgccgcacgttttcagcctgctggcgcgtcaggggctggcgaagtttgaagaagatagcggcgcacagccggatgacatcacccgcacgccgccggtttacccctgctcacgctcctcccgcctgcaacaattaatgcgcggggacgaaggctatttgctggcgctggcctactccacccagcgtggttacgggcgcaatcacccgttcgcgggcgagatccgcagtggttacatcgacgtgtcgattgtgccggaagagctgggatttgcggtaaacgtcggcgaactactgatgaccgagtgtgaaatggtcaacggttttatcgacccgccggatgagccgccgcacttcacgcgcggctacgggctggtattcggcatgagcgagcgcaaagcgatggcaatggcgctggtcgatcgtgcgttgcaggctccggaatacggcgagcacgcgacaggcccggcgcaggatgaagagtttgtgctggcacatgccgacaacgtcgaagccgcaggctttgtctcgcacctcaaactcccccactacgtcgatttccaggccgaactggagctactcaaacgtctgcaacaggagaagaaccatggctaatctgagcggctacaactttgcctacctcgacgagcagaccaaacgcatgatccgccgcgctatcttaaaagcggtggcgatccccggttatcaggtgccgtttggcgggcgcgagatgccgatgccatacggctggggaaccggcggcatacagctcaccgccagcgtgattggcgaaagcgacgtgctgaaggtgattgaccagggtgcggatgacaccaccaacgccgtgtcgattcgcaacttctttaagcgcgtgaccggggtaaacaccactgaacgtacggacgatgcgacgcttatccagacgcgtcaccgcatccccgaaacgccgctgaccgaagatcagatcattatcttccaggtgccaatcccggaaccgctgcgctttatcgagccgcgcgaaacggaaacccgcaccatgcacgcgctggaagagtacggcgtgatgcaggtgaaactgtatgaagatatcgcccgcttcggtcatatcgccactacctacgcctatccggtgaaggtgaacgggcgctacgtaatggacccgtcgccgatcccgaaattcgataacccaaaaatggacatgatgcccgccctgcaactgttcggcgcggggcgcgagaagcgcatctatgcggtgccgccgtttacccgcgtggaaagtctcgatttcgacgatcacccgttcaccgttcagcagtgggatgagccatgcgccatctgcggatcgacccacagctatcttgatgaagtggtgctggatgacgccggaaaccgcatgtttgtctgctccgataccgattattgccgccaacagagcgaggcaaaaaaccaatgaatcaaccgttactttcggtcaataacctgacccacctttacgcgccgggcaaaggctttagcgatgtctcttttgatttatggccgggggaagtgctgggcattgtcggggagtccggctccgggaagaccacgctgctgaaatcaatctccgcgcgcctgacgccgcagcagggggagattcactatgagagccgttcgctgtacgcaatgagcgaggccgaccgccgtcgcctgctgcgcaccgaatggggcgtggtgcatcagcatccgctcgacggcctgcgccgccaggtctcggcaggcggcaatatcggcgagcggctgatggcgaccggggcgcgtcattacggcgacattcgcgccaccgcgcagaagtggctggaagaggtggaaattcccgccaaccggatcgacgacctgccgaccaccttttccggcggcatgcagcaacgtttgcagatcgcccgcaacctggtgacgcatccgaagctggtgtttatggacgagccgaccggcggactggatgtgtcggtacaggcacgcctgctcgacctgctgcgcggcctggtggtggagctgaacctcgcggtagtgattgtcacccacgatttaggcgtcgcccgcctgctggcggaccgtttgctggtgatgaagcaggggcaagtggtggagagtgggttaaccgaccgcgtgctcgacgacccgcaccatccgtatacacaactgctggtgtcatcggttttgcagaattgaatgcaacaccgtgcgcgctgatcccctcaccccggccctctcccggagggagagggagaaaaccggcgcaatattcaacaccgcgcacaatcggtcccctcgccccttcggggagagggttagggtgaggggcaatgcgcgcaccgctccccaatatgcgaaccacgaggcgaaaaatgattaacgtacaaaacgtcagtaaaaccttcatcctgcaccagcaaaacggcgtgcgcctgcccgtcttacaacgcgcctcgctcaccgtcaacgcaggtgaatgcgtggtgctccacggccattccggcagcggcaaatcaactctgctacgctcgctgtacgccaactatctgcccgacgaagggcaaatccagatcaaacacggtgacgaatgggtagacctggtcaccgcgccagcgcgcaaagtggtggagatccgcaaaactaccatcggctgggtgagccagtttctgcgcgtcatcccgcgtatctcagcactggaagtggtgatgcagccgctgctcgatacaggcgttccgcgtgaagcctgcgccgctaaagccgcgcgtcttctcacccgcctgaacgtgccggaacgcctgtggcacctggcaccatcgaccttctccggcggcgaacagcagcgcgtcaacatcgcccgcggctttatcgtcgactaccccattctgctgctcgacgaacctaccgcctcgctggacgccaaaaacagcgccgcggtggtggaactgattcacgaagccaaagcccgtggcgcagccatcgtcggcatcttccatgacgaagctgtacgtaatgacgtcgccgaccgcctgcacccaatgggagcctcttcatgattatcaataacgttaagctggtgctggaaaacgaggtggtgcacggttcgctggaggtgcaggatggcgaaatccgcgcctttgccgaaagccagagccgcctgccagaagcgatggacggcgaaggtggctggctactacccggcctgattgagctgcataccgacaacctcgataaattcttcaccccgcgcccgaaagtcgactggcccgcccattcggcgatgagcagccacgacgcgctgatggtggcaagcggcatcaccaccgtactggacgccgtggcgattggtgatgtgcgcgacggcggcgatcggctggagaatctggagaagatgatcaacgccatcgaagagacgcaaaaacgcggcgtcaaccgcgccgagcaccgcctgcacctgcgctgcgaactgccgcatcacaccacactgccgctgtttgaaaaactggttcagcgcgaaccggtgacgctggtgtcgctgatggaccactcaccgggccagcgccagttcgctaaccgcgagaagtatcgcgaatattatcagggcaaatactccctcaccgatgcgcagatgcagcagtacgaagaagagcaattggcgctcgccgcacgctggtcgcagccgaatcgcgaatccatcgccgccctgtgccacgcgcgacaaattgcgctcgccagccacgatgacgccacgcacgcccacgttgccgaatcccaccaacttggcagcgtgatcgccgaatttcccaccacgttcgaagcggcggaagcctcgcgtaagcatggcatgaacgtgctgatgggtgcgccaaatatcgtgcgtggcggctcgcactccggcaatgtggcggccagtgaactggcgcagcttggtctgctggatatcctctcttccgactactaccccgccagcctgctggatgcggcgttccgcgtcgccgatgacgagagcaaccgctttacgctaccgcaggcggtgaggctggtgaccaaaaatccggcgcaggcgctgaatcttcaggatcgcggggtgattggcgagggtaaacgcgctgacctggtgctggcgcatcgccagggcaatcacattcatatcgaccacgtctggcgtcagggtaaaagggtgttctgatgatgggaaaactgatttggttaatggggccgtccggctccgggaaagacagcctgctggcggaactccgcctgcgggaacaaacgcagttactggtggcgcatcgctacatcacgcgcgacgccagcgccggaagtgaaaaccatatcgccctgagtgagcgggagttttttacccgcgcggggcaaaacctgctggccttaagctggcacgctaacggtctgtattatggcgtcggcatcgagattgacctctggctgcacgctggattcgacgtagtcgtcaacggttcacgcgcgcatttgccgcaggcacgggcgcgctatcaatcggcgctgctgcccgtctgtttacaggtttcgccggagatcctgcgccagcgcctggaaaaccgtggccgtgaaaacgccagtgaaattaacgcccgcctggcgcgcgccgcccgctatactccacaggattgccatacgctcaacaatgacggcagcctgcgccagtcggtcgacacgctgctgacgctgatccatcagaaggagaaacaccatgcctgcttgtgagcttcgcccggccacgcagtacgataccgacgcggtttacgcgctgatttgtgagctaaaacaggcggagtttgaccaccatgcgtttcgcgtgggctttaacgccaacctgcgcgacccaaacatgcgctaccatctggcgctgctggatggcgaagttgtcggcatgatcggcctgcatttgcagtttcatctgcatcatgtcaactggatcggcgaaattcaggaactggtggtgatgccgcaggcgcgcggtctgaacgtcggcagtaaattactggcatgggcagaagaagaagcccgccaggccggggccgaaatgaccgagctttccaccaacgtgaagcgccacgacgcacaccgtttttacctgcgtgaaggctacgagcagagccacttccgcttcaccaaggcgctgtaacatgagcctgaccctcacgctcaccggcactggcggcgcacagggcgttccggcatggggctgcgagtgcgcggcctgcgccagagcgcggcgctcgccgcagtatcgccgccagccatgcagcggcgtagtgaagtttaacgacgcgatcaccctgatcgacgccgggcggcacgatctcaccgatcgctggtcgcctggatcgttccagcagtttttgctgacgcactaccatatggatcacgtccaggggctatttccgctacgctggggcgtgggcgatgtgatcccggtctacggcccgccggatgaacagggctgcgacgatctgtttaaacatccgggcctgcttgatttcagccacacagcggtaccgtttgtggtgtttgatttgcaggggttgcaggtcacgccgctgccgcttaaccactcaaaactgaccttcggttatctgctggaaacggcacatagccgggtggcgtggctgtctgacaccgctggcctgccggaaaaaacgctgaaatttttactcaataatcatccgcaggtgatggtgattgattgcagtcacccgccgcgcgcggatgcaccgcgtaatcactgtgatttaaataccgtgcttgcgctgaatcaggttatccgctcgccacaggtgattctgacccatatcagccaccagtttgatgcgtggctgatggaaaacgcactaccgtcagggtttgaggtggggtttgatgggatggagattggggtggcgtgatgagagggaatgtgcgcgctggccccctcaccctaaccctctccccagaggggcgaggggaccgattgtgctcgatattgaatattgcgctcgttttctccctctccccattggggtgaggggcgatgcctgctccatacccaacctcatcgcccatactcatcttccattctccgctcttcatcctccagttgccgacgctcctgatcaagctggcgctggcgatcgtccagctgcctgcggcgatcttcaaactggcggcggcggtcgtcatattgtctgcgccgatcgtcgctcacttcacgctgccagccgtcgtcgcgcgaatcttcatagtctcgcccacggtcagggttataagcgtcattaatcgcctgctgaatattaccaatagtatcgtcgataatatcagcctgggccggaacggtggacagcgtgagcagggtgaataaaagaaatagcggaaagcgtttcattagccaacctcaaaaagaaactctatccacattagtcattactcatccatgcaagtagtggatgaatctcaatttctccgctgctctattgccgtaatcgcctccacgcgttgttgatgacgaccgccttcgtactgtgcgcccagccacgcatccacaatcatttttgccagttcgaggccaaccactcgtgaaccaaaagccagtgcaacttcactggcataatgcggataatcagtgcgctctgacgacctggtgtctttatcaatcacctcactcattgaccatgaataaaaggctggcacagcaacacagaatcctgcggtgccagcgacatgaccgcccattgctccggtacgttttttaaaaagaaacaccggttgcattgataaattgtgctcagtatttgccgaagtacaatatatataataaatatataaaacacctcatattatttacagagataataaattcgcgtaattttcccccttcagcacaaatgcctaataaaatggatcgttccgctcacacttccacttattaaagtcgcaaattcccaattatgataaccccagctttaaatgacgtattttgcatggattacatatttacgacataaatgataaatggagatttatatgaataactctcggttattccgtttgagcagaattgttattgcgttaactgccgccagcggcatgatggtaaataccgcttacgcaacagatgaagcgaaagccgccactcaatatacccaacaggttaatcagaattacgccaaatcattaccgtttagcgatcgtcaggattttgacgacgctcagcgtggatttatcgctccgctgctggatgaaggtattctgcgcgatgctaatggcaaaccatattatcgcggggaagattataaatttgatatcaatgcgcccgcgcccgaaaccgttaaccctagcctgtggcgtcagtcgcagttaaacggtatttccggcctgtttaaagtcaccgacagaatgtaccaggttcgcggtcaggatatctccaacatcacctttatcgaaggtgataccgggattattgtcatcgacccgctggtgacgccaccgagcgcaaaagccgcccttgacctttacttccaaaatcgcccgcaaaaaccgattgttgcggttatttatacccacagccataccgaccactatggcggcgtgaaaggcattatctctgaagccgatgtgaaatccggtaaagtgcaggttatcgcccctgctggctttatggacgaagccatcagcgaaaacgtactggcgggtaatattatgagccgccgtgcactttactcctacggcctgctgctggcgcataaccctcagggtaacatcggcaatggtcttggcgtaacgctggcatcgggctacccgagcatcatcgcaccgaacaaaaccatcaccaaaaccggtgagaagatgattatcgacggcctggagtttgacttcctgatgaccccaggtagcgaagcaccagccgaaatgcacttctatattccggccctgaaagcgctgtgtaccgccgagaacgccacgcataccctgcacaacttctacactctgcgcggcgcgaaaacccgcgacaccagcaagtggaccgagtatctgaacgaaacgctggatatgtggggtaacgacgcggaagtcctgtttatgccgcacacctggccggtctggggcaataagcatatcaatgattatattggtaaatatcgcgatactatcaagtacattcacgaccagaccctgcacctggcgaaccagggctacaccatgaatgaaatcggcgacatgattaaactgccgcctgcacttgccaataactgggccagccgtggctattacggttctgtcagccacaacgcccgcgcggtgtataacttctatcttggctattacgacggtaacccggctaacctgcatccgtatggtcaggtggagatgggtaaacgttacgtgcaggcgctgggcggttctgcccgtgtcatcaacctggcgcaagaagcgaacaagcaaggtgattaccgctggtcggcagaactgctgaaacaggtgattgccgccaacccgggtgaccaggtcgcgaagaatctgcaagcgaataactttgaacagctgggctatcaggccgagtccgccacctggcgcggtttctacctgaccggcgcgaaagagctgcgcgaaggggtgcataagttcagccacggcaccaccggttccccggacaccattcgcgggatgtcggtcgaaatgctgttcgactttatgtccgttcgcctcgatagcgcgaaagccgcgggtaaaaatatcagcctgaacttcaatatgagcaatggcgataacctcaacctgacgctgaacgatagcgtgcttaactaccgtaaaacactgcaatcccaagctgacgcctctttctacatcagccgtgaagatctgcacgccgtgctgaccgggcaagccaaaatggcggatctggtaaaagcgaagaaagccaaaattattggcaatggcgcgaaactggaagaaattatcgcctgtctggataatttcgatttgtgggtgaatatcgtaaccccaaattaatgtcactcgcttttgggggcgctgaagcccccaaaagcatttattttaaaaatatatacagccaattaataaataaaatatataagttatgaatgcggtggctgaataaagctatttttattcatcaagaaaatagccatactgacgccttcaatggatgttgatattcactacagatattgttcgcagcagacaggatgtatttaatatgccaacagttctctctcgcatggcgatgcaactcaaaaaaacagcctggataattcccgtcttcatggtttcgggatgctcattatctccggcaatcccggtgatcggcgcttattatcccagctggtttttctgcgccattgccagccttattttgacgctcatcacgaggcgagttattcagcgggcaaatatcaatctggcatttgtcggaattatttataccgccctttttgctctctacgccatgctgttctggctggcatttttctaatctatttgagacgcgctcatggaacgtacgccgaaaaaagctcctcgcagtaaattccctgctctgttagtggttgcgttggcgctggttgcccttgttttcgttatctggcgcgtagacagtgcgccatcaactaatgacgcttacgcgtcagcagataccattgatgtggtgccggaagtcagcggtcgcattgtagaactggcggtcaccgacaaccaggcagtcaaacagggcgatttgctgttccgcattgacccgcgcccgtacgaagccaatctggcgaaagctgaagcctccctcgcggcgctggataagcaaattatgctcacccagcgtagcgttgacgcgcaacagtttggtgccgactcggttaacgccacggtagaaaaagcccgtgccgccgcgaaacaggccacagatacattacgccgcaccgagccattactgaaagaaggttttgtctcagcggaagacgttgaccgtgcgaggaccgcgcagcgcgctgcagaagccgatcttaatgctgtattgttgcaggcgcagtcagccgccagcgccgtcagcggcgtggatgcattagttgcccagcgtgcggcggtcgaagcggatattgccctgaccaaactgcatctggaaatggcgaccgttcgcgcgccgtttgatggccgggtcatttccctcaaaacctccgtcgggcagtttgcatctacgatgcgccctatttttaccctaatcgatactcgtcactggtacgtgatcgccaacttccgcgaaaccgatctgaaaaatattcgctcaggtacacccgcaacgattcgcctgatgagtgacagcggcaaaaccttcgagggtaaagtggattcgattggctacggcgtgctaccggatgacggcggcctggtgctgggcggcctgccgaaagtttctcgctctattaactgggtccgcgttgcccagcgttttccggtcaaaatcatggtcgataaacctgacccggaaatgttccgcatcggcgcttcggcagtcgctaatcttgagccgcaataatgagcgcgctcaactccctgccattaccggtggtcaggctgctggcgttctttcatgaagagttaagcgagcggcgacccggccgcgtgccgcagatcgtgcaactctgggtaggctgcctgctggtgattctgatctcgatgacttttgagatcccttttgtggcgttatcgctggcagtgctgttttacggtattcagtcgaacgcgttttacaccaaatttgtcgcgatcttgtttgtggttgccacggtgctggagatcggcagcctgtttttgatctacaaatggtcatacggcgaaccgttgatccgattgatcatcgccgggccgatcctgatgggctgtatgtttttgatgcgcacccatcggctgggactggtctttttcgctgtcgccattgtcgccatttacgggcaaaccttccccgccatgctcgactatccggaagtggtcgtgcgcttaacgctgtggtgtatcgttgttggcctctatccaaccttgctgatgacgttaatcggcgtgctgtggtttcccagtcgtgccattacgcaaatgcatcaagcgcttaatgatcggcttgatgatgccattagtcacctgacggacagcctcgcaccgctacccgaaacgcggattgaaagagaggcgctggcgctgcaaaaactgaatgtcttttgtctcgcggacgatgccaactggcgaactcaaagcgcatggtggcaaagctgcgtggcaacggtaacctacatttactcgacgctgaatcgctacgatcccacctcttttgctgattctcaggcaattattgaatttcggcaaaaattagcctcagaaatcaataagctgcagcatgccgttgctgaaggtcagtgctggcaaagcgactggcggatcactgaaagtgaagcgatggcggcacgggaatgtaacctggagaatatctgccagacgttgttacaactgggtcagatggacccgaatacgccgccaacgcccgccgccaaaccgccatcaatggtcgccgatgcttttaccaatccagactatatgcgctacgcggtaaaaacactgctcgcctgtttgatctgttacaccttctacagcggcgtggactgggaaggcattcacacctgtatgctgacatgcgtgatcgtcgctaacccaaatgtcggttcgtcgtaccagaagatggtgctgcgttttggcggggccttttgcggcgcgattctggcgctgttattcacgctactggtcatgccctggctggacaatattgtcgaattgctgtttgtgctggcaccgattttcctgttgggcgcatggattgccaccagctctgaacgctcttcttatatcggcacacagatggtggtcaccttcgcgctcgccacgctcgaaaacgtttttggcccggtgtacgacctggtggaaattcgcgatcgcgccatgggtatcatcattggtaccgtggtgtccgcggtgatttacacctttgtctggcctgaaagtgaagcgcgcacactgccgcaaaaactggctggcacgctgggtatgttaagtaaagtaatgcggatcccacgccagcaggaagtcacggctctgcgcacttatctgcaaattcgtatcggtctgcatgcggcgtttaatgcctgtgaagagatgtgccaacgcgtggcgctggagcgtcaactggacagcgaagaacgcgccttactgattgaacgttcgcaaacggttattcgtcagggccgcgatattcttcacgcctgggatgccacctggaactcggcgcaggcgctggataacgcactacagccggacagagcagctcagtttgccgacgccctggagaaatacgctgccggtctggcaaccgcactcagccgttctcctcaaataacgcttgaagagacacccgcctcgcaggccatcctgcccaccttattaaaacaggagcaacacgtctgccagcttttcgcccgcttgccagactggacagccccggcattaacgcccgccacggaacaggcacaaggagccacgcaatgatcaatcgtcaactttcacgtctgctgttgtgcagcattctcggcagcacgacgctgatttccggctgtgccctggtacgtaaggattctgcacctcatcaacagctcaaaccggaacaaatcaaactggccgacgatattcatcttgccagctccggctggccgcaggcgcagtggtggaaacaactcaatgacccgcagctggatgcgctgatccaacggacgctaagtggttcacacaccctcgccgaagcgaaactgcgggaagaaaaagcgcagtcccaggccgatttgttagatgccggttcacaattacaggtcgcagcgttagggatgctcaaccgccaacgcgtctcggcgaacggctttttaagcccttatgcgatggatgcgcccgcactgggtatggacgggccgtactatacggaagccacagtaggtttgtttgccggactggatcttgatttgtggggtgtgcatcgctcagcggttgccgccgccattggcgcgcataatgccgcgctggcagaaaccgcagcagtagagctatcgctgaccacgggcgtagcgcagctttattacagtatgcaggccagctatcagatgctcgatctgttagaacaaactcgcgatgtgattgattacgcggtgaaagcgcaccagagtaaagtggcgcacggtctggaagcacaagtgcctttccacggcgcgcgggcacagattctggcggtcgataaacaaattgctgccgtcaaagggcaaatcaccgaaacgcgagaatctctgcgtgcattgattggcgcgggggccagcgatatgccggagatcaaaccggtggcattaccacgagtccagaccggcattccggcgacactctcttatgagttgctcgccagacgcccggatctgcaagccatgcgctggtatgttcaggcgtcattagatcaggtggattccgcgcgggcgctgttctacccgagctttgatatcaaagcgtttttcggccttgatgccatccacctggataccttattcaaaaaaaccagtcgccagttcaacttcatcccgggtctgaaattgccgctgtttgacggtggacggttgaatgccaatctcgaaggcacgcgcgccgccagcaacatgatgattgaacgttacaaccagtcagtactgaacgcggtgcgtgacgttgccgtcaacggcacgcgtctgcaaacgctcaacgacgagcgagaaatgcaggctgaacgcgtggaagcaacgcgcttcacccagcgcgctgccgaggccgcctatcagcgcggcttaaccagccgcttacaggccactgaagcccggttgccagtacttgccgaagagatgtcattactgatgctggacagccgccgggtgatccaaagcattcagttgatgaaatcgctgggcggcgggtatcaggcggctcccgtcgtcgagaaaaaataaaatgtctgccgcgtgatggctgtcacgcggtatttcgtttcgtcacgtcaaaactgacgacagcctgtttttcgtcagagttttgaataaatagtgcccgtaatatcagggaatgaccccaaataaaatgtggcataaaagatgcatactgtagtcgagagcgcgtatgcgtgatttgattaactggagcgagaccgatgaaaaaagtcgtcacggtttgcccctattgcgcatcaggttgcaaaatcaacctggtcgtcgataacggcaaaatcgtccgggcggaggcagcgcaggggaaaaccaaccagggtaccctgtgtctgaagggttattatggctgggatttcattaacgatacccagatcctgaccccgcgcctgaaaacccccatgatccgtcgccagcgtggcggcaaactcgaacctgtttcctgggatgaggcactgaattacgttgccgagcgcctgagcgccatcaaagagaagtacggtccggatgccatccagacgaccggctcctcgcgtggtacgggtaacgaaaccaactatgtaatgcaaaaatttgcgcgcgccgttattggtaccaataacgttgactgctgcgctcgtgtctgacacggcccatcggttgcaggtctgcaccaatcggtcggtaatggcgcaatgagcaatgctattaacgaaattgataataccgatttagtgttcgttttcgggtacaacccggcggattcccacccaatcgtggcgaatcacgtaattaacgctaaacgtaacggggcgaaaattatcgtctgcgatccgcgcaaaattgaaaccgcgcgcattgctgacatgcacattgcactgaaaaacggctcgaacatcgcgctgttgaatgcgatgggccatgtcattattgaagaaaatctgtacgacaaagcgttcgtcgcttcccgtacagaaggctttgaagagtatcgtaaaatcgttgaaggctacacgccggagtcggttgaagatatcaccggcgtcagcgccagtgagattcgtcaggcggcacggatgtatgcccaggcgaaaagcgccgccatcctgtggggcatgggtgtaacccagttctaccagggcgtggaaaccgtgcgttctctgaccagcctcgcgatgctgaccggtaacctcggtaagccgcatgcgggtgtaaacccggttcgtggtcagaacaacgtgcagggtgcctgcgatatgggcgcgctgccggatacgtatccgggataccagtacgtgaaagatccggctaaccgcgagaaattcgccaaagcctggggcgtggaaagcctgcctgctcataccggttatcgcatcagcgagctgccgcaccgcgcagcgcatggcgaagtgcgtgccgcgtacattatgggcgaagatccgctgcaaactgacgcggagctgtcggcagtacgtaaagcctttgaagatctggaactggttatcgttcaggacatctttatgaccaaaaccgcgtcggcggcggatgtcattttgccgtcaacgtcgtggggcgagcatgaaggcgtgtttactgcggctgaccgtggcttccagcgtttcttcaaagcagttgaaccgaaatgggatctgaaaacggactggcaaatcatcagtgaaatcgccacccgtatgggttatccgatgcactacaacaacacccaggagatctgggatgagttgcgtcatctgtgcccggatttctacggtgcgacttacgagaaaatgggcgaactgggcttcattcagtggccttgccgcgatacttcagatgccgatcaggggacttcttatctgtttaaagagaagtttgataccccgaacggtctggcacagttcttcacctgcgactgggtagcgccaatcgacaaactcaccgacgagtacccgatggtactgtcaacggtgcgtgaagttggtcactactcttgccgttcgatgaccggtaactgtgcggcactggcggcgctggctgatgaacctggctacgcacaaatcaataccgaagacgccaaacgtctgggtattgaagatgaggcattggtttgggtgcactcgcgtaaaggcaaaattatcacccgtgcgcaggtcagcgatcgtccgaacaaaggggcgatttacatgacctaccagtggtggattggtgcctgtaacgagctggttaccgaaaacttaagcccgattacgaaaacgccggaatacaaatactgcgccgtgcgcgtcgagccgatcgccgatcagcgcgccgccgagcagtacgtgattgacgagtacaacaagttgaaaactcgcctgcgcgaagcggcactggcgtaatacagtcctttctacagcctcctttcggaggctgtttttttatccattcgaactctttatactggttactccctacccaatcgtattatcaaaatgaaaaaaattatcgcattgatgttgtttttgacattctttgcccacgcgaacgactccgagcctggcagccagtatttaaaggcagcagaggccggggaccgacgcgcacaatattttcttgccgacagctggtttagctccggcgatttgagcaaagccgaatattgggcacagaaagccgccgacagcggtgatgctgatgcctgcgcgctgctggcgcagatcaaaatcaccaatccggtcagtctggactatccacaagcaaaagttcttgcagagaaagcggcgcaagcgggcagtaaagaaggtgaagtaacgctggcgcatattctggtaaatactcaagcgggtaaaccggattatccaaaggcgatttcgctgttagaaaacgcctcggaagatctggagaatgactccgccgtcgatgcccaaatgctgcttggtttgatttacgccaacggcgtgggcattaaggccgacgatgacaaggcaacctggtatttcaaacgcagctctgcaatttcccgaaccggttattccgagtactgggcgggaatgatgttcttaaacggtgaggaaggttttatcgagaagaacaaacaaaaggcgctgcactggttgaacctgagctgtatggaagggtttgataccgggtgtgaagagtttgaaaaattaaccaacggttaaggtaggcctgataagacgcaccagcgtcgcatcaggcatccacacattgccgggtggataaccccggcaatcttcaattattgatccgcagttttatcaaatttgcccagcatttcacgctcataagccagcgcctttttgcggtcaaatttgtgttcccacttggcaatcaccagcaccgccagcgcattacccaccacgttcagcgcagtacgcgccatgtcgaggatacggtcaacaccagcaataaacgccaggccttccagcggaatacctacgctacccagcgttgccagcagcaccacaaacgacacgcccggcacgccagcaatccctttcgaggtcaccatcagcgtcagcaccagaatgatttcctgccagatggacaggtcaatgccatacagctgagcgatgaaaatagcggcaatactttgatacagcgtcgaaccatcaaggttaaaagagtaaccggtcggcaccacgaagctggtgatcgacgccggtgctccgtaggcttccatcttctcaataattcgcggcagtacgctttcagagctggcagtggagtacgccagaatcagctcatctttcagaatacgaatcaggatccagacgcttaacccgcacaggcgcgccacaattcccagcactaccagcgcgaagaacagaatggcgaaatgcaccagcagcaccagtttcgccagtggccacagagaagagaaaccaaagttagccaccgtcaccgcaatcagcgcaaacacacccaccggtgcataacgcatcaccatgtgagtcactttaaacatggtttcagagatggagcggaacacggtcaccagcggttcacgatgcgtcgcgggcagggaggaaagccccagaccaaacagcaccgagaagaagatgatcggcagcatttcgcctttcgccatcgacgccacaatgttcgtcggcaccagcgacaaaatcgtgcccataatgccgtgggaactgctttgtaccgcttccgtagtgctctgatatttcgagatatcgacggtcgccagctgcgacatatccaccccggcaccgggctggaagacgttcgccagagtgatccccaaaatgatggcgacggtggtgatcacctcgaagtaaataatggttttcgcgccaatacgcccgagctgtttggcatcaccaacacccgcgatacccaccaccagcgtggagatcacaatcggcacaacaatcattttgatcagatggatgaagatatcacccgccggagagagcaaattgacgaccagccagtcgcggctgtcgctatggtagtgcaggtagcttcccaggagaatgcccagcaccatagcaaacagaatctgccaggccaggctgaattttatacttttcatcagaataacttcctcaatggagcgccgttccccgttcagaaacgcgagaacgtgacatactgccagggcatgaattgtgttgcgttggtttgtagatttttttaacgcttatgatcagtatcatttgcgcggtatgttgcgcaaccctttaacaacagagcttttcgctgcattaatgcataataacgcgagtttatggcaggattaatgaataaccatttgttatggaaagatttttatttgtttaatctgcaataatactgattggtgattatttttggcatatgttcattcgattattttttatacaactcaataacataatcttcatcaccagatgattaatctgatctccgctgcaacaatttcgccatattaatcgactcgaccagctgtgtccggttgatccggggtgagttgagatccatcactttttgccatagttcgatggcttgcgcgtaattcgcctgcataaacgcatcggaagccagcagcatcagagcggtgatttcgttagagtccagcgcgagggctttatcgatcattgcgcgagtctgggcggtcatatgctggctggcctggtaataaagcaccgtcgccagcgccgcatacagttcagcgttctcaccacgtagttgcaacgcctgacggtacgccagcagcgaattgctgtaatcgttttgccacagatagtactcgcccagtaacgcccactgttcgctgttttgtggattagcgcggattttatcctgcaatgcctgaagctgcgcttccggggtttgctggctggcaaactgatgcagcggatcgcgctgacgctgatattccgcacgtaccgcctgccattttgggcttaacagataactgccgacacagagaaataccatcaatatcgtgagtgttgtcagcattttcaccggtactttgggctgtttcatcgcttcgccctcactcgccagaggatcagtgccatcagcagtaacaacaccactggcagcgcccataacaccagcgtctgacccgttaacggtgggttatagcgaacaaaatctccgtagcgttcggtcatccagccaatgatttcgacttcgttcttcccctccgccaccatgctgtaaacctgatggcgcatactgactgccaccggcgcgttggattccagtaagttttgattctggcactgcggacaacgtaactggctggcaatatttaacgcctgttgctgttgttgtggattggcgaattgccaggtgtctacgacctgagcgcgcgcaaaacaggtaaataacagcagtagcgtgagaagccctttattcatcgcgcttcttcccccgccatccgcttaacaatgcgcccgcaatcatcaacaatcctcccccccagatccagcgcacaccgctttgtacatacaaacgaaaagcgtaacgatccgctccggttttttcacccatgaccgcataccagtcatggatgccgttccagcgaattgacggttccatcatttgctgacgacgtgcttcgtaaaaacgccgctccggcatcagttcaccaatgcgttgctgatggtcaaacagtgccactatcgctttttcgctggtgtaattgcctttggcttgcagatcgaggcgctcaaaacggaaggtgtatcctgccagcgtcacctgctgacccggctgtaaattcaggctgacctcctgacggctgacgctggaaaccacgatccccgcggcaaataacagcacgcccgcatgagctaccagcgccggaagctgcacgcgtttgccagagacaaacgtcgccagcacaatcaccaccagcatcaacaggccaaacggtaacgtcgcgcggttaaaatacggcgcgccaacggagaggcgtccccagcccagcagaccgtaaatcatcggataaagcgttcccaccagcacgatcagtagcactgcgcaaaacagcaacagcgtagcgaggattaacatttcccgcgataaccccgaaaaacgcaccaccgcaccaccgtcccgcgctcgccagccatacagagccagagacgcaaggctaatcagtgcaaacaggctgaacaacggcacggcgcggacgttatccagtgcgaacgcatgaaccgaaaccagaatgccagaacggacaattaaggtacccagtagcgacagcatcagagttactatcgccagcaacagcgaccagtggcggaaaatctcccgctggcgtgtcagggacaaactgtgcagcagcgcagtggcagaaagccagggtaataaagaggcgttttccaccggatcccagaaccaccagccgccccagcccagttcgcaataggcccaccaggaaccgaggatgatccccgccgttaatgcgctccagccaggtagtgcccagcgccaacaaattctggcgcaggcaccatcaaactcgccgcgcagtaaactcgccagcgccacgctcgccgccaccatcaaaccgccatagccaaggtaaagcagcggtggatgaaagataagaccgggatgttgcagcatcggattgagatcgcggccttcgattgctggtggaaatatccgcacgaagggatcggaccacagcactacaaacagtagcagtgcggcgagcatgagagataaaacggctagcgtcagcggaaatagcggatcggtttgctgccgataatgccaggcaaacagcgcgctccaggcggaaagcagcagcacccaaagcagcagcgaaccttcatggccgccccacaccgccgccagtttgagttcccacgacagcaggctgtagctatgttgggcgacataaatgaccgagaaatcgctgatgagaaaacaatacgtcagtacgccaaaggcgagcagcaggagcgcgaactgcgccagaatgccgatgcaagtgagtcgcatcatggcaggccagcgcaaccgcactcccgcaaaggccgtcaacggggtcaacacgttgaccccgagacttaacaacaacgccagaaaaccgacttcaggaaggaatacgtccagaaaccacctcttttctggcttacgccaccgtcaactgtccggcgtagagaatgaaaaagcgcagcatcaacacgccgaccagactggccccacacgccgccaacacggcaggaatgccggaactgcgattgacccacggtttgagcaacattggcacaatcagccccagcccggcgacaccaagccagaaccaccacgtccagaaaccgccacctaatgccgccaccagcgcacgcactttaccgtcatcgcccagcgccagaccgacaaaaaacgccaccagcaggaagatttcaccccataccacggggatttccatacggtgaacaaagtgcgcttccgtggaatgcggatttttgcgttggcgtatcgccatggcgatcagcgctaccgccacaccggacgagatgccggagaagaggaacagcaccggcaggatcgggttattgaggaacggatacgatttcagcgccgacagcagaaagccggtataagcccccagcagcaccgccaacaccagcatcagcgtttccagtccgcgatgaacgggcgtcagcaggctcagaaccttttgcacgatccccagcttcggcaaccagcgttgttgcagggcaagcaaatcatgttcaaagattttcgccagccacagcaccagcaccaccatgtagagctgaaacagcatcacccccatcgacatcaccgaggtaaaactgtagtggaacatcagcttccagaaggtccacggtcttgtcaggtggaagacgaggatcaacagaccgaggatcaccgcgccaggtccgacaatcagcgtggtgcgcagcaacgtgctgtctgcaccgcccgcctgcgggtagaagcgacgtaacagcacggccagcgtcaccagaccggcagaaataccaatcaaaaacaggtagatggcaatcggccagtcccacaccagcgattcaaaatgaaatgcggaagtctgcgtcattggctcacctccccgtatttaaacggtacgcggtacagcttcggtttggttcccagcgccagcttgtagcggtaagtaggcttctggcgcagcagttgcgaaatctcactgttaggatcgtccagattgccaaacgtcagcgccttcgtcgggcaagcctcaacgcacgcgggcagcttaccggcctgcaaattggtcttacggcagaaatcgcatttgtccgccgtcttcgtgaccggatggataaagcgcacgcggtacggacaggcggcgatgcagtactgacaaccgacgcagagatcaggattaacatcgacaatcccgctagcggcatcacgaaaagacgcaccggtcgggcagacgtcaacgcacggcgcatgatcgcagtgctggcaagacttacggaagaagcgatatttcacatcaggaaattcgccctgcggctcgctacgaataatcatcaggcgcgagacgccttccggcaccttgttcacttcccgacaagcatccatacaggcggtacagccgatgcataacgactcgtcatgcaccatgccgtaacgcaccccattgatattcaacgttttcgccaccacgcgccctgcggtgccgctgacggctgccagcacgccgacgccggtgagaaactggcgacgagaccaggtcatggctgctccttaagcaacggaacagacgccgggttaaagttcggattggtgcgctgatcgctgtggcaatcgacgcaaatcttaatccgtcctttgtcacttaacgtctgcatcgtatcttgctgtggatgcagggaatggcagctggcgcacgccactttggttacgtggacatcgtgcggccagaacgctttttgcaactgttccggcagatgacaggacatacagacgctgttctgctctccgaccttgtacatcggctcgttaaagcgcatcacatctttcaccccttcgcggtgttgcggtgatggctggccgtgacagttggtgcaggtgaccggcagtttgttattcgggttgataacggaagcatgtttgccatgcataccttcgatatctggcttatgacagtccagacaggcggcatccgggttacgctgctgggtaacttcgtagcgatcaccagatgcctgcgccgcaggggtagcggtaattccgttcaggctccacaacaggcccgacgccagcaccccagcagttaataacgaacgtaatacgctcatattcactccattgtgttttccgccccttgcgagtcggaacggggttattggcttaacagaccatttttacgtgcctgttcttcccactgcgggatcaccgttttgatgaagtcctgcttctcggccttgatttgttccatgttcaggccaatggcctgctgggctttctctttggtcgagatatccgggatctcgatttcatgggtgatgcctttggtcgccagcaggcgcgccagtttggtgcgtgcatccgccgctttatccatcgcagtaccgagcatccgtaaaccttcttccggtgcgtgcatatgaatgccgtgggaagcgatcgccagatcccaacgccactgggcatgacggatatcgtcctgaatcggcttcatttcggcttccgtcgcgcctgcatccagcgctgctttcgcttcgaagtgagcgtgaaccagttgatcttcaaccttgattttcaggtcgttaatcgactgcttacgttccgcgaccactttttgcaaggcagctttgtcctgggtatggcagttcgcacaagtctgggcgaagttatcaaacggattaccaattttatggtcggtgtagagtttgccttcggcgttctgcacttttggcatatggcagtcgatacaggtcacgttgtttttaccgtgaatgcccgctgtccaggtttcatattccgggtgctgcgctttcagcattggcgttttcgacagggagttagtccagtcagagaaggcaattttgtcgtaatactgctccatattttcgactttcatgccgtcatcccacgggaatttaaccgctttgtttttgccgtcgaagtaatactccacatggcactgaccgcaaaccatcgattgctggtcgaaacgtccggctttctcaaaaggtttaccaatggcttccatcgcgcgagccgcatacggacgggaaagggttaactccggtttgcctttggcgaactctggtgaggcggtgttatggcagtcggcacaacctaagttgttgacgatttccgggccgccgcgcgcccacttaccgtggaagtagccatcttcgccgtctttctggatcagacgcgccacatccgggcttttacaactccagcacgccatcggtagcggaccatcttcagcgtttttcggcgcaccggtacgcagggtttcacgcacatcggtcacagcaaaggcatgtccacgcggcttgttgtaatcgcgcgagaagggataccccgcccacaggatcaccagccgtggatcttccgccagggcgtcaacacgctctgactgttccgaggtggctttccaggagagatattgatcgggatgctgcggggcaaaggtttcattcttcgcttccacagttacaggttttgcgggagctgccgtttgttcagcgtgaacagaagtgaaaaagaaaaaaggaatcaataagctgaagatacggcgtgcgtttatttttatccttgtcataggggcttcatccgaattgcgccattgttgcaatggcggtttttattgttttcacgacagtaaccgcacctacactgtcatgacattgctcgcccctatgtgtaacaaataaccacactgtgaatgttgtctttaatcaattgtaagtgcatgtaaaataccactttagagttagtcagtatcttcctctttttcaacagcatgcataactgcatgttcctcaaagaattaatcaacttttgttggtgaccttcaaaaattaccctgccgtttatttgcacaattctacttttgcgtgatctgtcgcccaaatactaaacaaaactgccaatacccctacatttaacgcttatgccacatattattaacatcctacaaggagaacaaaagcatgagccaaattcacaaacacaccattcctgccaacatcgcagaccgttgcctgataaaccctcagcagtacgaggcgatgtatcaacaatctattaacgtacctgataccttctggggcgaacagggaaaaattctcgactggatcaaaccgtaccagaaggtgaaaaatacctcctttgcccccggtaatgtgtccattaaatggtacgaggacggcacgctgaatctggcggcaaactgccttgaccgccatctgcaagaaaacggcgatcgcaccgccatcatctgggaaggcgacgacgccagccagagcaaacatatcagctataaagagctgcaccgcgacgtctgccgcttcgccaataccctgctcgagctgggcattaaaaaaggtgatgtggtggcgatttatatgccgatggtgccggaagccgcggttgcgatgctggcctgcgcccgcattggcgcggtgcattcggtgattttcggcggcttctcgccggaagccgttgccgggcgcattattgattccaactcacgactggtgatcacttccgacgaaggtgtgcgtgccgggcgcagtattccgctgaagaaaaacgttgatgacgcgctgaaaaacccgaacgtcaccagcgtagagcatgtggtggtactgaagcgtactggcgggaaaattgactggcaggaagggcgcgacctgtggtggcacgacctggttgagcaagcgagcgatcagcaccaggcggaagagatgaacgccgaagatccgctgtttattctctacacctccggttctaccggtaagccaaaaggtgtgctgcatactaccggcggttatctggtgtacgcggcgctgacctttaaatatgtctttgattatcatccgggtgatatctactggtgcaccgccgatgtgggctgggtgaccggacacagttacttgctgtacggcccgctggcctgcggtgcgaccacgctgatgtttgaaggcgtacccaactggccgacgcctgcccgtatggcgcaggtggtggacaagcatcaggtcaatattctctataccgcacccacggcgatccgcgcgctgatggcggaaggcgataaagcgatcgaaggcaccgaccgttcgtcgctgcgcattctcggttccgtgggcgagccaattaacccggaagcgtgggagtggtactggaaaaaaatcggcaacgagaaatgtccggtggtcgatacctggtggcagaccgaaactggcggtttcatgatcacgccgctgcctggcgctaccgagctgaaagccggttcggcaacacgtccgttcttcggcgtgcaaccggcgctggtcgataacgaaggtaacccgctggaaggcgctaccgaaggcagcctggtgatcaccgactcctggccgggtcaggcgcgtacgctgtttggcgatcacgaacgttttgaacagacctacttctccaccttcaaaaatatgtatttcagcggcgacggcgcgcgtcgcgatgaagatggctattactggatcaccgggcgtgtggacgacgtgctgaacgtctccggtcaccgtctggggacggcagagattgagtcggcgctggtggcgcatccgaagattgccgaagccgccgtagtaggtattccgcacaatattaaaggtcaggcgatctacgcctacgtcacgcttaatcacggggaggaaccgtcaccagaactgtacgcagaagtccgcaactgggtgcgtaaagagattggcccgctggcgacgccagacgtgctgcactggaccgactccctgcctaaaacccgctccggcaaaattatgcgccgtattctgcgcaaaattgcggcgggcgataccagcaacctgggcgatacctcgacgcttgccgatcctggcgtagtcgagaagctgcttgaagagaagcaggctatcgcgatgccatcgtaacccacaattgccggatgcgagtcggtaacggtttgtaggcctgataagacgcgacagcgtcgcatcaggcattgattgccggatgcggcgtaaacgccttatccggcctacattcggcaagggttacccgagcgttaaccttctcccataagggagcgggaattaaaacaatccctacattacctctggagaatctgtgatgaatggcactatttatcagcggatagaagacaatgcgcatttcagggagttagtcgaaaaacggcaacggtttgccaccatcctgtcgattattatgctggcagtttatatcggctttattttactgatcgccttcgcgcccggctggctgggcacgccgctgaatccgaacaccagcgtcacacgcggtattccaattggtgttggagtgattgtgatctcctttgttctcaccggtatctacatctggcgggcgaacggcgaattcgaccgtcttaataatgaagtcctgcatgaggtacaagcatcatgaaaagagttctgacggcgcttgccgccacactccctttcgcagctaacgccgcggatgctattagcggggccgtagagcgccagccaacgaactggcaggcgattattatgttcctgattttcgtcgtgtttacgctcggcattacctactgggcatcaaaacgcgtacgttctcgtagcgactactacaccgcaggcggcaatatcactggcttccagaacgggctggcgattgccggggactatatgtccgccgcctcattcttggggatctccgcgctggtgtttacctccggctatgacggcttaatttactcgctgggcttcctggtgggctggccgctcattttgttcctgattgccgaacgtctgcgtaacctggggcgctacacctttgccgatgtggcctcttaccgtctgaaacaagggccgattcgtattctttcggcctgtggttctctggtggtggtggcgctttaccttatcgcccagatggtgggcgcaggtaaactgatcgagctgctgtttggccttaactatcacattgcggtggtgctggtcggcgtgctgatgatgatgtacgtcctgttcggcggcatgctggcgaccacttgggtacagattatcaaagccgtgctgttgctgttcggtgccagctttatggcctttatggtgatgaaacacgtcggctttagcttcaacaatctgttcagtgaagcgatggcggtacacccgaaaggtgtcgacatcatgaagccgggcgggctggtgaaagatccgatctccgcgctctctctgggtctgggactgatgtttggtacggcgggcttgccgcacattctgatgcgcttctttacagtcagcgatgcccgcgaagcacgtaagagcgtgttctacgccaccgggtttatgggctacttctatattctgacctttattatcggcttcggcgcgatcatgctggttggtgcgaatccggaatataaagacgcggcgggccatctgattggtggtaacaacatggcggccgttcacctggcgaatgcagtgggcggcaacctgttcctcggttttatttcagcggttgcttttgccaccattcttgcggtggttgctggtctgacgctggcgggcgcatcagcggtttcgcatgacctgtacgctaacgtcttcaaaaaaggcgcgaccgaacgtgaagaactgcgggtatcgaaaatcaccgtgctgattttaggtgtgattgccattatcctcggcgtgctgtttgagaatcagaacatcgccttcatggtaggcctggcgtttgccatcgcagcgagctgtaacttcccgatcattctgctttctatgtactggtcgaaactgaccactcgtggcgcgatgatgggtggctggctggggctgattaccgcagtggtactgatgatcctcggcccgacgatttgggtacagatccttggtcacgaaaaagccatcttcccgtatgaatacccggcgctgttctctatcagcgtggcattcctcggcatctggttcttctcggcaaccgataactcagcggaaggtgcgcgcgagcgtgaactgttccgtgcacagtttatccgctcccagaccggctttggcgttgagcaaggccgcgcacattaatctctccccttccccggtcgcctgaccggggaatactcttcctctccagcatgcatcaccttttcccataatattaaacaaataaactcattaaaaaatgagcgatttttgacagtcgtagaaaatgataatgcagagaatatgccttttctttcttgttaattataaggatattttatgcgctataatggtttaaataatatgtttttctctctttgcaagattaacgataaccactctttcacaagttcatcacatacaaagaaaacaaaatcatataattacagcaaacatcataaaaacacgttaattgacaataaagccctctctcttttcaagatggatgatcatgaaaaagtgataggtttgattcagaaaatgaaaagaatttatgatagtttaccatcaggaaaaatcacgaaggaaacggacaggaaaatacataaacattttatagatatagctttatatgcaaataataaatgtgacgatagaattacgagaagagtttaccttagtaaagaaaaggaagtatccattaaggtggtatattttataaataatgtcgccgtccataataatactatcgaaattccacagacagtaaatggtggttacgatttttcacaccttagcctgaaaggtatcgtgattaaagatgaagatttatccaattcgaattttgcaggttgcagactacaaaacgctattttccaggactgtaatatgtataaaacgaatttttattacgccataatggaaaaaatactttttgatgattgtattctcgatgactcaaatttcgctcagataaaaatggccgacggaactctaaatgcatgctccgctatgcatgttcaattctacaatgcagcaatgaatagagccaatattaaaaatacctttcttgactattcaaatttttatatggcgtacatggctgaggtaaatctttataaagtaatagcgccatatgttaatttatttaaagccgaccttagtttctctaaactcgatttaattaactttgaacatgctgatctgtctcgcgtcaatctgaacaaagcaatcctccagaatataaacttaattgatagcaaactcttttgtacgtggctaacaaatacattcctcgaaatggttatatgtaccgactctaatatggctaatgttaattttaataatgccaatttaagcaactgccatttcaactgttctattttaacaaaagcctgtatgtttaatacccgtctctatcgggttaattttgatgaggctagcgtccagggaatgggcatttccatactccgtggggaggaaaatatccccattgatagtgataccctggtaacacgacagaaattctttgaagaagattgtacctctcatactggcatgtcacaaactgaggataatattaatgcagtcgctatgaagattactgcagatattatgcaacacgcagattgaggttaaatcgaagaacagccaatgaattgactttacaagagagataacttatttgttttagaatcatgaatgttagcccgagctaacctgttaaaggtgcaaaagattgcacctttttcagattacctcgggcctggttacgtcgctttcggcttactgattttcctcaattagcaacgcttcaagcaaatcgagatcgtgcagtaatttttgcagcgtttcgttgctgatctcccgcgtggcgcgcaggtggtacagttcagcacgttcagaacgcaatgccgccagacggaagcgacgctcaaggttctcttcctgcacggaactttcaacgtcgttacgtccatcggcgcgacgacgcaggttaccaatgacgcgagaactgacctccgtaagcagctggttatcgatattctcttcggtatccgccgccagacgctcctccattttctggatcgccacaatcgccacttctgccgttgccgctcgcgcaatacgttcctctttcaattgttgcgaatgatccgcgacttcaatgtgttgtagcagaataggcaacatcaccacgccgacaaacagcgagaagagaatgacgccagccgccaggaacaccagctcatagcgcgccgggaagacgttaccatccggcaagagcagcgggatagagagcacaccggccagagtgatcgccccacgcaccccagcgaaagacgcgatcaggatttctcgtgtggtccacgaaccaaactccatcggcttcttcttcaggaagcggttgctgaactttttcatcgtccacagccagccgaaacggaccagcatcagcgccgcatatatcagaataatatcggtaaacagcatccagatttcgacgttagggtcgatttctgccgccatcagcgacgtctccagaatacccggtagctgcagacctaacagcaggaacaccatgccgttaaagacaaattccagcatcgcccaggtgctgtttgcacgcaggcgcattgccagcggcgcacggcgcatcacaccggagcgggtgatggtcatcccggcggcaaccgcagcgaggatgccggaaacgccaatatgttcggcaatcagataagaagcgaatggcagcaggaacagcaggacgatctgcgtcgcgggttcatcaccgccccagcggctgaggaatcgcagcgagcgaccgtacagccagctaaccacaaaaccggcgagaataccgccaatggctactttcataaattcgaccgtcgcaccgccgacgctgaagatcatcgtccccatcgccactgctacggcaaacttcaacgacaccaggccggaagcgtcattcatcaacgcttcgccctgcaaaatgcccatgatttttttcgggatacgcccttcgccaacaatcccggagagcgccacagcatcggtcggagaaagtaccgccgccagcgcaaaggcggggatcagcggaatgcccggcaccacccagtaaataaggaagccaatgccgaccacggtgaccaccaccagcgccagcgcgaggccaaaaatctctcgaccatgttcgagaaattcacgggtcggcgttttccagccatcagcgaacagcaacggcgggataaacaagactaaaaagagttcaggatcaaactccacatgcaaaccaaacgtcggccacgccagtagcgcaccgatggcgatttgcataagcggaagcgggatctgaaagggcatgacacgagtgaccaccccggacagcgagaccacgagggtcattatcagtatggtgaagaagatttccatgcgttccctgtttgcgatgttttttatgatctgagaaagacgttatgcctgaattctcattttttcagaatatcgcaaaagctcacacaatgtgcggagaaaataaaaacgggcagccattgccacccgttttcagaatccgatgaaagattagatagcccagccacccgcatagaaggtcaccagcgccacggcgataacgaccgtaccgatgttcaacttgcgccattcgccggaaaccagacgaccaatcaccagagtcgcgaagccgatcatgatgcctgttacgatgttacaggtcagcacgatgaataccgccgtaaccagacccgccatcgcatcaacaaaatcagcaaagtcgattttcgccacgttgctcagcatcagcaggccaacgtacatcagcgccggagccgttgcataccccggaacgaggtaagagagcggagagaggaacagaatcagcaggaacagcacgccaacggtgatagccgtcaaaccggttttaccgcccgccgccgtacccgccgcagactcgatgtataccgctgccggagctgcacccaccaggccagagaaaacgctgctcatggagtcagtggtcagtgctttcccaccgtcgatgatctgcccatctttatccagcaggttcgcctggccggcgacggcacggatagttccggtggcatcaaatactgccgtcatcaccagcgccagaacgcttggcaggactacaggattcagcgcgcccataatgtccaggctgccaatcagtgaattgccgttttcatcgctcaatgaaggcatggcgaaaacgccggagaaatggacgttaggatcgaagatcaaaccgacaattgagataccgataatggtcagcagaatgccaccagggactttcagtttttccaggccgatgatcaccgccagacctaccagtgacataatcaccgggaaggtcgcgaaatcacccagcgcaacgggcagaccatccagcgggtttttaatcaccagaccgacaccattagcggcaatgagcagcaggaacagaccgataccgatccccgtgccgtgcgccacaccgtgaggcaagttgcgcaaaatccagctacggatacccgtggcagaaattaccgtaaacagcacacccatcaggaacacggcacccagcgcgacaggtacgctaatatgttgccccagcaccaggctgaatgcggtaaatgccgtcagggagatggcgcaaccaatcgccaacggcagattagcccacagacccatcacgatagaaccgagtccggcaaccagacaggttgcaacgaaaactgccgcaggcgggaagcctgctttacccaacatacctggaacgacgatgaccgagtagaccatcgccagaaacgttgttaacccggcaaccacttcctgacggacagtgcttccacgttgtgaaattttaaaccaggcgtcgagtgaaccgccggtacgcgctgatggcgtagacataagaaaacatcccctgagagtttaattttcgtcaagatgcgtggcggacaatcccctgccagcgaaacgttatcttcctgctccaggtttgcgacaatttgctgcgtcgcaaaaaagcaaacgtttagctccgcgcatacaaaacgggtggtaaaaaaagcaaacgattatccggcgatcatagcggctttttcaaccgaagtttgctgcttttttctcttttattgtcttgacgatgaaaaaccaggcaattgatgcgcaaacgttatcgtcggtgcgcaagattgcagcgttatcgagccgtataccgttcaggattgcgataaaaaatcgtctgagatgacaaaaatattgcggttaaaaagtatacttttacactggcgaagaaacgtcggtgacatacaattaaagcatcaacaccaaccggaacctccaccacgtgctcgaatgaggtgtgttgacgtcgggggaaaccctcctgtgtaccagcgggatagagagaaagacaaagaccggaaaacaaactaaagcgcccttgtggcgctttagttttgttcatcttccagcaagcgtgcgccggtaccttcttctcctaagcggtcgcccgggttacgcaacgggcaatcactgcgcgaaaggcagccacaaccaatacatccgtccagttcgtcacgcagcgctactaaggtatgaatgcgccgatccaactcttctcgccattgggacgaaagctgtttccactctttcgcacttaacgtatgcccttcgggcaacacgccaaacgcttcaccaatggtcgccagcggaatgccaatacgctgagcaattttgataattgcaacatatcgcaacacatcacgtttatatcgccgctgattgccgctgttacggatactggtaatcaaccctttactttcatagaaatgcagcgccgataccgccacaccgctgcgtttcgccacttcgccgggggttagcagcgctttaatgcggggtaatttcttttccataaatcgctttacctcaagttaacttgaggaattatactccccaacagatgaattaacgaactgaacactgaaaagaggcagatttatgtcccatcagaaaattattcaggatcttatcgcatggattgacgagcatattgaccagccgcttaacattgatgtagtcgcaaaaaaatcaggctattcaaagtggtacttgcaacgaatgttccgcacggtgacgcatcagacgcttggcgattacattcgccaacgtcgcctgttactggccgccgttgagttgcgcaccaccgagcgtccgatttttgatatcgcaatggacctgggttatgtctcgcagcagaccttctcccgcgttttccgtcggcagtttgatcgcactcccagcgattatcgccaccgcctgtaattttattgcccgcgcgttaactcccgcgcgggtaattgctccatccattgcataaacacctgcggcggcatcgccttcgcaaagaaccatccctggcaatagcgcacgccgcgtttgcgcagccagttaacctgctcctcagtttcgacgccttcagcgatcgtttttaaccccaggctgtgcgccagctcgatgatgtgttccgcaatcaaatgactggttttgtgggtggtcagcgtttcaacaaacgatttgtcgattttcaaaatatcgacattcaatgatttaaggttatgcaagttagagtagccaataccaaaatcatcaattgccacttcgtaaccagcctggcggaaagccagaataatcggcgtcattttttcgacatcaaaaaatgcatgctcagtcacttcaaatttaatttgctgcggacgcaccgcgtattgctctgttttctgattgattcgcgctatcaaccgtgacgtatgaaaatcggaggccgacaggttaatagaaacatagcgatcggcatgtgttgccaagtacgcgcccagatcacggaagacattatcaataacataatcagttatctgttctatcatcccctccttttctgccagcggaataaactctgccggattcattatttgcccctgctcaccaggccaacgtaacaacgcttcagcgccgatacatttttctgttttgatatcgattattggctggtaataaagacaaagttgatgtttttctagagcgcgttgcaatttgcgtttgggagacaaatagttttgtcgaatacgtagccagagtaatagcagaacaagactccccaaaataccggcgggcaacgcaaaaataagatgattataaaaatgggttataagacgttgatatgaagtcgcaacaatggctgcaattgggcgttttgtcgaataaactgtcgcatataaatagccatttctttgtacggttaaatccttcaaatgaatcagcggagaaaacgttgctgccgaggcctctttgcttaacgagaaaaaggttttcgtcaccgtatcatacacaccccattgcaatgtcggatcatcagacatcacttcactccagaagagagggttgataaccgccacataatttccccgctgcatataggtcattttatagccagagaaaaaaggcgtatcgcggtaataatagatagaaacgttaggttcacgcttataatcggccggtgcaatcgtatagccgtttacaggcgctatcagcgatgagcataaaaaatggttatcacgggcatagatcaattcattaatataaagatagccacgaataatattcaacattcgcttttgatgggctggagtgcaaacttgcccctgatagcgttcagctgcatcgctcactaaatctgcctggcgaatgaccagctcggatttatccagtgccagttgagcaaaggttcggagctgattattcacttctgattttgcccaaaggaaggcaatccatagcgaaagaatgatgggaaagagaactaaaaagataatgcccggcaacgccagtaattggtgtcgtgcacgatgactcattgctatcaatttcctgcctgtttatacccggccattgcaaggtgaaaaccctgggtaccgacgtctttagataaatcttacggtataaatagcacttttgcctgatttgaaattgatacctttctaatcgtcacctggatgaaaataattcattgatattcaaaattaatttcctacaggaatgcagaggcggcgggaagatatgcccttaatgccactgaaaaaccacataatctgtacagcaataaaagtcacggcctaatatggctaacaaacaatcaattgtgatatagttcacaaaattaatgaaacaaacagagtgtttcatttttgtgttctgcaagccccgcgatagccagagtgtaccacgcctcccgtgaacaacgccgcgctgtccagggcatcggctcttttcagaggaattgtttgatggctaccctcaccactggcgtggttcttcttcgctggcaacttcttagtgccgtaatgatgtttctggccagcacactcaacatccgttttcgtcggtctgattatgtcgggcttgcggtgatcagcagcggtctgggcgttgtttccgcctgttggttcgcaatggggttgcttggcatcacaatggcggacatcaccgctatctggcacaacatcgagtcggtgatgatagaagagatgaatcagacaccgccacaatggccaatgattttgacctgatacgtagaagcctccataacggaggcttcttttttatggctggcagatgctttaatcatccaccttaaaacaatataacctattgttttaatgacaaatcagaacggaatgtcatcatcaaagtccatcggcggctcgttagacggcgctgccggagcggactgctgcgggcgagactgcgcgccgccgctgaactgattgccaccctgcggctgctgtggctgaccccaaccgccctgcggctgaccaccaccgatattgccacctgccggagcgccaccaccctgacgaccacccagcatctgcatggtgccgccaacgttcaccacgacttctgtggtgtagcgatcctgaccggattgatcggtccatttacgggtacgcagctgaccttcgatataaacctgagaacctttacgcagatattcgctcgccacttctgccagtttgccgaacagcacaacgcggtgccattcagtctgttctttcatctcgccggtcgctttatcacgccaggattcggaagtagccagcgtaatgttggcaactgcgccaccatttggcatgtagcgtacttccgggtcctgacccagattaccaacgagaataaccttgtttacgcctctgctggccatgttcgtgtctcctgaaaaaaatcgttctgaataagtgtaaacgcgcgattgtaccattaccaatagcgcttttactatgttgtgacctcggttccgggaaacaaacctggccagacattgttacacaacactccgggtaatgcattccaatactgtatattcattcaggtcaatttgtgtcataattaaccgtttgtgatcgccggtagcaccatgccaccgggcaaaaaagcgtttaatccgggaaaggtgaatggataagatcgaagttcggggcgcccgcacccataatctcaaaaacatcaacctcgttatcccccgcgacaagctcattgtcgtgaccgggctttcgggttctggcaaatcctcgctcgctttcgacaccttatatgccgaagggcagcgccgttacgttgaatccctttccgcctacgcgcggcagtttctgtcactgatggaaaagccggacgtcgatcatattgaggggctttctcctgccatctcaattgagcagaaatcgacgtctcataacccgcgttctacggtggggacaatcaccgaaatccacgactatttgcgtttgttgttcgcccgcgtcggcgaaccgcgctgtccggaccacgacgtcccgctggcggcgcaaaccgtcagccagatggtggataacgtgctgtcgcagccggaaggcaagcgtctgatgctgctcgcgccaatcattaaagagcgcaaaggcgaacacaccaaaacgctggagaacctggcaagccagggttacatccgtgctcgtattgatggcgaagtctgcgatctttccgatccgccgaaactggaactgcaaaagaaacacactattgaagtggtggttgatcgcttcaaggtgcgtgacgatcttacccaacgtcttgcggagtcgtttgaaaccgcgctggagctttccggtggtacagcggtagtggcggatatggacgacccgaaagcggaagagctgctgttctccgccaacttcgcctgcccaatttgcggctacagtatgcgtgaactggagccgcgactgttttcgtttaacaacccggcaggtgcctgcccgacctgtgacggccttggcgtacagcaatatttcgatcctgaccgcgtgatccaaaaccccgagctgtcactggctggcggtgcgatccgtggctgggatcgccgcaacttctattatttccagatgctgaaatcgctggcagatcactataagttcgacgtcgaagcgccgtggggcagcctgagcgcgaacgtgcataaagtggtgttgtacggttctggcaaagaaaacattgaattcaaatacatgaacgatcgtggcgatacctccatccgtcgtcatccgttcgaaggcgtgctgcacaatatggagcgccgttataaagagacagaatccagtgcggtacgtgaagaattagccaagtttatcagcaatcgcccatgcgccagctgcgaagggacgcgtctgcgtcgggaagcgcgccacgtttatgtcgagaatacgccgctgcctgctatctccgacatgagcatcggtcatgcgatggaattcttcaacaatctcaaactagctggtcagcgggcgaagattgcagaaaaaatccttaaagagatcggcgatcgtctgaaattcctcgttaacgtcggcctgaattacctgacactttcccgctcggcagaaacactttccggcggtgaagcccagcgtatccgtctggcgagccagattggtgcgggcctggttggcgttatgtatgtactggacgagccgtctatcggcctgcaccagcgcgataacgagcgcctgttgggtacgcttatccatctgcgcgatctcggtaataccgtgattgtggtggagcatgacgaagacgcaattcgcgccgctgaccatgtgatcgatatcggtcctggtgcgggtgttcacggcggtgaagtggtcgcagaaggtccgctggaagcgattatggcagtgcctgaatcgttgaccgggcagtacatgagcggtaaacgcaagattgaagtgccgaagaaacgcgttccggcgaatccagaaaaagtgctgaagctgacaggtgcacgcggcaacaacctgaaggacgtgacgctcacgctgccagtcggtctgtttacctgcatcacaggggtttcaggttccggtaaatcgacgctgattaacgacacactgttcccgattgcccaacgccagttgaatggtgcgaccatcgccgaaccggcaccgtatcgcgatattcaggggctggagcatttcgataaagtgatcgatatcgaccaaagcccaattggtcgtactccacgttctaacccggcgacctataccggcgtgtttacacctgtgcgcgaactgtttgcgggcgtaccggaatcccgtgcgcgtggttatacgccaggacgtttcagctttaacgtccgtggcgggcgctgcgaagcctgtcagggcgacggtgtgatcaaagtggagatgcacttcctgccggatatctacgtgccgtgcgatcagtgcaaaggtaaacgctataaccgtgaaacgctggaaattaagtacaaaggcaaaaccatccacgaagtgctggatatgaccatcgaagaggcgcgtgagttctttgatgcggtgccagctctggcgcgtaagctgcaaacgttgatggacgttggtctgacgtacattcgcctggggcagtccgcaaccacactttctggtggtgaagcccagcgcgtgaagctggcgcgtgagctgtcaaaacgcggcaccgggcagacgctgtatattctcgacgagccgaccaccggtctgcacttcgccgatattcagcaactcctcgacgtgctgcataaactgcgcgatcagggcaataccattgtggtgattgagcacaatctcgacgtgatcaaaaccgctgactggattgtcgacctgggaccagaaggcggcagtggcggcggcgaaatcctcgtctccggtacgccagaaaccgtcgcggagtgcgaagcttcgcatacggcacgcttcctcaagccgatgctgtaatcgttaaggccgctttctgagcggccttttcctttcagagttgtaccagcaatttacgcttttcttccggtagtaaattcactgcctgctgataagacgcatccaccagataatagatttgcgaatccggcagcgaaccgtcgagatacacggtgctccagtgcgctttattcagatggcggctaggacgcacatcgctgtgctgctgacgtagcagctccgccagctccgggctggttttcagcgaaacagctgggcgattttctacttctttcaccatcgcaaacagtacatcttccactttgatctgcgtcgctttccagtcgttatgcacgctctgttctgcgcctggttttgccatgcaatattgtagcaactccgaaatggtcattttttactccccttgtagtgtcgcgatgatgcgacgcgatccgccgtggatgcgatgttcccccagccagatgccttgccaggtgccggtctgaatacgccctttatgtaacggcaatacaagcgatgttcccagcattgaggatttgatatgagaaggcatatcgtctgctccctcatagtcatgctcataatttccgttgtcgggaacggtgcggaggaaaaaacgctccatgtcgtggcgtacggtgggatcgcagttctcattaagtgtcagagaggcggaggtatgttgcagcaacagatgcagtaagccgatgttaacgcgcggcatatcagccagctgattcagaatttcatccgttaccagatgaaacccacgagatttggcgctaagcgtgagcgtcttttgataccacatgtgctgctccttgataaaactctcttaatcagtttgcagcaagacagcgaaaggataaaggtgtgattaaaaaaacagcattcgggagagcatcacgctctcccgctctgtcagtattctgaattgacgatcacctcttcaccaaacgcacccgcttgtggcaagggtttgtaggtagagttggaggcgcgcagaatgcggataccacgagcgccgacatcgcgtgcggcggtaatatcattatcagaatcgccataaaaaattcggatatttttatcctgcagccattgcgattttgtattttgccctggtttatcgcccgcaaagatcaccggattcatgttggtggcaggaatatgaaaattatccgccagcgtttttgaaaccgtttctgttttcgtcggactacgaccagtcacaaagaagatcgcgtcaccgcggcgtacatgcatatcaatcagctggcgagcgacctcttttggaatgctgaattcatcccagccattgttcattttttcccagaacacaggatttttcagataatcttcgctttctggtgagaaggtttttttgccgcgccagaagcccgggctggaaaaaagtaccgtgtcatcgatatcaaaccccaccgccattggcggacgccctgcgaggctattttcaatttgtgcgaccgaaacccaatgaattggtgcctgttcagcaagcctggcaacgttagtcccagggttaagcggtgaaggagatgaggccagggcaacagcggaactgtttagagcgaacaataagcaaacggcactgattgcctgtgtgatcttgcgcatatttttccctaaatagtcagtatgttgaaactttttattgtgagatttgttgcaaaaaccatctgaccataacgccagctgccggggaaaggaaggattatctgcggtttttgtgatgaaaagcaggatgattatgtttaacccagtaaatacgttcctgtctttttttgtataaaaaatgtttattactcgatgtaaggatacattaattttacgtttattatgatgaatcctctgcaaatgagcgaaatttgatagaacatttatctgctgtacgatttaatgaacttaatgatacagcattacaaaaacaatcgaagtttataaagatgattcctgattgaccagaaccctatcctacaatggtgactaattttattactcccgatggagatgatgatatgaatatatcatatgtgaatagcaacaaaacgacatctttacctgttgagctagatgcactaaataataaagatatctcttatgccaaagatttttcttatgctaaagatttctttttatacatagaaacacagttaaaaattgcaaaagatttttgtagacctggagaagaagtatcaagttctattgcaagtaaagtttttcacgcatttattgatttagttaacaaaatcaggggtaagaaagactttatgtatatttgcacgctttgctgttttgccgaggaggttaaaggtgattattctcattacaggacctttttatttgatattggtaatcaatataaggttaaacttacacaaagcggaaaaaaagagctctctttaactttagaatttaacgatactataattgaatctcagaaagtcacaggcaataaggcaaagcatattcttgaggatatagaaaaattctatcgtaacaaacccgatacttattattaaatttaataatagttagatgtgcagaaattattactccacccaaaaaaacaggataaggaattccagataattaggataagcttaacaataaaagaactaataacgtttattatctctcacgtagaacgatggcatcaaaaaaatcatctataaagaaagagtgaaagcgacgacagtttaatttcactgcaggctgggtagctccagcctgctttcctgcattacatcaccgcagcaaacgcctttgccacacgttgtacatttgccgtatttaacccggcgacacacatgcgaccgctggcgatgagatagacaccaaattcttcacgtagtcggtcaacctgagcggcacttaaaccggtataactgaacatgccgcgctgattaagcagataatcgaaattgcgttctggcatctctgtgcttaataccttcaccaattcctgacgcattgccagaatgcgagtacgcatctcttctacttccgccagccagctggctttcaatgcctcgtcattcagcactgcagccaccacctgcgcaccaaaattcggcgggctggagtagttgcggcgaactgttgctttcaattgccccagtacgcggccagcggcttcggcatcttcacacagaacagaaagtccgccgacgcgctcgccgtaaagggagaaaattttcgagaacgaattgctcaccagagcgggtaatccagcgctggcaatggcgcgaatagcgtaggcatcctcttccataccggcaccaaatccttgataggcaatatcgaggaatggaataagctcgcgggctttgagaatttcaatcaccgcatcccactgatcattagtgagatcggcacccgttgggttgtggcaacatggatgcagcaacacaatactgcgggcaggtaatgttttcagcgtcgccaacaggtcattaaagcgcacgccgttagtcgcttcgtcataccaggggtaagtactcacttcgaatccagccccggcgaatattgctacgtggttttcccaggtaggatcgctgacccagacgcctgattccgggaagtagcgtttcaggaaatccgcgcccactttcaatgccccggagccgccaagggtttgaatggttgctacgcgctgttgtttcagtaccggatggtccgcaccaaacagcagcggcgcaatggcatggcgatagctgttaagcccttccatcggtaaataaagcgaagcgccatgaggctgcgcattcaggcgcgcttccgcctccgccacggctttcagttgtggaataattccgtcttcgttgtagtacagaccgatacttaaattcactttgtcgctgcgagggtcttctttaaaacgctccataagcgtaagaatcgggtcgccagcgtaggcgtcaactttttgaaacacgcgatggttctccaggtttacgggcaggtggttaaaacacaataaaccggaagaaggcgaagatcgagtggatgttcaggagcgaacggcaattagcaacagagtgagactcatgacaaacgtacatccgccagaggcacgacctttataagagcatgaaagaacatcaacttattgaatttttaggattttattggccggataaggcattcacgccgcatccggcacagacaatcaaatattacagaacgattaatccacgtatttcatcgcgacccttgaagtcaggcgcgtaataagttcgtaagcgcttactttcgtcatttcagcgatacgttctacgggcaaaccttcgccccataaaatgaccggatccccggctttgtcctgcgcttgtggacctaagtctacgcagatcatatccatcgccacgcgcccgacaatcggtacttcgcgaccgttcaccagcactggcgtaccggacggcgcggcgcgcggataaccatcgccatagcccatcgcgactacgccaagacgggtatcacgttcgcttacccaggttccaccataaccaacaggttctccggctttatgctcacgcacggcaatcaggctggaggttagtgacatcactggctgacagccaaaatcggcaccggtggagcgatcttccagcggcgagacgccataaagaatgatgcccgggcgcacccagtcaaaatgcgactgtggccacagcagaatgccacccgatgcggcaatggaacgttgaccaggtttgccttcgcaaaaggtattaaagatagcgagttgtttctcggttgcgccacattttggttcatccgcgcgcgcaaaatggctgacgatattcaccggctgacgaacgtttttgcactgggtcaggcgatgataaaacgcctcagcctgttccggccttacgcccagacggtgcataccggtatcgagtttcatccagacggtaaccggctcgtccaggctagcctcttccagcgcagccagctgttcttcgttatgcacggcggtatgaaaatgttgcgcagaaatcgtcggcagatctctggcatcaaaaaagccttcgagtaacagtacaggtttggtgattccccccgcacgcagtcgcagagcttcttcgagacgggctacgccaaaggcgtcagcatcggggagcgttcgcgcggtctcaagaagaccgtgaccataagcgttcgctttcaccaccgcaaccattttactggcaggggccagttcacgaagacgttgcaggttgtgtcgcagagcgcggcggttaatcacaacagttgccgcttgcatttgtgttccttgataagtgtttgctttaattacctaattcataaaataattattattcgtcgtcgtactgcggccccgcatagttgtcgaagcgcgaccattgaccgttaaaggtcaggcgtaccgtcccgattgggccgttacgttgtttaccgataataatttccgcgatgccttttaaatcactgttttcgtgatacacctcatcacgatagataaacatgatcaagtccgcatcctgctcgatagagccagattcacgcaggtcggagttgaccgggcgtttgtcggcacgttgttccagagaacggttcaactgggacagcgccaccaccggcacgttcagttctttcgccagtgctttcagcgaacgggagatttctgcaatttccagcgtacggttatcggaaagcgccggtacgcgcatcagttgcaggtagtcgatcatgataagcccgatgccgccgtgttcacgggcaatacggcgtgcgcgggaacgcacttccgttggcgtcaggccggaggagtcatcgatatagatattgcgtttttcgagcaaaatacccatggtgccggaaatgcgcgcccagtcttcatcatcgagctgcccggtacggattttagtctggtcaacgcgcgacagcgacgccagagaacgcatcataatctgttctgaaggcatctccagcgagaagataagtactggtttatcctgcaacatcgccgcgttttcgacgaggttcatcgcaaatgttgttttacccatcgacggacgcgcggcgacgatgatcaaatccgacggctgcaagccagcggtttttttgttgagatcgtcataaccggtgtttactccggtaacgccatcgtgtggctgctgaaacaactgctcaatacgcgccacggttgcgtcgagcacatcggcgatgttcttcggcccttcgtctttgtttgcacgactttcagcaattttaaagacgcgggattcagcaaggtccagcagatcttcgctggtgcgcccctgcggatcaaaaccggcttcagcaatctcattcgcaaccgaaatcatctcacggacaacggcacgttcacgcacgatgtccgcataggcactgatgttcgccgcacttggcgtattttttgacagctctgccagataagcaaaaccaccgacgctatcgagttgcccctggcgttccagcgattccgcaagggtaatcagatcgataggactaccgctttcctgcaaacgcgccatttcagtaaagatatggcggtgtgggcgggtgtaaaaatcgtctgccaccacacgctcggctacatcgtcccagcgttcgttatccagcattaaaccgcccaacaccgactgctccgcttcgagcgagtgcggaggcactttcagcccggcaacttgtggatcgcgttcgcggggttcagcctgctgtttgttgaagggtttatttcctgccatagtgaatggagttaccgagataaagaatgggtcgaaactttaccatatgaagcagaccctgacgatacgttctggaggacacatggcaacacgaattgaatttcacaagcacggtggcccggaagtacttcaagccgtagagttcactcctgccgatccggcagagaatgaaatccaggtcgaaaataaagccatcggcatcaattttatcgacacgtatatccgcagcggcctttacccgccgccatcactacccagcggattaggtaccgaagcggcaggcatcgtgagtaaagtcggcagtggtgtaaagcatattaaggcaggcgatcgtgttgtctatgcgcagtcggcgttaggcgcttacagctctgtgcataacattaatgcggataaagcggcgattctgcctgcggcaatttcttttgaacaagctgcagcatctttcctgaaaggcttaacggtttattatctgctgcgcaaaacctatgaaattaaacccgatgaacagttcctgttccacgcagcggctggcggcgttggcttaattgcctgccagtgggcaaaagccctgggcgcgaaacttatcggcaccgtaggaaccgcgcaaaaagcgcagagcgcgctaaaagccggcgcgtggcaggttattaactatcgtgaagagaatctggtcgagcgattgaaagagatcaccggcggtaagaaagtgcgcgtagtgtacgattccgtgggcagagacacctgggaacggtcgctggattgcctgcaacgccgcggcttaatggtcagttttggcaactcatcaggtgcggttaccggtgtgaacttaggcattctcaatcaaaaaggctcgttgtatgtgacacgcccttccctgcaaggctatatcaccacgcgggaggaattaaccgaggccagtaatgaactgttctctttgattgccagcggtgtgattaaggtcgatgtcgccgagcagcagaaatatccgctgaaggatgcgcagcgtgcgcatgaaattctggaaagccgggcaacgcaaggttccagcctgctgattccataaaagaaatagggcttccacctgggaagccctttctttttatagttcggctgtatgtagggtacagcacgatgaatctgttagaggcgcaatagtgacagatttgattatcaattcctattttgttctaaggataaaaccttaggttgtgatcatccgcacaatcccttagtaacgccagcggtcataacgctgatatttcggcatttttggtgctttaatcgccttaataacccacaccaccgcaatcgccagtagtaaccacggcagcaacttaatcatcaatgccagcataccgccgaggaacataatggccgtcgccacaaccagcgcggcgataatgcccagcaacgaaacgccggtgaccatcagcatgacaaaaaagccaatcacaaaaagtagttccagcatgatgctctcccaaatatgaaatctcttgctggcattacaagaatcatgccaaaaataatctattgatttaacagcaaaacgccccgcgacggtgcgcagggcgtggtgaatttgactactttttggtgaaaagttaacgcttatccgccaccagtttgagcgcgtgttccagcacgttaatgtcagcacccgctttatgggcattttcacttaaataacgccgccactgccgcgcgccaggaataccctggaacaaacccagcatatgccgggtaatatggccgagatacgtcccctggctgagttcacgctcaatgtacggatacatggcgcgcactaccgccaccggatcggcatcggtatccgaggaaccaaagatctcccggtctaccgccgccagaatacccggattctgatacgcctcgcgcccgaccatcacgccatccatatgttgcaggtgtgctttggcctcttccagcgacttgataccaccgttaatcgacattgtcagatgcggaaagtcacgcttcagttgatacacacgcggataatcgagcggcgggatttcacggttttctttcgggcttaaccccgaaagccaggctttacgtgcgtggatgataaacatctcacactcgcctttgccggaaacagtgttgatgaaatcgcagagaaattcatagctgtcctggtcatcgatgccaatacgcgttttcaccgtcactggaatcgacaccacatcgcgcatcgctttcacacagtcggcaaccagctgcgcattacccatcagacacgcaccaaacatgccgttctgcacccggtcagacgggcagccgacattcaggttgatctcatcatatccacgcgcttctgccagcttcgcacactgtgccagcgccgccggatcgctaccgccgagttgcaacgctaccggatgttcttcttcactgtacgccaggtaatcacctttaccgtgaataatcgcccctgtggtcaccatttcggtatacagcaacgtattgcgggaaagcagacgcaagaaatagcggcaatgtctgtccgtccagtcgagcattggtgcaacgctaaaccgaccactccagtgaacgtcagttttttcaggcattgcgctggtttggttgattttttgcatttcagaattaccgtgcattttcaaatgtagagattattttatcgatatatcattgggttatgttattcagcatcactgttcaggaggctcaatagcggggtactataccataacaacaggaagcgcctgtctcattgcaaaagaaaattgagatcaaatcaaggcatgaagctctcacgaagtgatggaaataatcttattagccgttagccttgttaaggacaatgataaacaatccaggttcgacgataaataaaaaatcacacattaaactccggtgatatctcttcctgctaatggcactgatagaagaaaaaagaacccaataagtattaggttcttttatgtaatgccttccataccatcgaagaacttcacatattatttcgccgatttaaccccgaataaatcataaattaaattagaagtatctgtaagtattttaatcttttcctttgagtttgggtcaaacgacttagcaaagtcaattaatttcggtgcagcatctcgcattttgcttaaaatatcaggttcgagctttccttcattcaccagaagtgacattttatccagatagtcatcaaatttcatccccccccggtccgccagatgcttcatctctcccaggtacttcttcatatcacgttgagataattcttcaaactgagctgtcagatagttctcattatattcattaatattcactttttctgctccggctaaatctgtgtaggcactagaatatgaaagtgaaattaacagcgaagcaaataattttaagctgttgtcatcatgttcctggcaggcattaacaaacgttaaaaaaccagaacctattgcttgaaaatgtatattcgctaaaggttcattatccttagattcctcataaaatagctgaaccgtggagggaaggccattcttagtttctacatcaaaagtacatcgttcaatgggagtcgcatctttattatccccaggattacatatactattaatcgcgaaatgaaaaatagcccggtcaacaactgatgcaataaagtcacgatcgtttaaatcctcatcagtgcaatcgtcaatatacttattgacccacattttgagatcatttatttgctcaattaaaaacacatttttttacgtgcatgccataaattatgcgtgattcgttgaataaacaaatctatttttgcaataattatatcccgatgacgcagcgctgcataatcaatagatttaccatatatattatttaatttacctttgattgaacctctattatctaatttatctttgattgcatcttcattatcgaattgatttgaattgagtgttttattaaagtatccagttgcaccgggtattatcttcaacatgattcatctaccttttttgtcgtaccgtgtcctccttataattcttttgccatctggtcactatcaaaaatcgctcataatttctgaactacaggtatgcgtttaaacccagttaaataaatagcgagttaacttgaagcaatttatggtaatgactccaacttattgatagtgttttatgttcagataatgcccgatgactttgtcatgcagctccaccgattttgagaacgacagcgacttccgtcccagccgtgccaggtgctgcctcaga

SEQ ID NO: 42 - DNA, 65958 bp, Escherichia coli
  source 1..65958: mol_type = genomic DNA
aatccggtagcggcgtaaaaatcgcggaagggatgaaaaaaacagcgcctgacggcgctgtgtctggcatgcctgcaatccgggaaaccggaccaggaaaaaacttgcaggccataacagtatctacgcagtacctgtaatatattgaatctgcaggactttgtaggccagataaggcgttaacgccgcatcaggcattaagaaagcgcacttgtcagcaatctgagtaacgtcgaatcgattttcttaatcccacatcaattcacttccattaactctcaaacatccatgcccaacgctcgcttaccgtgaatgttgaggtcggcaagcgtaaagcgtccttcccagtttgtttcatagtcctcgcgcgggaagtcgcccggcgatgcgcctttttccagtgcggccttcaccttgtgcgcgtaggcaagatttttctcgcacatcggtgccgcaggaatgtacatcacgttgccccaaccctgttgattttcaacgggggcaacggaatggatgacgtcgcagtgccaccagacggagtctccggcctcgagttttggaatgctggttaacgcctcaattaacagtggatgccattgctctgataccggcaacactcttccgggcgctacgccgcacagttcatcctccggcacatcatcaagcagcggacgtaacagtacgtacgccatggcttcaggaatgggcacaacgtgcagcagcccctgaccaggcagcatatcagagagcgctgtccagccctggaatgtccgaaacacggaacatttggtggtgttgtccaccgtgtactcttcaacttccgtacgatgtgccgcatgccagggatcatattgcgccagattgccattaaagacgttggcgaaaacgcgctgatacgctggaagcagccagcgttccagcgccccggagtcggtatgcgctccaagacctttggaggtcgttccgggcggacggcggcggatacggtcagggtagatgacgctcacatccgggttaaaccattgctttccatcactttcaaatgtccacagacgattgagaaacgactgcgcattcgccatttcttcactctggcgggcctgcatttgcgcctgcgaccagtagatggggtaaatctcgggacgtgaagcgctgagcgtcccgaagaaattatcgccggggcctttgtagacctcgtcaaagcggttgcggtccagatagtccagcatcgactgatcccagcctagcgcttgttcgcgggggaaatggccttttatcaccgcacaaccgcgacgtttaatctgttcgcgctgatctgcagtaacatgacctgctttgatatcggcataagacagcaccggccagacggcatcgccctgtgctttgagtgcgttgatttcagccactcgcgtggcaatgtcatcgcttagctgattaaagatctgctggacgtcgccaagctgcgcccgcagcgcgtgcttcatctgacggatagctgctttgtgatcggcaggcaatgtgtcgctggtaaaagtagaagccataaccacctctcattaactttcattcgaaaccattctgatttgcatgtgacaatataagttataaataagttaatgcaagtttaatgatttgatgtgatgtacaggatgtaaaaagaagggaaaaccggagcgcacggctccggtagagaggtcagctgttaaaaggggatgtgttatccagcaccgcctgaatcacattcagcgcgccttcatgattattatcatcggtagcgtaacgggcgatttgtttaatgttttccgcagcattgcccatcgcaaaggaataacgcgccattttcagcatctccgcatcgttaccgctgtcgccaatcgctaccacattttgcggtgacagatcccagcgtttcagtaaccgcgaaataccgtttgctttatgtagaccgggaataatcaggtcgataaagccaaaaccactggtgacgggtttcataatgccatcgagcgctatgtgcagtttgtcgatcactaacgggatttgttcatctggcaggttgagcgaaaacttgaacagtacgtcgtcaatctcctgataatcttttacagctttcaggcgatggtagtgttttgccatcagtgcgacaaatgcttcgggggcattttcgctgacatatgcactttgcagaccgcaggcgacaaaattgagttgcttatcttttagcaactcgccaataacaatccgcgattcatgtcgggtcagttcgccgtggaacagttgcttgccatgtttgtaaaccagtgcgccgttttccgcgacaaaagagatctcatcctttagctcaggaaagaacgaaataagctggtaatactgattaccgctggcgacaacgaactcaatgccgcgctttttcagttcctgatattgcgccataaaacgtggttggttgtacgttttggcgtcgttaagaaaagtaccgtccatgtctgtgacgataacttttacgctcataggtgtgctcctggctcgaaaatgaaaccgtaacagtgtaataacaatgtgacgcagagcacaaattatatttcgaatgaaagtaaggatgaaattgatgatgtgaatgatttagcccggcgacgccgcagccgggccgaagagattacagcatatgttcagtacgagcgatgatatcgtcctgagcgtctggagagagcgcggtgaagaaggcggaataacccgcgacacgcactaccagatcgcggtactgatccggatgttttttcgcctccagcagcgtttcgcgggaaacgatgttgtactgaatatgccagcctttatgcacctcgaagaaggtgcgcagcaggatcatcagcttctgcttgtcagattcgttctccagcgttgccggattcagtttctggttgagcaacacgccgccgagaatcgctgccgtaggcagtttacccaccgagccaatgaccgcagtagggccgagatggtcagtaccagaggccggactagcgccttctgccagcggggtgtgggctttacgcccgtccggcgttgccatagtttgcgcgccaaacggtacgttagcggagatagatgacgtacccgcgtaatagttgccgccaaccggaccacgaccgtagcgcggattatggtactgtttcagttcgtcgatataggtctgataagcgcgagccagcagcgtatcgacagtatcatcgtcgttgccgtacttcggcgcaccgttaatcagccgctgacgcagttgctcatgagtcaggccatcgaagtcatccgccagtgcggcagccagctgttgctgaccaatcgcgccctgttcaaataccagtttcttcactgccgccaggctgttgccgaggttggcaatgccaacctgcaggccagaaacccagtcatatttcgcgccgccttgcttgatacttttcgctcgctcaatacagtcatccaccagcgccgagcagagaatatcgtgcacgttctcttccagcatggtgtcgacgacatattcgatttcgattgatttacgcgtgtaataacggatttgcgtatcccacgcgtccattacttcatcgaaattgttaaagttgcctgccgacaacgctttttcttgtggcaggaacactttgccgctggtggcatcacgcccgccttccagcgccgccagcatcacgcgggcgaagttgataaagctcatgccggtacagcgatagccccatttgccaccgacggcggtttcgatacaaccaatcgctgcgtagtcgtaagcgtcctgcggttcaataccgagtttaataaattccgggatcacgatttcgtcgttgttgaacgccggcatcccgaagccgcaacggatcacctgtacgcaggcgtcgaggaaatcattactcattcctgcatggtaacgcacgctgaggttaggctgagtggaacgcaggcgaccgcaggattcgaggatcgcgtaagagaggggattcactgcatccattggttgaccatcaaccagattttgtccgccaatggtaacgttctgatacagcggacttcccgcagaggcttttgagtgtgagccggagcggatcttgttcacttccagcagtttcagccagcagctatgtagcatctcgatggcgtgttcgcgatccagcgtctggttgagttcaacgtcgcggcgatagtacgggtagagatactggtccatacgaccaaacgataccgagtgaccgttagattcgatctgcaaaatcaattggatgaagtaacacagttgcagcgcctgccagaaagtctgcggcggctggtgggcgataagatcgcagttttctgccatcgtcagcagttcatcgcgacggctttcgcgagtttcggtagcagccatttcacgcgccagggcagcgaaacgttcaatgtgttcactgactgccaccagcacgatatcaatcgctttcaggaattgttcgccatgtaaatcttccagcaccgtcagattgatgcgcgagcgacgttccgctactttctcacgcagaccatcaagacctttttccagcagcagcgggaaattcaccgccaggtgcgcatcgccggaggtcatattgccttccgctttaatgattccggtcgccagcagacctttttgctcatcggtaaacatgccgtagcagcgatcctgtacggtctgaccgcgccaccacgggcacacttcatgcagaacgcgtttgttctcttcgctcaccgcaaagccagcaccgggacgatctgccagatcatcaatctctttttcgatccacgagacagtatattccgggaagatcggcgcggcgcgaacttcgcttgcctggttgccaatgatcaactcatcgtgtttgatccagatggtgcgattcgccaggtgatgcgccagtgccagcgcgcgacgtaccgggatcggcttatcgagatgttgttgatacatctcggtatagtgctgcgcgcgctcggtacagactggcggtttcacaatatgcaccagcgcatttttgtgcgctttaatgcggtcgctgagcgtgtccagtttcagtgtggtcatggttgttatcctcgtaaggtcgcggttaaccctttctggcaggcatactgctgggcaaagtcgagcagttctggcgcatcaagcggtttttccggggcgtcatagggcagattaagtaagtgatatttgttgatgcccagcgtgtggtagggcagaaaatgaatttcgccaacgtgcagctcgtcggcggcaaaatcggtaatggcttttacagaggtttcgtcggcattaaagccctgaatcagcggcacgcggataatgatttttttgcccgctgcggcgagttttttcaggttatccagcaccctggcggcgttaccgtcggtccactgtttaaacggcgcgtcggcaacgtgttttaaatcggcaagaaacagatcgatatagggcagagaaggggcgatatatttccacggcacatgcagacaggtttctaccgcagtatgaatgccggcctcgtggctggcttgcagtagcgccatcgccatttccggctgcataaagggttcaccacccgaaagcgttaaaccgccgccgctgcgatcataaaacggtttatcgcgcagaacggtcgtcatgatctcctcaacgcttttcacttcaccacacacggttaatgcctgtgtcggacagcagtcggttaacgccgtcagatgctccggggttaacttttcccgatgaataagcaaaccattcagcgcgcgctcaatcacttccggcgcggccttagcgcacagctcgcagccttccagacacagtcgtgcgtcatacagcagatcctgcgtgcgggcgcggctttccgggttctgacaccagcggcagcccagcgaacagcctttaagaaatacgaccgtgcggataccggggccatcatgggtcgagtagcgctgaatattgaaaatcatagttgcctctctgtttcgttcaaacattaaaatactttcgaatgaaagttagattgatgtgcgtcaactgttcagagagttttcccgtgatagtctacattcagacaaaaagtacattttgaggatggttatggaactgtatctggatacttcagacgttgttgcggtgaaggcgctgtcacgtatttttccgctggcgggtgtgaccactaacccaagcattatcgccgcgggtaaaaaaccgctggatgttgtgcttccgcaacttcatgaagcgatgggcggtcaggggcgtctgtttgcccaggtaatggctaccactgctgaagggatggtgaatgacgcacgtaaattgcgttctattattgcggatatcgtggtgaaagttccggtgaccgccgaggggctggcagctattaagatgttaaaagcggaagggattccaacgctgggaaccgcggtatatggcgcagcacaagggctgctgtcggcgctggcaggtgcggaatatgttgcgccttacgttaatcgtattgatgctcagggcggtagcggcattcagactgtgaccgacttacaccagttattgaaaatgcatgcgccgcaggcgaaagtgctggcagcgagtttcaaaaccccgcgtcaggcgctggactgcttactggcaggatgtgaatcaattacgctgccactggatgtggcacaacagatgattagctatccggcggttgatgccgctgtggcgaagtttgaacaggactggctgggagcgtttggcagaacgtcgatttaaccggacgttctgcatcctcataaattgctgatgacgtggcggagtgcaccgatgcctgccgcgcttggaaatctgtgcccgaaccgtaggccagataaggcgttcacgccgcatctggcgtctggagcaaatgcctgatgcgacgcttgtcgcgtcttatcaggcctggaggtggcaattactgcccgcacacctcacaccccggattgcgcatcagtttcatttcgcgaaactgacaggtcatcgcatcgtacatgacgattttcccgctggccggtttgccataacctgccagcagtttgatcgcttccattgcctgcaacgaaccaattacgccgatcaacggtgccatcacgcctgcttctacgcaggttaatgcgttctcgccaaacaaacggctaaggcagcgatagcacggttcgccgtcctgataagtgaagaccgtgatttgcccttccatacgaattgccgcgccggaaaccagcggcaccttcgcggcaaaacagcctgcgttcagttgattacgtaccgcaacgttatccgtacagtcgagcaccagatcgtgttcagcaatcaatgctgcaagttctgcgtcatctagcagtgcattgactggcgtaatcgcgatatgtgggttgatccgcgtcagggcgtaacgggcggattccaccttcggttgcccgaccgtggcatcactgtgcagtgtctggcgttgcagattcgagagcgaaaccgtgtcgaagtcgagcagcgtcaggttgccgacaccggcgcttgccagatactgcgaagctgcgcagccgagtccaccgaggccgactaccagcacacgagaatcttttagcgcctcctgaccgtcaaaatcaaaaccgcgcagaatgatttgccggttgtagcgcagcatctcctgatcgctgagttccgccattacaggcctccgaacaacgcgttaaacggttctacttccacccattcgcccacgtccacattgccgcgatcgcgttccagcacgataaagcagttgccgagactaaaggagctaaatatatgtgaaccctgatgtccggtggtcgtcacttcaagttcaccgtcggcgttgcgttgcagcacgccgcgctggaaatcaagacgtcctggcgtttttttcaggcgggacgctgtgcgtacgcgctggcgcgcgggcaggccgctggcggtgttgccgcttagttttgccagcaaaggctgtaccagttgatagaaggtcagcgtcgctgaaaccgggttgcccggcaggccgcagaaccagctattagaaagtttaccgaacgcgaacggtttacccggtttaatcgccagcttccagaaggcgatctcccccagctcttcaagaatggttttggtgtaatccgcttcacccactgaaacaccgccggaactgatcaccacatccgcctggctgtcggcttcaataaatgcggcgcgcagggcatgtggatcgtcgcggataatccctaagttgattacctcgcatcccaactgttctaacatcaggtgtacggcgagacggttggtatcgtagatttggccatcgcccagtggctgaccgggcaactggagttcatcaccggtagaaaaaagcgctacacgcactttacgaatcaccggaacttcggcaatccccagtgaagcaatcactggcagttcagcggtagtcaggcgagttcccgccgggaaaacaaccgcacctgcagagatatcttcaccgcgacggcgaatattttgcccgctacgcacttcagcagtaaaacgcacgccattgtccgtttgttcagtctgctcctgcatcaccactgcttcgcagccttccggcaccggcgcaccggtcataatacgaatgcaggtacccgcaggccattcaccatggtacggctgaccggcaaaggatttaccggcaacgggcagcggttgcctggaggcaatatcggctaaacgcaccgcgtagccgtccattgcggagttatcaaaccccggaacatcaagcggcgaaacgacatcgctcgccagaatacgaccaaaacactgtaccagtggcagcgtttcctgggcggtcagtggggtgacgcgagaaagcatctcattaagcgcggtgtcgagcgacatcaatccggtggtaaattccatgaaaacactcctgcggaggcaaaatcgaatttgcctattatgtcagaaaaacgccacagactgtatgccacctcgggcgtagcgttggctcctgcctttacatgccatatccatctttctatattcaaaaattgaatgagtaattcataaaaattctgatatttatagcaaaagtggcgagccacccttaatggacgaatactatgggcaaagcagtcattgcaattcatggtggcgcaggtgcaattagccgcgcgcagatgagtctgcaacaggaattacgctacattgaggcgttgtctgccattgttgaaaccgggcagaaaatgctggaagcgggcgaaagtgcgctggatgtggtgacggaagcggtgcgtctgctggaagagtgtccactgtttaacgccggaattggcgctgtctttacgcgtgatgaaacccatgaactggacgcctgtgtgatggatggtaacaccctgaaagccggtgcggtggcgggcgttagtcatctgcgtaatccggttcttgccgcccggctggtgatggagcaaagcccgcatgtgatgatgattggcgaaggggcagaaaattttgcgtttgctcgtggcatggagcgcgtctcgccggagattttctccacgcctttgcgttatgaacaactactggcagcgcgcaaggaaggggcaaccgtcctcgaccatagcggtgcgccactggatgaaaaacagaaaatgggcaccgtgggggccgtggcgttggatttagacggcaatttggcggcagccacgtccacaggcggaatgaccaataaattacccggacgagttggcgatagtcccttagtgggtgccggatgctacgccaataacgccagtgtggcggtttcttgtaccggcacgggcgaagtcttcatccgcgcgctggcggcatatgacatcgccgcgttaatggattacggcggattaagtctcgcggaagcctgcgagcgggtagtaatggaaaaactccctgcgcttggcggtagcggtggcttaatcgctatcgaccatgaagggaatgtcgcgctaccgtttaacaccgaaggaatgtatcgcgcctggggctacgcaggcgatacgccaaccaccggtatctaccgtgaaaaaggggacaccgttgccacacagtgatgaacttgatgccggtaatgtgctggcggttgaaaatctgaatattgcctttatgcaggaccagcagaaaatagctgcggtccgcaatctctcttttagtctgcaacgcggtgagacgctggcaattgttggcgaatccggctccggtaagtcagtgactgcgttggcattgatgcgcctgttggaacaggcgggcggtttagtacagtgcgataaaatgctgttgcagcggcgcagtcgcgaagtgattgaacttagcgagcagagcgctgcacaaatgcgccatgttcgcggtgcggatatggcgatgatatttcaggagccgatgacatcgctgaacccggtatttactgtgggtgaacagattgccgaatcaattcgtctgcatcagaacgccagtcgtgaagaagcgatggtcgaggcgaagcggatgctggatcaggtacgcattcctgaggcacaaaccattctttcacgttatccgcatcaactctctggcgggatgcgccagcgagtgatgattgcgatggcgctgtcatgccgcccggcggtgctgattgccgatgagccaaccaccgcgctggatgtcactattcaggcgcagatcctgcaattaatcaaagtattgcaaaaagagatgtcgatgggcgttatctttatcactcacgatatgggcgtggtggcagagattgccgatcgggtactggtgatgtatcagggcgaggcggtggaaacgggtaccgtcgaacagatttttcatgcaccgcaacatccttacacccgtgcgctgttagctgctgttccgcaacttggtgcgatgaaagggttagattatccccgacgtttcccgttgatatcgcttgaacatccagcgaaacaggcccccccatcgagcagaaaacggtggtggatggcgaacctgttttacgagtgcgtaatcttgtcacccgtttccctttgcgcagcggtttgttgaatcgcgtaacgcgggaagtgcatgccgttgagaaagtcagttttgatctctggcctggcgaaacgctatcgctggtgggcgagtctggcagcggtaaatccactaccgggcgggcgttgctgcgcctggtcgaatcgcagggcggcgaaattatctttaacggtcagagaatcgataccttgtcacccggcaaacttcaggcattgcgccgggatattcagtttatttttcaggacccttacgcttcgctggacccacgtcagaccatcggtgattcgattatcgaaccgctgcgtgtacacggtttattgccaggtaaagaagcggctgcacgcgttgcgtggttgctggagcgcgtgggcctgttacctgaacatgcctggcgttacccgcatgagttttccggcggtcagcgccagcgcatctgcattgctcgcgcgttggcattgaatccgaaagtgatcattgccgacgaagccgtctcggcgctggatgtttctattcgcgggcagattatcaacttgttgctcgatctccagcgtgatttcggcattgcgtatctgtttatctcccacgatatggccgtggtagagcggattagtcatcgtgtggcggtgatgtatctcgggcaaattgttgaaattggtccacggcgcgcggtcttcgaaaacccgcagcatccttatacgcgtaaattactggcggcagttccggtcgctgaaccgtcccgacaacgaccgcagcgtgtactgctgtcggacgatcttcccagcaatattcatctgcgtggcgaagaggtggcagccgtctcgttgcaatgcgtcgggccggggcattacgtcgcacaaccacaatcagaatacgcattcatgcgtagataacattcaggcggagaataaaatggcaagagctgtacaccgtagtgggttagtggcgctgggcattgcgacagcgttgatggcatcttgtgcattcgctgccaaagatgtggtggtggcggtaggatcgaatttcaccacgctcgatccgtatgacgcgaatgacacgttatctcaggccgtagcgaaatcgttttaccaggggctgttcggtctggataaagagatgaaactgaaaaacgtgctggcggagagttataccgtttccgatgacggcattacttacaccgtgaaattgcgggaaggcattaaattccaggatggcaccgatttcaacgccgcggcggtgaaagcgaatctggaccgggccagcgatccggcgaatcatcttaaacgctataacctgtataagaatattgccaaaacggaggcgatcgatccaacaacagtaaagattaccctcaaacagccgttctcagcgtttattaatattcttgcccatccggcgaccgcgatgatttcaccggcagcgctggaaaaatatggcaaggagattggttttcatccggtgggaaccggaccgtatgaactggatacctggaatcagaccgattttgtgaaggtgaaaaaattcgcgggttactggcagccaggattgcccaaactggacagcataacctggcgtccggtggcggataacaacacccgcgcggcaatgctgcaaaccggtgaagcgcagtttgctttccccattccctacgagcaggccacactgctggagaaaaacaaaaatatcgagttgatggccagtccgtcaattatgcagcgttatatcagtatgaacgtgacgcaaaagccgttcgataacccgaaggtccgtgaggcgctgaattacgccattaaccgtccggcgctggtgaaagttgcctttgcgggctatgcaacgccagctactggtgtggtaccgccaagtatcgcctacgcgcaaagttataaaccgtggccttacgatccagtgaaagcgcgcgaattactgaaagaggcgggatatcccaacggtttcagtaccacgctgtggtcgtcacataaccacagcaccgcgcagaaagtgctgcaatttacccagcagcagttagcgcaggtcgggattaaagcccaggtgaccgcgatggatgccggacagcgggcggcagaagttgaaggtaaagggcaaaaagagagcggcgtgcggatgttctacactggctggtcggcttcaaccggcgaagcggactgggcgctatcgccactgttcgcctcgcaaaactggccaccgacgctgtttaataccgcattttacagcaataaacaggtggacgacttcctggctcaggcactgaaaactaatgatccggcggaaaagacccgcttgtataaggcggcgcaggatatcatctggcaagagtcgccgtggatcccgctggtggtagaaaaactggtgtcggcacacagtaaaaacctgaccggtttttggatcatgccagacaccggcttcagctttgaagacgcggatttgcaataagcaacgcagggagtggaatgcttaattacgttatcaaacgcttactggggttgattccgacgctgtttatcgtctcggtgctggtgtttttatttgtgcatatgctgcccggcgatccggcgcgattgattgccgggcccgaagctgatgcgcaggttatagaactggtgcgtcagcagctggggttggatcagccgctgtatcaccagttctggcactatatcagcaatgctgtgcagggggattttggcctgtcgatggtgtcgcgtcgtccggttgccgatgagattgccagctgctttatgccaacgctgtggctgaccataaccagtatggtctgggcggtgatatttggtatggcggcgggaattatcgccgccgtctggcgtaatcgttggccggatcgattgagtatgaccattgcggtgtcggggatctcgtttccggcatttgcgctggggatgcttttaattcaggtattctccgttgaactgggctggctgcctaccgtgggagcagacagttggcagcactacattttaccctccctgacgctcggcgcggcagtggcagccgtgatggcgcgctttacccgcgcgtcgtttgtcgatgttttaagcgaagattatatgcgtaccgcgagggcgaaaggggtgagcgaaacctgggttgtcctcaaacacgggctacgtaacgcgatgatcccggtagtgaccatgatgggcttacagtttggctttttgctcggtggttctatcgtggtggagaaagttttcaactggcccggacttggacgcttactcgttgactccgtagaaatgcgcgattacccggtgattcaggcggaaattctgcttttctcgctggaatttattcttatcaacttagtggtggatgtgctttacgccgccattaacccggctatcaggtacaagtaaggatgcgactatttaactggcgacgtcaggcggtgttaaacgccatgccactggtcaaacctgaccaggtgcgtacaccgtggcatgaattctggcgacgatttcgccgtcagcatatggcgatgaccgccgcattattcgttattttattgattgtggtggccatttttgcacgctggatcgctccctatgacgccgaaaattattttgattatgacaatctgaataacggaccttctttgcagcactggtttggcgtcgattcactggggcgcgacattttcagccgtgtcctggttggtgcgcaaatctcgctggcggcgggcgtgtttgccgtgtttatcggtgcggcgatcgggacgttgctgggcttgttggctggatattatgaaggctggtgggatcggttgatcatgcgcatttgcgatgtgctgtttgccttcccgggtattttactggcgatcgctgttgttgcggtgttgggaagcggcattgctaacgtgattatcgcagtcgccattttttccatccccgcgtttgcccgcctggtgcgcggcaacacgctggtgttgaaacagcaaacctttattgagtcagcacgcagtattggtgccagcgatatgaccattttattgcgtcatatcttgcctgggaccgtctcgtctatcgtggtgtttttcaccatgcgcattggcacctcgattatctctgccgccagcctgtcatttctcggcctcggtgcgcagccgccgacaccagagtggggagcaatgctcaatgaggcacgagcggatatggttatcgcgccgcatgtcgctgtttttccggccctggctatttttctgaccgtactggcgttcaatttgttgggcgatggtttacgcgatgcgctggatccgaaaattaaaggatagttacgtttgaatattgcttgaaagggtaatcacctcacaggcaattattgccctaagcaagtgttgtaactttctgctgattttgtagaatcgggtaatttggttaaaaagccgcagcaagggactatttttgcagcggcacagcgttcagatagttattttgttaaatgtattaacatgctgagtttatacgaaaagataaagataaggctgataattttatttttattggcagcactgtcatttattggtctttttttcatcattaactatcaactggtatcggaacgcgcggtaaaacgtgccgatagccgctttgaacttattcagaaaaacgttggctatttctttaaagatattgaacgttcggccctgacattaaaggactcactgtatttattaaaaaatacagaggagattcaacgcgccgtgattctgaaaatggaaatgatgccatttttagactcggtgggactggtacttgatgataataaatattatctcttttcgcggagggcgaatgataaaatcgttgtttatcatcaggaacaagtaaatggaccgcttgtcgacgagtcagggcgggttatttttgccgattttaacccatcgaaacgaccgtggtcggtggcttcagatgactctaacaacagctggaatccggcatacaattgctttgatcgtccgggtaaaaaatgtatctcttttacgctacgtatcaacggcaaagatcacgatttgttagcggtagataaaattcatgtcgatttaaactggcggtatctgaacgagtatcttgatcaaatcagcgctaatgatgaagttctatttttgaaacaaggtcatgagatcattgccaagaatcaactcgctcgtgaaaaactgattatttataatagcgaaggtaattataatattattgattctgtcgatacggagtatattgcaaagacatcagcagtgccaaataatgcattgttcgaaatctatttttattatcctggcggtaatttattgaacgcatcagataaacttttttatctaccgtttgcgttcattattatcgtgttgctggtggtatatttcatgaccactcgtgtgttccgtcggcaattttctgaaatgaccgagctggttaatacgctggcgtttttgcccgactcaacggatcagatcgaggctctgaaaattcgcgaaggcgatgcgaaagagattatcagcatcaaaaattcgatcgcggaaatgaaagatgccgaaattgaacggtcaaataaattgctctcactgatctcttacgatcaggaaagcggttttattaaaaatatggcgattattgagtccaacaataatcagtatctggctgtggggatcatcaaactgtgtggtctggaagccgtggaagcggtgtttggtgttgatgaacgcaataaaatcgtcaggaaattgtgtcagcgaattgccgagaaatatgcgcaatgctgcgatatcgtgacattcaatgccgatctctatttacttctgtgtcgggaaaatgtacagacatttacccgtaaaatagcgatggtaaacgattttgacagcagctttggctaccgcaatctgcgcatccataagtctgccatttgtgaacctttgcagggggaaaacgcctggagttacgcagaaaaactgaaactggcgatttccagtatccgtgaccatatgttctccgagtttattttctgtgatgacgcgaaactcaacgaaatagaagagaatatctggattgcgcgtaatattcgccatgcaatggaaattggcgaactattcctcgtctatcaaccgatcgttgatattaacacccgcgccattctgggcgcggaggcgttgtgccgttgggtttctgcggagcgggggatcatttcaccgctgaagttcattaccattgctgaagatatcgggtttatcaatgagctgggttatcagattattaaaacggcaatgggtgaattcagacattttagtcagcgtgcgtcgctgaaggatgatttcttactgcatattaatgtttcgccctggcagttaaacgaaccgcactttcatgagcgttttaccaccatcatgaaagaaaatggcctgaaggcgaacagcctctgtgttgagatcactgaaatcgtgatcgagcgaattaatgaacatttttatctcaatattgaacaactgcgtaaacaaggggtacggatatcgattgatgactttggcaccggtttgtcaaacctgaaacgtttttatgaaattaatccagacagcataaaggtggactcgcaatttaccggcgatattttcggtactgcgggaaaaattgtgcgcattattttcgatctggcacgctataaccggatcccagtgattgcggaaggcgtagagagcgaagacgttgcgcgcgaattaattaaattaggatgtgttcaggctcaggggtatctgtaccagaaacccatgccattctccgcctgggataaaagtggaaaattagtaaaagagtagtttacgtatgtccagaatcaataagttcgtacttacagtcagtctgctgatttttatcatgatttcagcagttgcctgcgggatctacactcaaatggtaaaggaacgggtgtatagcctgaaacagtccgttattgatactgcttttgcggtggcaaatattgctgaatatcggcgtagcgtggcaattgatcttatcaacacgctaaatcccacggaggaacagctgttggttggtttgcgcacagcttacgccgactcggtttccccctcttatttgtacgatgtcggtccttatctgatttccagtgacgaatgtattcaggtaaaggagttcgagaaaaattattgtgcagatattatgcaggttgtgaagtatcgacatgtcaaaaatacagggtttatctcttttgacggtaaaaccttcgtctattacctctatccggtaactcacaatcgtagtctgatatttttgcttggtctggagcgtttttctttactgtcaaaatcgctggcgatggacagcgagaacctgatgttctctctatttaagaacggtaaaccggtgaccggtgatgaatataatgctaaaaacgccatcttcaccgtttcggaagcgatggagcacttcgcctatttgccgaccggattgtatgtatttgcgtataaaaaagatgtttatttgcgggtttgtacattgattattttctttgccgcattggtggcagtgatatcgggtgccagttgcctctatctggtacgcagagtgattaatcgtggtattgtggagaaagaagccatcattaataaccattttgaacgcgtactggatggcgggcttttcttttcggctgccgatgtcaaaaaactctacagtatgtataactcggcgttcctggacgacctgaccaaagcaatgggcagaaaatcctttgacgaagatttaaaagcgctgccggaaaaaggcggttatttgtgcctgtttgacgtcgataaattcaaaaacattaacgacaccttcggtcatttgctgggcgatgaagtgttgatgaaagtggtgaaaatccttaaatcacagatcccggtagataaaggtaaaatctaccgcttcggcggtgacgaatttgcggtgatttatacgggtggaacgctggaagagttgctatcgattctaaaagaaatcgttcatttccaggtgggaagcattaatttaagtaccagtatcggtgtagcgcattcaaatgaatgtaccaccgtcgaacgcttgaaaatgctggcggatgagcggctgtataagagtaagaaaaacggcagggctcagattagctggcagtaatcattattcgcaggccggacaaatgattttgcccggcctgaattaattaaacccggctaccccacaaatcgtactcatcggcgtgctcgactttcacacgcaggatatcacccggcttaacgttggtttcaccattgagataaaccgcgccgtcgatttccggtgcatctgccatgctgcgaccaatcgcgccttcttcgtccacttcgtcgataatcaccagaatttcacggcccactttctcttgcaggcgctcggcggaaatctgctgctgcagctgcatgaaacggttccagcgttcttctttaacttcttccggaacctggtcaggcagggcattggcgtctgcaccttcaaccgggctgtatttaaagcagccaacgcgatccagacgcgcttctttcaggaagtcgagtagcatctggaaatcttcttctgtctcgccagggaagccgacaataaaggttgagcgtagggtcagttccgggcagatttcgcgccactgtttgatgcgcgccagttggcgatctacagaacccggacgcttcatcagtttgagaatgcgcgggctggcgtgctgcaacggaatgtccagatacggcaggattttgccttctgccatcagtgggatgacgtcgtccacatgcggataagggtaaacgtagtgcagacgtgtccagatccccagtttcgataactgttcgcacaggctgaccatgctggtttttaccggctcgccgttgtggaagccagtacgatgtttaacatcaacgccataggcggaagtatcctgcgagatcaccagaatctctttaacgcccgcatctaccagacgtttcgcttcacttaacacttcgccaatcggacggctcaccaggtcgccgcgcatagacggaataatgcagaaggtgcagcggtgattacagccttccgaaattttcagataggcataatgacgcggcgtcagtttcacaccttgttctggcaccaggctcaggaatgggttgtgtttcggttttggcacgtagtgatgaacgtgctccagaacctgctcatagctatgaggcccggtgatttccagcactttcgggtggacttcgcggatctgatcttcttttgcccccagacaaccggtcacaattaccttgccgttttcattcaacgcttcaccaatggcttccagtgattcttgtaccgcgctgtcaataaagccgcaggtgttgacgatcaccatgtccgcatcgtcatagctcggtaccacgtcataaccttcagtgcgaagttcggtgagaatacgctctgaatcaacaaggttttttgggcagccaagggaaacaaagccgattttcggctggggagttactttgctcatagcttaaaaaatattcagttacaggaaaggtcagggcagggattctacagagttctggataaaatttgtatcgcaatctcattcgctggcggaggcgaaggaaatgtaaattttgttaattcggcgtgaagaattgatcctggacagcattttgctcaaaaaatagccatactatttaattgcaacaaggctggaaagaggaggatcgaagtatgttcgttgacagacagcgaatcgatctgctgaaccggttgatcgacgcacgcgttgacctcgctgcatacgtgcaactgaggaaggcaaaaggatacatgtccgtcagcgaaagcaatcatctacgagataacttttttaaactgaatcgcgaactgcacgataaatcgctgcggttgaatcttcatctggatcaggaagagtggagtgctcttcatcatgctgaagaagcattagcgacagccgcagtatgtttgatgagtgggcaccatgattgcccgactgttattaccgtcaacgccgataagcttgaaaattgtctgatgagcttaacgctgagtatccagagcctgcagaagcacgccatgcttgagaaggcctgaaaactaagggggagaaagcgtctcccccttcatgtttaagtttttgtaaaaatgaatttgttatctcctccactgactacgctttaagccagagtcaatccggaggcgttatgcatcgacaatcctttttccttgtgccccttatttgtctttcttccgctctctgggcggctcctgcaacggtaaatgtcgaagtactgcaagacaaactcgaccatccctgggcactggcctttttacccgataatcacggtatgttaatcactctgcgcggcggcgagttgcgtcactggcaagcaggaaaaggattatctgcgccgctttccggagttccggacgtttgggcgcacgggcagggcggcctgctggacgtggttttagcgcctgattttgctcagtctcgccgcatctggttaagttattccgaagttggcgatgatggcaaagccggaactgctgtgggttatggccgcttaagtgatgatctctcaaaagtgaccgacttccgcaccgtcttccgccagatgccaaaactgtctaccggcaaccattttggcgggcggctggtattcgacggtaaaggttatctttttattgctctgggcgaaaacaatcagcgcccgacggcgcaggatctggataaattacagggcaaactggtgcgtctgaccgaccagggcgaaatcccggatgataatccttttataaaggaatccggtgtgcgcgccgagatctggtcttatggcattcgtaatccgcaaggaatggcgatgaatccgtggagtaatgcactgtggctgaatgaacatggcccgcgcggtggtgatgaaattaatatcccgcaaaaaggcaaaaactacggctggccgctggcaacctggggaatcaactattcaggctttaagataccggaagcgaaaggggagatcgtcgccgggaccgagcaacctgttttttactggaaagattcgcccgctgtgagcggcatggccttctataacagcgataaattcccccagtggcagcaaaaattatttattggcgcgctgaaagataaagatgtcattgtgatgagcgtcaacggcgacaaagtgacagaagatggccgtattttaacggacagagggcagcgaattcgtgatgttcgcactggacccgacggttatttatacgttctcaccgacgagtccagtggggaattacttaaagttagcccacgcaattagctaacgggaatcatcaccactttgcgcactgcggggcgttcagtgagttgctgataccagcgttgcagatttggacgcggtgtccaggtcaggccaacgttaaacaaattgtagatgaacggtgcgatagcgatatcgcccacaccaaactcgtcgccagagaaccattttacttttgccagttccgcatcgagcagggcaaacagggcgtcgcactctttgcaactggcatcaatggcggcctgatcgcgctcttccggtggtgttctgactaatcccatcaggatcccgcgatgagcattactgagcgtctggtttgcccagtccatccatttttccgcttccgcacgacgtgccggtgagtcgatccacagacgtttttgcccgtactgtgccgccagatagcggacaatggcgtttgattcccaaagaatgagatcactttcgtcgtcacgcaacaacggcaccagcccgttagggttcatcgccagaaaatcagcatcgtgatttatcccaaactcacggcccgcgagaatttgctcataaggtagttccagttcttcgagcgtcagcaatactttttttacgttggttgaattattccgaccccacagcgtaatcatactcaccccttttccgacaggcagccacaggctgaacaggactccgatggtgaagtaaagttaacttttaagcaacagctggcaaaaaaatgacaccagaagcagcgaagcggcaggatattgcataaactttaaaaactttaccaacttacggtttctttaagtttgtgtgtgcgttattaatcaccgaacttatcatacggcgatataacgtattttttttgaatggatactcgggtggcatttatgacgcaatactcctctctccttcgtggtcttgcagcgggttctgcatttttattcctttttgccccaacggcattcgcggcggaacaaaccgttgaagcgccgagcgtggatgcgcgtgcatggattttaatggattacgccagcggtaaagtgctggcagaaggcaacgcggatgagaaactggatcccgcgagcctgactaaaatcatgaccagctatgtggttgggcaggcgcttaaggccgataagattaaactcaccgatatggtgacggtcggtaaagatgcctgggcgacgggaaatccggcactgcgtggttcatcggtaatgttcctcaaaccgggcgatcaggtttcggtggcagacttgaacaaaggtgtgattatccagtccggtaatgacgcctgtattgcgctggccgattacgttgccgggagccaggagtcattcattggtttgatgaatggttatgccaaaaaactgggtctgaccaacactaccttccagacggtgcacggtctggatgcgccggggcagttcagtaccgcgcgcgatatggcattgctgggtaaagcattgatccacgatgtgccggaagagtacgccattcataaagagaaagagttcaccttcaacaaaattcgtcagcctaaccgtaaccgtctgctgtggagcagcaatctgaatgttgatggcatgaagacaggaaccacggcaggcgcgggatataatctggttgcttcggctacccagggcgatatgcgtttaatctccgtagtgctgggggcgaaaactgaccgtatccgttttaatgagtctgagaaattattgacctggggtttccgcttctttgaaaccgtgacgccaattaaacctgatgccacctttgtgactcagcgcgtctggtttggtgataagagcgaagtgaatcttggggcaggcgaagcgggctcagtgaccataccgcgtgggcagctgaaaaacctgaaggcgagctacacgttaacggaaccgcagcttaccgcaccgctgaaaaaaggtcaggttgtcgggaccattgatttccagcttaacggtaaatccattgagcagcgtccgctgatcgtgatggaaaatgtggaagagggcggattctttggtcggatgtgggatttcgtgatgatgaaattccatcagtggttcagcagctggttctcttaatcttctgataaccggatggcgcgaaacgtcatccggttatacgtcattaatacatcaacttaatacggtgcgtctgcgcgtacttcacatactcatcttccgggcaacaatcactcaccacaatatcaaagcgtttcaggtcacccatgcgcgccggacgcaccttgccaaatttactgtggtcgacaaccagcacatgcttttgcgccatcgacatggcccagtgttttaccggcaactcttcaagattaaaacaggtagcgcctttactgacatgcacgcccgccgcggaataaaaagcgatatccgggcaaaaattattcaacgtttgctgaaaatcgatgggtttgaaaatggcgttgctggcgtgaaattcaccaccgcacagaaatgcgcggcaatggggtttctctttcagcgccagaaaggtatttagcgaataacaaacggcggtaaaagggatttcattatcaatcgcttcaataatccacggcgtggtggtgccacagtcaaaaaagagagtctgatcgggttctaccagtgtcgcagccatttttgccgcccggcgtttttcttccaccaggcgggatttttgatcgcttaacaggtaatggctggcactgcgcggttccagaacaatatagccgccgagcaaaacgacgggcgcactgtggttgttcagatcgcgacgaatcgtcatctccgaaaccccaagcagggcggcggcgtctttaagatgtaacttatcgctgcgttttaattcttgcagcagctgcccgatacgctcttcgcgacgtgtttccataatccctctgaatagttattgaagcgagccgctcaatactacactttttagcagagatcagtcacgcacccagcctttgcggatcggtaatgcaaaacagaagcgataccacgattgcagacgttgatagagtttatgccccatcgcttgccagataatctgagcgctaaggcagccaatcatacctgccagcaatccaccgagcatatccagcggccagtgcacgccaagataaacgcgcgaccaggcaatgacgacggccagcaccattaaaagtgagccggaccacaggcgatgccagcataaaaatgccagtgcaaaggtgaaaatcaccgtaccgtggtcgcttgggaatgagtcatccgccgcatgatgcaggaagttatagccgatattttcgacaaagggtcggtcgtgcggaaaaagatgtcccatcgtccaggacacaaacaggctgaccgccagcgcgatagcgatttttatcaccagttgccgttgtgctgtaagcccccacaaccaaagcaccgcggccagcagcggtaccacggtaatcaaatctttagcaataaaaatcgccaacgagatcatccacggagccgagtctggcgtcgcgttaataagagagaatagagagagattcaaattttccagcataacttcccgacgcaaagtgattaaaagggagccaatacaggcaagtcgttgagaataaagtgcaggttaaactgggtaaagcggcatcgtcttatttccctcaagcggcctgtttacggtgggtaattgtaacgggcataggttaaataaaacttaaagaaagcgtagctatactcgcaataatgtaagaatgtgcttaaccgtggtttcagctacaaaattcgctttctcgttagctgtgcttttattaaactctgcgcgattattattggcgaagaaattgcatgcaaaataaattagcttccggtgccaggcttggacgtcaggcgttacttttccctctctgtctggtgctttacgaattttcaacctatatcggcaacgatatgattcaacccggtatgttggccgtggtggaacaatatcaggcggtcattgattgggttcctacttcaatgaccgcatatctggcgggcgggatgtttttacaatggctcctggggccgctgtcggatcgtattggtcgccgtccggtgatgctggcgggggtggtgtggtttatcatcacctgtctggcaatattactggcgcaaaacattgaacaattcactctgttgcgcttcttgcagggcataagcctctgtttcattggcgctgtgggatacgccgcaattcaggaatccttcgaagaggcggtttgtatcaagatcaccgcgctgatggcgaacgtggcgctgattgctccgctacttggtccgctggtgggcgcggcgtggatccatgtgctgccctgggaagggatgtttgtcttgtttgccgcattggcagcgatctcctttttcggtctgcaacaagccatgcctgaaaccgccacgcgtataggcgagaaactgtcactgaaagaactcggtcgtgactataagctggtgctgaagaacggccgctttgtggcgggggcgctggcgctgggattcgttagcctgccattgctggcgtggatcgcccagtcgccgattatcatcattaccggcgagcagttgagcagctatgaatatggcttgctgcaagtgcctattttcggggcgttaattgcgggtaacttgttgttagcgcgtttgacctcgcgccgcaccgtacgttcgctgataattatgggcggctggccgattatgattggtctgttggtcgctgctgcggcaacggttatctcatcgcacgcgtatttatggatgaccgccgggttaagtatttatgctttcggcattggtctggcgaatgcgggactggtgcgattaaccctgtttgccagcgatatgagtaaaggtacggtttctgcggcgatgggaatgctgcaaatgctgatctttaccgtcggtattgaaatcagcaaacatgcctggctgaacgggggcaacggactgtttaatctcttcaaccttgtcaacggaattttgtggttgtcgctgatggttatctttttaaaagataaacagatgggaaattcgcacgaagggtaaaaaatgcctgattgctttgtgcgatcaggcattcccgaattaatggtgatggtcgtcaatctggtgttcgataaccatcccttcacctacgctggcaagatggcgaacataaggatgcgggcggtaagccggagctggcgcaggagccacatagacggtttgcggcacagtcgcgacgctgaccgcttgtggaacgctgactgaatcaggaaccacaaccactttgtatccactcggcacatcgacggtgacactttgcgccatcgccacaccagtaaagcccattaaaagcgcgcccaacagtagacaatttttcataaacatttcgcctgaaataatgcagcgggttaatttccgcgaattatgcagccttcattcaggtattgtgttgccgggcgtgctgccgtttttattggtcaaatggcgcttcgtgtttaagcactttatcgatcacatccagtacgccttcacggttattggagcctgcccggtattttgccgctgcgacgaccgcattgccggcattttccattgcaaaactaaagcctgcctgacgcagcatctcaatatcgttaccgccatcgccaaagaccaccacttcgctgtcgtctattccccataatttctgcagttggcgaaggccattggctttatgtacgccggggataatcagatcgatgctgccgttgccggtgtggaccggcaccataatatcgccgatggcctcatgtaatgctttttgtacttgtggaatcagttcatcggaaagattcaggccaaacttaaagaagatatcctctaagttgtcaaagttatcgacgtattccagacggtgataatacatttccgccaccgttttcatggcatcgtcatattttttgagcgtataggcgctattttttccgcaggcaataatttccacttccgggcgcgtcagcaaatgttccacgacagtagcaaacgcatccttcgacagctcgccattaaaaacatctttgccttcactcactacccagccgccgttttcagccacaaaggcaatttcattcgcaatttcagggaagaaagagatcaactgataatattgattcccgctggcgactacaaagcgaattccttgtgctttcatttgctgatactgagccataaaccgctcacggttataggttttttgatcgcttaagaaagtaccatccatgtctaccgcaattaatttaatgctcatcaactattctccatcgccgtctgcgttttggtatcgggtttggcgacggctttcgcgacaatagccgcgagaataaccagcgccagtacaaccagcattgcactacgtaatccataatgttcgccgagatagcccagcagcggcggcccgacgaggaaagccagataaccggtcgttgctaccacactgacgcgggttggtgcatcggggccggtatcgctggcggcagaaatggtcagcgggaagcccagcgaggcacccagtccccagagtacaacagacaccccagcgacccaggcgctatcgacaaaaataatcagcccaatacccaacgcccccattagtgcactggcccgaaccacggcaacgcgactgtaacggtcgatgaaccaaccgccggtgaagcgtccaacggtcatccccagggtaaaaccggcataaatcagcgagccggaagtagggctaaaaccgtgaccgtcaaccattaataagggtaaccagtcgttggcagaaccttcggcaaaggccatcgccagcaccacaacacctatcagcagcaactggatatcgcgataaaaaggaatgcctttttcgccatgctgggtgccatcggcagcatttttgcccgtaccgtcagggattgcctgaatggcgatataaataggcgcgatacctaccagcgccgccaataaaatgtgcaccgttgccggaacgccaaaggccgtcagtgccatcccgacaccagcgcctgccagcgtgcccaggctataaaaaccgtgcatcattggcaaaaccgttttattcatttctcgctcaacggcggcaccttcaacgtttatcgccacttccgcagaaccaaaacttgccccaaagacgccgagaccaacggcaaagagcaggggcgatgtcagccagagtgccagacttaatatcatcatcccgatcaatgcgcaggacatcgtgaccaggatgacattacgcgtgccaaagcgtttcactaaccacgccgagcagagaataccgctcatcgaaccgatcgacagaccaaagagaacaccgcccatttcagcgatcgagacagagagaatatcgcggatagcaggcgtacgggttgcccaggacgccattaacaggcctggcaaaaagaagaacataaacagcgcccaggttcggcgtttcaatgcattacgtgaagaatttacggtcatagatcacgtcaaaataagaagagggaagacaacattagcaaggttgtgtacatttgtacacaattgcagagagaggaaatgacatgcgtcgcgctaacgatccgcaacggcgagaaaaaattatccaggccacgctggaggcggtgaaactttacggaatacatgctgttacgcaccgcaaaattgctacccttgccggggtaccgttgggatcgatgacctactatttttcaggaattgatgagttgttgctggaggcgttcagcagttttactgagattatgtcccggcaatatcaggcattttttagcgatgttagtgatgctcaaggcgcatgccaggctatcaccgatatgatctacagctcacaggttgcaacgccggataatatggagctgatgtaccagctctacgcgctggctagccgaaaaccgctattaaaaacggtaatgcaaaactggatgcagcgcagtcagcaaacgctcgaacaatggtttgaacccggaaccgcccgcgcgcttgatgcgtttattgaggggatgacgctgcattttgtcaccgaccgtaagccgctatcgcgcgaggagattttgaggatggttgagagggttgcagggtagtagataagttttagataacaaaaaacccatttatgtaaatgggttaatgaaaacaataagttagagtaaaaacaataagttgggttggtggtcagtggtggttattacggggtaatgccaaccgctgccgccactttgtcgccacttgttttaccttagacgccaggggcctctatcttcaatctgttcgactaacccctcctcttctagttcacgcaatagtgcaacaacccaatattgttggttcgaacttgttgctttccgtttttctccccaatcgaggccgcttagacgaaatacctcagcttgcttaacgccgttgccgtttttttgggcatctgggtgagttttaagtacggataaagccaattctttggctctgttgcgcaattccgctccctgatgctgaaacttattcattgatagtgctccatgtgaaaaaaaagaatattagctcaacagggcaaaatacgcattttcaaaaacttgctattgatgttggtagtgttgccagcggattaaaccgtaatgcagtttccaggtgatccggtgccagatgtgcgtaacgcatagtcatttttatatcgtgatgcccgagaattttttgtaaggccaggatatttccacccgacatcatgaagtgcgccgcaaacgtatggcgcagaacgtgtgtcagttgaccgcgagggagcacgatagacgttttttccatcacggataaaaattgaaaatagcagtctgtaaagaaattgaacccatcaagcgccatgatctcttcgtaaagctctttactgatagggatgcttctgtttttcttccccttcgttcttacaaaggtaattcggtatttggtcacctgtgagcgggtaagatttacggcttcacgccaacgtgcgcctgtgcttaagcatatcttaactaccagtgccagaattgggtcctgacgtttgcaatcagccagcaattcaacaatctgctcatgggtaagccatgccatctctttttctgcgatggtgaattttcgcatgttctccagtgggttcggatacgaccattcgcccaggcgggatagttcgctaaaaacactacttagatagctttgctccaggttaatggtgaccgggcttgctcctttcttccatttctcgctgaagtagatctcacctgtcaggcgtttatctcgatagtgggcaaacattttagatgtgagatcagttgcaaggggattgcccagagcgtcaaccatcagcagcaatttgtcatagacatgctgcccagcagtcagtgatttaccatgtagtttgaaccatagctcaaccacgtctttcagtgttcgacgatccactgattcacccagccagggctttgcttcggtttcttccatcgtgtgacgctcaaaagccagtgcttcgcctttggtggcgaattgtttacgcacacgacgcccactacgtccggcggggtaacattcgcaaagccattttcctgtggtgagttttcgtacagccataaaaaatgccctccaatagagagcatttttactgtatgtataaccagtgtcaatgtatgaaatcctgcgaccatacatctcactgaagccataatgaagtaggctattctttttgctatgtgagcatgtaacttttgcggttaacctgtggctcatttttattttaggcgcagatataaaagcaaaagttatcgtgagtttttagtacagatttttttggatttactaatagttccatcattgcaaacgaatttgccatcagaggtacagtgagaaacacctccctttttccctgagcagggataatttctagcataggtagctagtgggtttaataacaaagaacatgacaaaaccacaaaaaataccttaccaagcataatttcctcccggtactatttaacatacttgactgttaaacttataattttaccaattatttcaatgtcttctatcttgcattcgaaggctctgtttccaccctcgacgaagattcttccaccgggtaaacgagtaatgtcacggatcgttatttcgccatcaatacttattacccatttaccatcacgtatatcatcaaattccttatcacaaataaattcagaattattatctgtgattacaaaaagattcttgaatgccgacggtagaaattctctatcgaaaatataaaaaccgtcttcacacaaggccccatcagataatacatatttagcaacttccatagtatttgtattacctgaagtttgctttgaaccatgcccggttgtgagccaattaagcgaggtgcctgtttcaagggcgcactggattacccattctgctgggaatgagtcacgcatgtagcgtgtggcgagtgtacttttagagattcctaaatgatcgcacaacgcctgtcgagtcttgaatccataagcttctaccatgcgctctatagcgcctcgtccgcctttctccaaattcatggtcactccaagtgaacttttatcttgacgatttcactgtgcgatcgtatgtttatggtgttcacaaaatacaaacgatccgtattcgtcctgattaatcatcattaaacgaggaatgttgcatcatgagacctaacatttcaatcactcttaccacgcctcatgtgactattgaacgctatagcgagctgacagggctatccatcgataccatcaatgacatgttggctgatggacgccttatccgtcaccgtctgcgcaaagataaaaaacgcgaaaaagtgatgatcaacatagcagcaatgaccgttgatgcgctttcagaatgcaatctaaaccttaattagttcgattctgagatacatcagaggcattgaccatgtttgattaccaagtttccaaacatccacattttgatgaagcctgtcgtgcattcgcattgcgccacaacctggtgcaactggcagaacgtgctggcatgaatgtgcagattctgcggaacaagctgaacccagctcaacctcatttattaaccgcaccagaaatctggctgcttaccgatctgactgaagattcaacgctggtagatggttttctggcacagattcattgtctgccatgtgtaccgattaatgaggtggcaaaagagaaactgccacattacgtcatgagtgcaaccgcagagatcgggcgtgttgctgcaggtgcggtatctggcgatgtaaaaacctgtgccggtcgtcgtgatgctatcagcagcattaactctgtaacacgactgatggcgctggcggctgtttcattgcaggcccgtttacaggctaatcctgcgatggcgagtgcagttgataccgtgactggcctcggtgcttcattcggtttgctgtgaggtgcttatgctgacgaaagaaccatcatttgcatcgctgctggtaaaacaaagcccggcaatgcactacggtcacggctggatcatgggtgaggatggtaaacgctggcatccgtgccgttcacaagatgaattgctggcagaactatctacgaaaaaacgggggaacaaatggctattgaaggcactgcggcgactgttccattaagccccggtgaacgcctgaatggacttaatcacattgcggaattaagggcgaaagtttttggcctgaatattgagtcagagcttgagcggtttattaaagatatgcgtgatccatgggatatcaataatgaacaaaataaaagggcactggctgccatattctttatggcaaaaattccagctgaacgtcatagcatcagcattaatgagctgaccactgacgaaaagcgggagttgattaaagcaatgaatcattttcgtgcagtggtgagcttatttcccagacggctaaccatgccgaattaaccaactaatgaaattaatggcgtaaacccgccgggcatccctttatctaaattcaggagaattgattatgcgtaatattgaaaccctcacgactaaaactggaccggatgacgcagggcttaatattttactgacagaggctcgtctggaagaacgccgggcaagggctgaagcaatggcagctcgccttgatagcctggcgtgtcatatcacatcccgccagctaaaccacgtcgaagcagcagaactgctgcgtgtgaccgctgaagcaatccagagcgaagcgcaggagatccactaatggctgatgcaatggatctcgtacagcagcgcgttgaagaagaacgccagcgccatatccgtgctgcccgtgccaaaacaccgggcgtgtctcgcgtgctttgtattgaatgtgaagcgccaattccgccagcacgccgccgtgccattcctggagtgcagctttgcattacctgtcaggaaatcgcagagctgaaaggcaaacattacaacggaggtgttgtatgagcaccatcctgaaatgggcgggaaataaaaccgccattatgtccgaactgaaaaaacatcttcctgctggcccgcgactggttgaacctttcgcggggtcctgtgctgtgatgatggagacggattatcccagctatctggttgcggatattaatcctgatttaatcaacctctataaaaaggttgccgctgattgtgaatcgtttatatctcgcgccagagttttatttgagatcgcaaacagggaggtggcttattacaacataaggcaggagtttaattactcaactgaaattactgatttcatgaaagcggtatatttcctgtatctcaatcgtcacggttaccgtggtttatgtcgctataacaagagcgggcatttcaacattccctacggtaattataaaaatccgtatttccctgaaaaagaaattcgcgcatttgcagaaaaggcccagcgagcaacgtttatctgcgccagctttgatgaaacgctggcgatgttgaaggcgggggatgtggtgtattgcgatccgccgtatgacggtacgttttccggctatcacactgacggcttcactgaagatgaccagtatcacctggcatctgttcttgaacatcggtcatcagaaggacatccggtcattgtttctaacagtgacacatccctgatccgttcgctgtatcgcaattttactcaccactacatcaaggcaaaacgcagcatcggtgtggcagctggtgatagtaaatctgcaacagaaatcattgctgtttccggggcgcgctgctgggtgggatttgatccttcgcgtggcgtagatagttctgctgtgtacgaggtgcgtgtatgagtcatgacgatatgagcaactctagcggctttaacgaggccgctgcatcattttcatggaacggcccgaaaaaggccattaacccttatctggacccggcggaatttgcgccggagtctgcactttcaaacctgatcactctgtatgctgccgataacgagcaggaacaactgcgccgcgaggcactgagtgagcaggtctgggagcgttatttctttaatgaatcccgtgatcctgtccagcgcgaaatggagcaggataagctcattagccgcgcaaagcttgcgcatgagcagcagctttttaacccggacatggtcattttggcagatgtcagcgcccagcctacccacatcagcaagccgctgatgcaacgtatcgaatacttcagcagcctgggcaggccaaaggcttattcccgctatttgcgtgagacgattaagccatgtctggagcgactggattgtgtacgcgacagtcagctatccgcttctttccgttttatggcaagccatcaagggcttgagggcctgctgatcctgcctgaaatgagtcaggatcaggtaaaacgcctgtccaccctggtagctgcgcatatgagcatgtgccttgatgccgcttgtggcgatttatatgccaccgatgacgttaagccagaagaaatccgtaagacatgggaaaaggtggcagcggaaaccctgcgactggatgttatcccgcctgcgtttgagcaactccgccggaaaagaaaccgccgcaaacccgtgccctatgaactcataccgggttcgctggcacgtatgctttgcgccgactggtggtatcgaaaattgtggaagatgcgttgcgaatggcgggaagagcagttgcgtgctgtctgcctagtcagcaaaaaagcatctccctatgtcagctatgaagccgtgacgcataaacgtgagcagcgccgtaagtcgctggagtttttccgttctcatgaactggtgaacgaagacggcgacacgctggatatggaagatgtggtaaacgccagcagcagcaacccggcacatcgccgcaatgagatgatggcctgtgttaaaggtctggagcttatcgcagaaatgcgtggtgactgcgccgttttctacactatcacctgtccgtcacgtttccattccacgctcaacaacggcagacccaacccgacctggacaaatgcgacggtaagacaaagcagcgattatctggtcggcatgtttgctgcatttcgtaaggctatgcacaaagccgggttgcgctggtatggcgtgcgggtggctgagccgcaccatgacggtactgtgcactggcatctcatgtgtttcatgcgcaaaaaagaccgccgcgccattactgcattgttgcgtaagtttgccatccgtgaagaccgcgaggaactgggtaataacactggtccacgctttaaatctgagctgataaacccacgcaaaggaacaccgacaagctacatcgcgaaatacatcagtaagaacattgacgggcgtggtctggctggcgagatcagcaaggaaacgggtaaatccctgcgtgataatgctgaatacgttaatgcctgggcgtctctgcatcgtgttcagcaattccgcttctttggcattccggggcgtcaggcttaccgtgaactgcgattgctggctggtcaggcggcaaggcaacagggggacaaaaaagcaggtgcgccggtactggataacccgcgccttgatgccatcctggctgctgctgatgctggttgttttgccacctacatcatgaagcagggcggcgtactggttccccgcaaatatcaccttatcagaacagcttatgaaattaacgaagagccgactgcttatggcgatcacggtattcgtatttatggcatctggtcacccattgtacagggcaagatttgcactcatgcagtgaagtggaaaatggttcgtaaggccgttgacgttcaggaggcggcagccgaccagggcgcttgcgccccttggactcgtggcaataactgtccccttgctgaaaatttgtaccaacaagggaaagacaaatcagctgatggagataccagaacggatatcacccgcatggatgacaaggagttgcacgattacctgcacagtatgagcaaaaaagagcgccgggaactggcagcaaggttacgcttggtgaaaccgaaacggcgtaaagactacaaacagcgaattacagatcatcagcgacagcagctcgtgtatgaactgaagtccaggggatttgatggcagcgagaaagaggtcgatttactgcttcgcggcggcagtattccgtcaggagcaggcctgcgtatcttctatcggaaccagcgtttgcaggaagatgataagtggcgaaacctgtattaattacgcaggttaacaattcgtgctcttaataataccaggcatatcaggctgatgagcgtaaaaaaacgttttacatcagtaagattattatatactgtaaatataaacagtggttatgtatacagtattgctttggtgtcataggaggaaagatgcaggactattttttggagtctttgaagctccagcgcattgatttttttcttaagcttgtagcggctagtgagtgtagtgatgaagagaaggggctggctttgcagtgggtttctgaactgactgatgaactcatggcgaaaatcagaacccacgaatacaatcgctcaatggatgtcatcagctgaggtgacttttatgcgcattgaaataatgatcgataaagagcagaagattagccagtctaccctggacgcccttgaatccgagctttaccgcaatctgcgccccctgtatcccaaaacggtaattcgtatccgtaaaggtagctctaacggtgtggaactgaccggactgcaactggacgaagaaagaaaacaagtgatgaaaattatgcagaaggtgtgggaagacgacagctggctgcattaagaaacgttgctggcgtctgaacttgcttctggcgtcagcaaggttgaacaacgagctgtgcgaggcgttagttgatatagtatcaatatataaaaggtttctcgaagttttaaggtaaggttatgacaactattaacaagcatgggttatctagaacaattcctgaacctgtaaaactggaggtaaggcagcgctgtggcttcggttgcgttgtttgtgcttctcccattgttgagtatgagcatgtaattcccacatacgctgatgcaaaggagcactctccaaatgcaatagcactactttgtcctacgtgccatgcgaaagtaacgaaacgtctttactctaaagagaaaatcattaaagcaatggaatctcctgcagccttacaaaaagggaatgtggccgatatattggacttttctgataggcatccaataataatatttggtggtgcgacgtttgaatcctgtactgtaccaataatgtttcaaaatgagccattgttaaccattgaaaaagaaaataatgcttttcttatttcgggtaaattttacgatagtcaaggtattgttaatcttgaattaattaagaatgagtgggtatgtagtgcaaggcattgggatgttcaggttgtcggtcctagaataactattatagaaaaaaggaaaggtcctcgtttaattattaaagttgatgcgcctgaaagattgattgtggaaagattagatatgttggttaaggggactcggattgtaggagacgaacacaagctaagagtcggtccacatcaatttcacaactgtggagtttcaaattgcaatattggtttctgctttggctaactggaggttggaaaaagaccatttcctataagctgagtatttcgtgcatttttgccaacgcatgtctatgccgcatgaaatcgcatgatcgtttgaggatcgtttttgctgatgcccgccagagctggcgggcttttgcttatgtcatgcaggtgcatgaaaaccactacacaaagcgggcaggcgtggcggggatacgagcgcgcgcaaacatgtttacttgcaattaatgtagatatattctgaaattgataacttacacatgaaaggagacgtgagagtggcaaaatatacaccgggccagaaagtaaaacatgcaacaggacatggtccaatcatggtaattgatcactaccaatcggctacaatggcagtttgtacgtggtttattggtgctaagaaccagcgcggagtttttcacgaagatactctagttttatttgttccaaaagctgagagtgatgatgaatgattctctgataaaaatagttgactggatggttaataccactcgttctaatggtgtgttgtatcagtccgaggttgttgaatttctaatcaatgactttggggacgagttcatcaaaactaatgagaatggtaattacgctataagcagtactgtgctagcaaattttagaaaggctagcaaagacgatatagtttgggatcgtgaacagttagcttggcgtttacgcaatgaaagcgatttacccggacggatgcagtagagataatacagataatagtgaacaagctgataatttcaacttgttcacttcttttttatgactgattattttctaagccataatattcaaatttgactacctcttcatctaaccattcattaatttcggcaatgcgtttttgtaaaggcatcagttcattccgaacaaatacccggctggctttctccacatccccaaacccccctacattattaggcataatccccatcatctgcggcggcactcggtgtgctgccatcatgtcgtcccggctcacgttcttgatatttagaaactcatccttcgccgcgacttctgacaacgggatgatctgaagcccgtcctttttgccgttaggcgagtacataaacagattgcggaagttacctggtcctttggcgcttttcatcgcattgcggaggttgttcacatcctcctggttttgcgcggcatcggtcatgtacataatgaagcctgcatgactgccgttaatgtaatactttcgacggaacagcgtggcggactcgttgagcagggcagacggaatggcagaaagatagccgggcaggccgtagatctcctgattaatatccggttccatcagatgaaaaatgctgcctttcgtgaactgatacggctgggttgtcataccgtattgcataaaccagtaggtatccaggtctaacccgcgtcgggtgtattttgccagagcaggctcaagggctataacttcaccgaagcggttcgtgcgtttctccaggtaggcgttaccaaataccagatagtcctgcacaaaacgtgaaaaagcctgctggctgagcagcgggtgagggatgtaggtactggtcagaatgttgcatttcaccgcaattggtgagctgtgatgcacggcggcgcggaaggttcgtgccagtccgtcaaagctgacgggcggctcataccagcgatccatctgtacgcattccacatagtccagcagttcacggcggtccagaacaggaacgggatcgccaaagctgaatgcttcggctgaagtctggcttttatgcttgagctgattcgtcgccgcagcgcggtttttcttactctttcccatcaaaaaatctccacaatattgctggtattggcggattcgccctgcagcggttcgttaaacagtgcgtgcatcgttgcccaggccagatcggcgtggctggcttcttcgctgcggctggcttcataggtcgggcggttgccgctggcggtggtggcgcgacggattgccatgaatgactgcgcaatgtcggtgtgcccggcgtcaaactccagacggcggtggctgataatgtcgtaggccttgagtaccagggcgtttttaacgttggggttgtagacaaactcccggacggcaggaaagaacgctttcacgttctcgtaaaccccgtgaccaacgccggttgagtcgataccgatataagtcacgttgtactgttcggtaagttttttgatggcgtcagcctgggcgcggaagtccatcccgcgccactggtgacgctcaagaatgcggaacttaccacccggcacggctggcggtgccaccaccacgcatccagcgctgtcgccgttttgcgtaccttttgccgggtcataaccgatccacacttcgcgccagccaaacgggcgcagcgccagtgcatgaaagtcggtccagacttcccaactgtccaccatgcacgcctgcagctcgctgagcggaaacacggacgcgagatcgtccacaaactcgcacatcagcaggttctggtattcgtccgggctgtactccatgcgtagctggtcgaggtcgaacaggttacagccgccgcgcaccgcatcttccacggtgactatctggcggtattgcccgtctgcgcacagcaggccgggggccagattgctgtgggacagatcgatgtccaccttatcggctttgttgcgcccacggttgaacagcgcaccggaccagaacggataagcactgtgtgtcagactggatggcgtggaaaaataggtttgtcgccattttttgtgaatagccataccggaagccactttgcgcagctcctggaatttcggtatccagaaatattcatccagatacaggttgccgtggtaactctgggccgtgcgggcattggtgccgaggaagtaaagcgtggccccgttaggaagcaccatcggatcgcctttcagctccacctccacttctttggcaaagtcgatgatgtactgtttaaagacgtgggcctgagccttgctggcagaaaggaaaatctggttacgcccggtcagcagggcgtcaatcagggcttcacgggcaaagtaaaaggtcgcgccgatctggcgtgacttcagcaggttgcggatgcggttggtttttccggcttcccaccagtggcgctggtagttgaacatagaggaatggaagatttcttccagtttctcaatctgttcatcggtgaaaacattcttttccggctgacgacgtgggcctttgttgcggttggcaacgttagggtttaagtcggcttcattgccgccattgttaaacttgccgatccgcgcgtggcgctcagactggcgtgccagcaggtcaatttctttgaaatctttcccttctttgtgctccttcataatgagctggcagtagcgtgcggcggtggtgagctgcatctgatccagcggcccatagtcaccccacttgtcgcgttttttccagctgtgaacggttgcaactttctcgcccagcatttcagcaatgcgggctacgcggtatccctgaaagtacagcagcatggcctgccgacggggatcgagatctgcgggtgtcagtgtggtgttcatggcacaaacctacagccttgaatgaaggctttccccgcctgcggtttgtgtggttatcggtacaaataccgcgcattgtttcactgcccccatcaccgcaaccataaggctccagtaagttttttctaacggagcacggctcatgacagtgaaagcaaagcgttttcgcatcggggtggaaggtgccaccaccgatggacgcgaaatccagcgtgaatggctggaacagatggcagccagctacaacccggcggtgtataccgcgctgattaaccttgagcacatcaagtcttatctgccggacagcacctttaaccgctacggcaaggtgacggcgctgtttgctgaagaaatcacggaaggtccgctggcaggcaagatggcgctgtatgccgacgttgagccaacggagtccctggtggagctggtgaaaaaaggccagaaattattcacctctatggaagtcagcccgaagttcgctgatacgggcaaagcctacctggtcggcctggctgccactgatgaccctgccagtctgggcactgaaatgctgacattcagcgccagtgcagcccataacccgctggcaaaccgcaagcagaatcctgccaatctctttaccgctgcagaggaaacggtgatcgaactggaagaaatccaggaggacaaaccgtccctgtttgcccgtgtcacggcgctgttcaccaaaaaagagcagtccgatgacgcccggttctctgatgtgcataaggccgtggaactggtcgccactgagcagcagaacctgagtgcgcgcaccgaaaaatccctgtctgagcaggaagaacgcctgtctgagctggagactgccctgcaggcacagctgaccgcctttaacgaactggtggacaagctgagccatgaagacagccgccaggactaccgccagcgtgcaacaggcggtaacgcccccgctgacactctgaccaattgctgatggagcacaaaacctgatgaagaagaatacccgctttgcttttaacgcttacctgcagcagctggcgcgtctgaacggtgtggcagttgaagaactgtccagcaagttcaccgtggagccgtccgtgcagcagacgctggaagaccagatccagcaatccgccgcattcctgacgctgattaacgtcacgccagtgactgagcagtctggtcagttgctggggctgggtgttggcagcaccattgccggaaccactgataccaccgcaaaagagcgtgagcctgtcgatccgacgctgatggtcgatgtggaatacaaatgcgagcagaccaacgttgacacggtactgacctacgcgaagctggacctgtgggcgaagtttcaggattttcaggtgcgtatccgtgacgccatcgtgaaacgtcaggcactggaccgcatcatgatcggttttaacggcgtgaagcgtgcgaaaacctccaatcgtagcgaaaacccgctactgcaggatgtgaataaaggctggctgcagaaaatccgtgaggatgcaccggatcacgtcatgggcagcaccaccacgggcggtgaaaccacaccgggtgcggtgaaagtcgggaaagggggcgaatatgccaacctggacgccgtggtgatggatgcggtcaatgagcttatcgacgtggtctaccaggacgatgacgatctggtggtgatttgcgggcgtgaactgctgtctgacaagtatttcccgctggttaacaaagagcaggaaaacagtgaaaaactggctgccgatatgatcatcagtcagaaacgcatgggtggcctgcaggccgtgcgtgcgccgttcttcccgccgaatgcactgctgatcacccgtctggataacctgtccatctactggcaggaagacacccgccgccgctcagttatcgacaacccgaaacgtgaccggattgaaaactttgaatccgttaacgaagcctatgtggttgaggactaccgctgcgccgcactggtggaaaacatccagattggcgacttcagcgccgccgcagcagaagccggagcgtaaaccatgagcctgagtcccgcacggcagcatcgcctgcgcgttcaggctgaacaggccgcccgtgagggcggcagtgttcgccacgcgtcgggctatgacctgatgctgctgcaactggcggaagaccgccgccgtctcaagggcgttcagtccacggtgaaaaaagcggaaataaaggtggagctgctgccgaaatatgccgcctgggcggagggcgtcctggctgccggaggcgctcaacaggatgacgtgctgatgtacgtgatgctgtggcgcattgatgccggagattatgccggggcgctggagatcgggcgtcatgccctgcgtcatggctgggtgatgccgctgggtaaccgcaacgtgcagaccgtgctggcagaggaaatggcagacgccgcgcagagcgcaatgcttgccgccaccggctttgatgccgatctgttgttgcagacgctggagctgacagacggtctggatatgccggaccagtcacgggcgcgtctgcataaagcgattggcgctgtcctgagtgaaagcaatccggcttccgcccttaatcatctcaaccatgcgttacagcttgatccccgctgtggcgtgaaaaaagacaaacagcagctggagcgcagactgcgcaatgacagccgctgacagaacgtgcccccgcgcacgggcggcacggggtggcgaaaggcactgccacatcaaaaccccgtccaccgccctctatttcaggagaaagcagcatgaagtttgttgcgccagaacaggcaccggaacaggcggaaatcatcagaaatacgccgttctggcctgatgtggacctgtcggagtttcgcagtgtcatgcgcactgacggcacggtgacgcagccgcgtttaaagcaggttgcgctgtcggcaatttcggaggtcaacgcagagctgtatgagtttcgcagacgtcagcagatgctggggtatgtgtcgctggctgaggttccggcggaacagctggacggcaaaagtgagcgcattcagcactatttcaacgcggtttactgctgggcacgcgccatgctcaacgaacgataccaggactatgacgccacggcatccggtgtgaagcgaggcgaggaactggcggaatccagcggtgatttgtggcgtgacgcccgctgggccatcagccgggtgcaggatgcgccgcactgcacagtggagcttatctgatgaaagtgcgtgcgcatcagtatgacacggtggacgcgctttgctggcgtcattacgggcgcacgcagggtgtcacggagcaggtactgaaggcaaatccggggcttgccgaatatggcccctttttacctcacgggctgcaggtggagctgccggacattccgaccactaccaccgtgcagaccgtccagctatgggactgaattatgacgcttgagcgaatcagcgcctttatcacgtactgcatcgccgttgtgctggcctggctgggcgatttgtccatcaaggatgcctcaacgctgggcggcctgatgattggtgtgctgatgctggctatcaactggtactacaaacacaaagcctaccagcttctgcgcgacgggcagatctcgcgggaggactatgaatccatcaatcgttaaacgctgccttgtcggggccgtgctggctattgctgccacgctgccggggtttcagcagcttcacacctccgtggaggggctgaaactgattgccgattacgaaggctgtcgtctgcagccgtatcagtgcagcgcgggcgtctggaccgacggcattggtaacacgtcaggcgtcattcccggcaaaaccattacggaacgacaggcagcagaaggactgatttccaacgtgctgcgtgtggagcgggcgctggaaaggtgtgtgacacaacagccgccgcagaaggtatatgacgctgcggtgtcgtttgccttcaacgtgggaacgggcaatgcctgcagttccacgctggtgaaattactcaatcagcggcgctgggcggatgcgtgccgacagttgccgcgctgggtttatgtgagaggtgtgtttaatcaggggctggataaccgccgtgcgcgggagatggcctggtgtttacagggagcaaactgaaatgaaaaagaaattaatcagcgggctgtttctgatgttatggatggcgctgttaatcgcagcaatggtgtatccgcaggggatttttccggtactggcagcgtccggcgtttgggtagcctgtttactgacatgggcggtaattccggtagcactggctgcgttaattaagaatggcccgctctggcaggagttgagggcatctttgctgaagaccattacccgaaaagaaaacgtatttatcagctgggtgatgcgattgctgattgtcgtaagtctcgcctggacggggtgggctattaccctggtcttttatctactgaccgttattgccttctggatcacccgtaatcagatggcgcaacaggtagcagcatgaaccggttgctgctggttatgctggcgttattactggcggcgctgggctggcagacgtggcggctggctgatgccagccagaccatcagcacgcaggcagacgagctgcagagcaaaagccaggcactggcaaagagcaacagccagcttatcagcctgtccattctgactgaaaccaataaccgggagcaggcgcggctctatgccgaagcagaacagaccagcgcgctgctgagacaacgacaacaccggatagaggaactgaaacgtgagaacgaggatttacgccgctgggctgatactcctttgcctgctgacattatccggctgcgggaacgtccgacgctcaccggaggtgcagcttaccgtcagtggttgtccgcgagtgacgccgtgtcggctggatcaggcagcgccgcgcactaacggtgatctgaacgcgttgctggatgaaacggaggccgcctgggcggtctgtgcagacaaagtggacatgattattgcgtgtcaggagcgaaacagtgaacaaaccacaatccctgcgccacgccctcaataaagcagtgccttatgtccgcaataacccggacaaactgcatctgtttgtggataacggttcgctggttgccacgggggccagctccatgtcatgggagtaccgctacaccctgaacgtggtgattgaggatttcagcggcgaccagaatctgctgatggccccggttttgctgtggctgcgtgataaccagcccgatgccatcaataacccggcgttacgggaaaagctattcacctttgaggtggatattctgcgcaacgatgtctgtgatctcagcctcaacctgcaactgacggagcgtgtgctggtcagcactgacggcagtgtgtcgagcgttgaagctatagcggaacctgatgaacctgaagaaatgtggacagtgaaacgtggctgaactgcagaaagttgacgactggctgagtgccttgctggcgaatctggagccagccgcaagaagccgcatgatgcgccagctggcgcaggaactacgccggacacagcagcaaaatatcagaatgcagcgcaatccagatggcagcaattatgaaccgcgacgggtaacagcacgcagtaaaaaaggccgtatcaaacgtcagatgtttgcaaagctgcgcaccacaaaatacctgaaaactgccgccagcgccgactctgccagcgtgcagtttgaaggcaaggtacagcgcattgcccgtgttcatcactacggcttacgtgatcgcgtcagccgcaaaggaccggaggtccgttacgcagagcgtcgccttctgggtgtaaatgatgatgttggggcaatgacccgcgacatgattctgcaatggctggcggggtgatttttgtatcagcactgatacaagttgcagcactgccgcctttcttcccctgatggcaacctttccctatgaacgcacaattaaccgaaatcatgcgccttatcaccaacctgatccgcactggggtagtcaccgaagtggacaggacaaactggctttgccgggtgaaaacgggcgaccttgaaaccaactggatcagctggctgacgctgcgtgccgggaatgcccggacatggtggcgaccatcggaaggtgagcaggtggtgctgctgagtatgggcggtaatctggaaacagcttttgcgctgcccgccatctattcgaatcagttcgcaccaccgtcgacgtcggcggacgcctgcgtgacagaacatcctgatggtggctggtttgaatatgaacccgccaccgggcgctggtatgtcaggggcatcaaatctatggtcattgaggccgtcgacaacatcaccctgaaaaccagtgagtttgtgctggaggctgaccgcacgcgtattaacagcgaagtagtgatcaatggtggcgttacccagggcggcggtgcaatgagttctaacgggatcgtggttgatgcgcatcagcatactggcgttctgaaaggcggtgacaccaccggaggcccggtatgacgctttatagcgggatgaacaataccagcggtaaggccattactgatattgaccatctgcgccagtcggtgcgggacattttgctgacgccgcagggtagccgcattgcccgtcgtgaatatggttccctgctgtcggcactgatagaccagccacaaaatccggcattacgcctgcaggtcatgtcggcagtatatgtggcgctgagtcgctgggagccacggctgacgctggattccatcaccatcaacagcaactttgacggttctatggtggtggagctgaccgggcggcggaataacggtgtgcctgtgtccctttccgtatcaacaggagcagagaatggcagtgattgacctttcgcagttgcctgcaccgcagattgtggatgtgccggactttgagacgctgcttgccgaacgcaaggccgaatttgtggcgcttcatccgaaagatgagcaggaagcagtgatccgcacgctggaactggaatctgaacccgtcaccaaattgctgcaggagaacgcttaccgtgagttgcttctgcgccagcgcattaacgaagccgcacaggcggtgatggtggcttacgcgatgggcggcgatcttgaccagctcgctgccaactacaacgtgacacgcctgacggtgacgcctgctgataatgatgctgtgccgcccgttgcagctgtgatggaaagcgatgaagcgttacgcctgcgtgtgcctgcagcctttgaagggctttctgttgcggggccaactgcagcttatgaatttcatgcccgaagcgccgacggtcgggtggcggatgccagtgcaaccagcccggcacctgcagaggtggtgctgactgtccttagccgcgaaggcgatggaactgcagaaaaagacctgctggacgtggtggaaaaagctctgaacagtgagaacgtccgcccggtggctgaccgtcttacggttcgcagcgcagaaatcataccgtaccgcgtggaagccaccatttttctctatccggggccggaagcagagccggtaatggcagcggcaaaagccagcctgcagaagtacatcgccagtcagacgcggcttggtcgggatattcgccgtagcgccatctttgccgccctgcatgttgagggtgtgcagcgtgtggagctggcttcgccgctggcggatgtggttttgaacaaaacgcaggcggcatcatgtacggagtggagcgtgaccaacgggggaacggatgaatagtctgctgccatcggggtcaacttcactggagcaccgactggcgcagacctgtagcgggatttctgatctgcaggtgccgctgcgtgacttgtggaatccggctacctgcccggtcagcttcctgccttatctcgcctgggcgttctctgtggatcgctgggacgaaggctggacagaaagcgtcaagcgtcaggtggtgaaggatgctttttatattcatcagcataaagggaccaccagtgccgtgcggcgggtggtggagccgttcggctttctgatccgcattattgagtggtggcagaccggagaggcaccgggcacgtttcgtctggatatcggcgtgcaggaccagggcatcactgaagatacctatctggaacttgagcgactgataagcgatgccaaaccatgtagccgtcacatgatcggcatgtccatcaatctgcagaccagcggtccgcattgggtgggggccgccagctatcttggcgaagaaatcacgatctatccgtatatcaacgaaacaattatttccggcggcaccgcgcatgaaggtggggcggtccatgttattgacacaatgagagtgaatccatgagcacaaaattttataccctgctgacggatattggcgcggcgaaacttgccagcgccgccgcgctcggtgtgcctttaaaaattacccatatggcggtcggcgatggcggcggaacattgccaacgccggacgcaaagcagacagcattggtaaatgagaaacgccgggctgcgctgaatatgctttatatcgacccgcagaacagcagccagattattgctgaacaggtgatccctgaaaacgagggcggttggtggatacgtgaagtgggcctgtttgatgagtccggggcattgattgccgtgggaaactgcccggaaagctataagccgcaactggctgaaggcagcgggcgtacccagaccgtgcgcatggtgctgattaccagcagcacggacaatatcaccctgaaaatcgaccctgctgtagtgctggcaacccgtaaatacgtggatgataaagtcctggaattaaagctgtatgtggatgaccagatgagaaaccacattgccgcacaagatcctcatacccagtatgcgcagaaacataatccgacatttaccggagaaccaaaagcgccgacgcctgcagcaggaaataacaccactcggattgcgaccacagagtttgttcaggccgctattactgctctgattaacggtgcgccagccacgctggacacactgaaagaaattgccgcagccattaacaatgacccgaaattcagtaccactattaataatgcgctggcactgaaagcgccgctgtcgagtccggcactcaccggaacgccaacagcacctactgcggcacagtcggtcaacaatacacagattgccaccacggcatttgtgaaatcggcgattgcggcaatggtgggttctgcacctgcggcactggatacactgaacgaactggcggcggcactggggaatgatccgaactttgccacgacaatgcttaatgcgctggcaggtaaacaaccgctggacaatacgctgactcatttgagtggaaaggatgtagcaggtcttctcgcataccttggtttgggggaattggctctggctggcgcaacaaccggcgctatgttggtgaatgggtatgtagcaattccattaattatttctggcgttcggagaccacttattatccagtggggagtggggcagtttgggggaagtctgggggatgatgcgggatatttaaacaatttccctttcgcttttccgtcggcgtgctacgtgatggttgccagccacgtggggcatacaccttcgggtgccggaatactatctgcttccgcaatcacaaaaagcggctttcgtggtttttccagcgtagtgactgccgcaaatcctgtatcgggctgttatgttgctataggagggtgatgtgttttttagtccatctttaaatatttttgtgaatcctgcgcttaaggatgactacatcaatgtaaattcatggccagatgatgctgttgaagttgatgagcaggtgtatattgagttttccggattaccgccgaaaggaaaaatccgtatcgctggggaaaatggttttcctgcatggtctgaaattccaccaccaacgcatgaggaacagattgccgcagccgaattgaaaaaacagcaattgattaatcagtccaacgaatatatgaataccaagcaatggcctggtaaagcggctattggtcgtctgaaaggtgaggaactggcgcaatataatttgtggctggattatctggacgcactggaactggttgatacctccagtgctccagatattgaatggcctacgcctccggcagctcaggccagatgacatcaggcgcggtgctggtatctgttgccgtcaccgcgtcaatgtaatccagcacaatgttaagtcgggtggtttctgcctgcattagcttccgtccggcccgtaatttcagctgaatcagactgatggaagccattgcagcatcaatcagtgactggcgctgtgcttctgccgcttctactgcggcaccgtgttgtgcctcagtatctgtcacccatttctcaccatcccatttatcatatggcgttaacggtgaaagcgtgacataaccgtttttgatggcaccgatataatccactgtaacagctgcgccattttcgattgagtaaacagtctcattgcgatggtcttcttcatggctccatcccttacccgtaaatactgccacttttcccggaatgttttcgccagggtcaataccagtggaacaggcgggcatacttacgccagtattaatatattcatcagaccagcccgtatattcatacgttactgcatcataataaaaacaacgcatatcacccggcactgtagccagtccattttcatcaaaaacaggtttcattatttagcccttactaaaaagttgaatgcgatgttacggggacgcgtttcagtaccgcctgggttttgaaaagcgggcaaagcacttccagccggctgactaacgccgctggtatataatggagaagcattcgaaacggtgccaaacactacattactgccacttccatttagccctaaaattttatgctcgtgcgttttgaaatcgtctgattgcgcggaaagtaacgcacggccactatcaacaccacggccatcatcccagatacgaatgaaatcaccgcgggcttcaggtaataccagcgaaggaaacacttttgccagcacaggataatcagtggcagagaatttcgcgccgttgaacttcaaaaacaccatactggaccagctgtcgattacagtatttggcattgcagcggacggccagaagaacggaacgccaatagctggagcaccttctcccaaaccaacgtttaagaaaatgcagaggtaacagctaactggcatcatctccggtttttattcagggggatgatcatgcttattggctatgtacgcgtgtcaacaaatgaccagaacaccgatttgcaacgtaatgcactgaactgcgcgggatgtgagcggatttttgaggacaaaatcagtggcactaagtccgacagaccggggctgaaaaaactactcaggacactatcggcaggagacacgctggttgtctggaagctggacaggttggggcgcagtatgcggcatcttgttacgctgatagaagagttgcgccagcgtggtgtgaatttcagaagcctgactgacagtattgataccagtaccccaatgggccgtttcttttttcatgtcatgggtgccctggctgaaatggaacgcgaactgatagttgaacgtaccagggcagggctggctgcagctcgtgccaaaggcagagtaggtggacgccgtcctaagttgaccaccgaacagtgggcacagattgggcgtttactcgaggccggagaatcaagacagcgtattgcactgatttttgatgtaggcgtttctaccatttatagaaaatttccggcaaataagatcaatgaatccccctgaatcagcattatgttgattatccctgcaagcagacaaataccgttattttgtgtgaataacgacacaactgcgcttagctgtttgtcaggcacaatcacttcaacatagggcgaagcctaatccaatcaggaggttcgccactatggctcaggattaccaccacggggtgcgcgttgttgaagtcaacgaaggcacccgatctattaccacggtgagcaccgccatcgtgggtatggtctgcacgggcgatgatgccgatgcaaaaatgtttcctcttaataaacccgtgctgatcactgatgtgctgactgccagcggtaaagcgggtgagtccggtactctggcccgttcgctggatgccatcgctgaccaggcaaaacccgtgaccattgttgtgcgtgtgccgcagggtgaaacggaagacgaaaccacgaccaatatcatcggcgcagtgactgctgaaggtaaaaaaacaggtatgaaagccctgttatctgcccagtcacagctcggcgttaaaccgcgcattctcggcgtgccaggccacgacaccaaggcggtagctactgagttgctgagcgtggcgcaaagcctgcgtggatttgcttacctgtcagcgtatggctgcaagacagtgcaggaggcgatcacttaccgcgaaaacttcagccagcgcgaagggatgctgatctggcctgactttactggctgggacacggtgctgaatgccgaagcaacggcatatgccaccgcccgtgcgcttggtctgcgcgccaaaattgacgagcagaccggatggcacaaaagcctgtccaacgtgggcgtgaacggtgtcaccggaatttctgcagatgtgttctgggatctgcaggacccggcaaccgatgcaggtctgctgaaccagaacgacgtcaccacgcttgtgcgtaaagacggtttccgcttctggggttcccgctgcctgagtgatgacccgctctttgccttcgaaaactacacccgcacggcgcaggtgctgatggacacgatggcagaagcacacatgtgggcggtggataaaccgcttaacccgtcgctggcccgcgacattatcgaaggtatccgcgccaaaatgcgcagcctggtcagtcagggctatctcattggtggtgattgctggctggatgagtcggtgaacgacaaagacacgctgaaagccggaaaactcaccatcgactacgactacacgccagtgccgccacttgaaaacctgatgctgcgtcagcgcatcaccgatcagtacctggtgaatttcgccagccaggtcagcgcgtaaggggacaacatggctttaccacgcaaattaaaacacctgaacctgtttaacgacgggaacaactggcaggggatcgttgagtcgctgacgctgccgaaatttacccgcaaatatgagaagtatcgcggcggcggaatgccgggtgcggtggatgtggatctggggcttgatgacagtgcgctggacacagaattttccattggtggtactgaattgctgctgtttaaacagatgggtaaagccacggtggatggcatccagctgcgctttaccggctctattcagcgtgacgataccggggaagtgcaggccgtggagcttgtcgtgcgtggacgtcacaaagaagtggattccggcgagtggaagacgggcgaaagcaacaccaccaaagtgaccagtaccaacagctacgcgaagctgaccatcaatggtgaggtgctctatgaagtggaccttatcaacatggtggaaattgtggacggtgtggacctgatggaagcgcaccgcaacgccctcggcctctgatatatctgaacggcgcgggataccgcgccagaacccaattgacaggacagcaaaatgagcgataagcagactgaaaagaccattcaactggatacccccatcaagcgcggtaaaacagaaatcaccgaaattgtgctgcgtaaaccgcagtccggtgcgctgcgcggtacacgcctgcaggccattatggatatggatgtaaacgcgatgatgatcgtgatcccccgcatctccagtccggcactgactgcacaggaaattgcagagatggacccggcagatctcactgccatgtcggttgaggttgtcacttttttgttgaagaagtcggtgcttgccggtttaccgacagcctgacggttgacgatctggtggcagatatcgccaccatttttcactggccgccatccgttactgacgttatgccgctgaccgaagtgctggaatggcggtataaagcgattcagagaagcggggccaacgatgagtgataacaacctgcgtctgcaggtcattcttaatgcggttgacaagctcacccgcccatttcgatctgcgcaggccagttcaagagaactggctgctgctgtcaaaaaatcccgcgatgcaataaagcagcttgatcaggccgggagcagtctggacagcttccgaaagctgcaggcagaaaatcagaaattaggcgacaggctgaactatgcccgccagcgtgcaaatttgctcagtcaggaactgggagcgatggggccgccttcgcaacgtcaggttgttgctctgggccgtcaacggctggctgttcagcgcctggaagaacgccagaaaaagctgcagcagcagacggcgcttgtgcgtgctgaactgtaccgggcgggaatttctgcgaaagacgatgcgggagcaactgcccgtttagcccgtgaaacatcacgttataaccaggaactttcgaaacaggaggcgcggctgaagcgactgggggaagctcagcgcaggatgaatgcagcgcgtgccagttatgcccgttcgctggaggtgcgtgatcgtattgcaggtgccggaaccactaccacggctgcaggactggcaatgggcgcaccagtgatggcggcagtaaaaagctataccagcatggaagatgccatgaaaggtgtggcaaagcaggtcaatggtctgcgtgacgataatggcaaccgcactgcacgtttttatgaaatgcaggatgccatcaaggctgccagcgaacagttgccgatggaaaacggtgcggtggatttcgctgcactggttgaaggtggtgcgcgcatgaacgtcgcaaaccctgacgacagttgggaagatcagaaacgtgacctgctggccttcgccagtacggcagcaaaggcggcaacagcctttgagctgccagcggatgaactgtcagaaagtctggggaaaatcgcccagctctacaaaatccccacccgcaatattgaacagctcggtgatgcgctgaactatctggatgataacgccatgtcgaaaggggcagacatcattgatgtgatgcaacgtctgggcggtgtggctgaccgtctggattatcgtaaagcggcggcgctgggttccaccttcctgacactgggcgctgcgccagaggttgcagccagtgcagcaaacgcgatggtgcgtgaattgtccattgccaccatgcaaagcaaaagtttctttgaagggatgaatctgctgaaactcaatcctgaagtgattgaaaagcagatgacgaaggatgcgatgggaaccatccagcgcgtgctggagaaggtaaacgcgctgccgcaggacaagcgcctgtctgccatgactatgttgtttggtaaagagtttggcgatgacgcggcgaaactggcaaacaacctgccggaactgcagcgtcagttaaaactgacagcgggcaatgatgcgctcggctccatgcagaaagaatccgacattaacaaggattcactttctgcgcagtggttgctggtcaaaaccggagcgcagaacaccttcagcagcctgggcgaaacgctgcgccagccgctgatggatattctgtacacggtgaaaagcgtcacgggggcgttgcgtcgctgggtggaagctaacccggaactgacaggcacactgatgaaagcatcggctgttgtggctgcggttaccgtcggcctcggcaccttagcggtggcgctggctgcagtgctggggccgctggcagtgatccgtctgggattctctgtgctgggtatcaaaacgttatcttccgttacggcagcagtaactcgaaccagcagcgcgttgtcctggctggctggcgcaccactggcactgctgcgacgcgggcttgcttcatcgggcaacgccgcaggtttacttactgcgccgttgtcgtctttgcgccgcacggcatcactgatgggaaatgtcctgaaaactgtagcaggtgcgccggttgcacttttgcggtctggattatccggtttacgtgctgttgctgtgatgtttatgaatcctctggcggtactgcgcggtggactggccgccgcaggcacggtgctgcgagtactggcatctggtccactggcgatgctgcgcgttgccctgtatgccatatctggtctgttaggtgctctgctcagtccgataggtcttgtggttactgcactggcgggcgtggcgctggttgtctggaaatactggcaacccatcaccgcatttctcggtggcgtggtggaaggattcaaagcggcggcaggtcccatcagtgcagcgttcgaaccgcttaagcccgtgttccagtggattggcgacaaagtgcaggcgctgtggggctggtttactgatctgctgacgcccgttaagtcgacctctgccgaactgcagagcgcagcggcaatggggcggcgattcggggaggcactggcggaagggctgaatatggtcatgcatccgctggactccctgaaatccggcgtttcctggttgctggagaagctcggcattgtcagtaaagaggccgcaaaggcaaaactgccggaaagcgtgacgcgtcagcaacctgcgacggtgaatgcagacggtaaagtgatgatgccatcgggtggttttccatcatggggatatggctttgcggggatgtatgacagcggcgggtatatcccgcgcgggcagtttggcatcgtcggtgaaaacgggccggaaattgttaacggcccggcaaatgtgaccagccggagaaatacagctgcactggctgccgttgttgccggaatgatgggcgttgctgccgcgccagcagagcttccaccgttgcaccctttggcacttcccgcgaaaggtggagaagcaattgtgagtcgcgcagccactgtgccgctcgttcaacggattgaggcaccgacgcagatcatcattcagacgcagccaggacaaagtgcgcaggatattgcgcgggaggtggcacgccagcttgatgaacgtgaacgcaggctgaaggcaaaagccaggagtaactacagcgatcaggggggatacgacgcatgatgatggtgctgggattgtacgtgtttatgctgcgcaccgttccgtatcaggaactgcagtatcaacgcagctggcgacatgcggcaaacagtcgggtaaaccgacgtccgtccacgcagtttctgggaccggaaaacgacatgctgacgctttccggtgttcttatgccggaaataacaggcggcaggctgtcgttgctggcactggagcagatggcagaacaggggaaagcatggcccctgattgaaggcagcggcacgatttacggcatgtatgtgattgagggactgaatcagactaaaacggagtttttccgcgacggtatgccgcgccggattgagttcaccctgtcgctcaaacgagtggatgaatccctgtccgatatgttcggtgatctcagtgcgcaactgaataatctgcaggacacggcaacgtctgccttaagcgatatcagtaaaacggtgggagggctgctgtcgtgaatttcagctctgaactgcttaacaaaggcaacaaaactcccgcattcagcatcagtattgagggcagggatatcaccactgtgctggataaccgcctgatgagtttgacgctgacggataaccggggctttgaagcggaccagcttgatctggagctggatgacgctgacggaaaaatcatgctgccgcgccgtggtgcggttattacgctggcgctgggctggaaggggcagccgcttttcccgaaaggggcattcacagtggacgagattgaacacactggcgcaccggaccgcctgactatccgggcgcgaagtgctgattttcgggaaacgctgaatacccgccgtgaaaaatcgtggcataagaccaccgtcggggaagtggtgaaggaaatagccgcgcggcacaagctgaagatggcactgggtgaggacctgtcggataaacccgtggagcatatagaccagactaatgagagtgacggcagttttctgatgcggctggcgcgccagtacggtgctattgcgtcggtgaaaaatggcaatctgttattcatccggcaggggcagggtaaaagcgccagtggtaaaccactaccggttatcactatcacacgtaaggacggcgacagtcaccgctttaccctggcagatcgcggagcctacacgggcgtaattgccagctggttgcatacccgcgaacccgcgaagaaagaaagcaccacggtgaagcgtaagcgcaggactgcaaagcagaagaaagagccggaagcgaagcagggcgattacctggtgggtacggatgaaaacgtgctggtacttaatcgcacttatgccaaccggagcaacgccgaacgtgcggcgaaaatgcagtgggaacgcctgcaacgcggtgttgcgtcattctcgctacaactggcggaaggtcgggcagatctctacacggaaatgccagtgaaagtcagtggctttaaacagccaatagatgatgcggaatggaccattaccaccctgacgcataatgtcagcccggataacggttttacgaccagtctggagcttgaagtgaggattgatgatttcgaaatggagtgattcttcgcaatggagaacttttaagttttcaaaatggaataatgcggtatcattattgtgaatttagcaaaaatggggagagctcgaaaaatgatgatttgcccactgtgtggaagtgccgcccatactcgcagcagttttcaggtatcttcattgaccaaagagcgttacaaccagtgccagaacattaactgcagccatacttttgttacccatgaaacttttgttcgttcgattgcaacgccaaaagagtcaaatccggttcagccgcatccaatgaaatcaggacaagtggcgctctctctttgacgctgccgccattttgtcgccatcgttaaaaaacagtgcttctaacatcatgattttaaacggtataaatttcagacaacaaaaaacccatcaaccttgaaccgaaatggcggggttgatgggctccacaaaatggggacatcaaagaaaagcagtggcactaattaagactgatgccctgcggaaaagttctgcggttgtgcaaaaaaatttcattttcagggcaacttcagttttatcctaatcctggccataccatgacgatgattgtccctgccagcgtcagcaggacgttggcgattgcataggtgcccgcatagcccagcgccgggatgttactgcgagctgtatcactgatgatctccattgccggcgcgcaggtacgtgcgcccatcattgcgccgaacaacagtgcgcggttcattcgcaatacataagcaccgaacaagaaacagataaccacgggcaccagactgacaatcaatccggcaatcaacatctgaccgccaatcgcgcccaggccgttattaataccgctaccggcgctcagaccaacgcctgccataaacaccatcaagccgaactctttcaccatgcttaatgcaccttgcggaatgtaaccgaaggtcgggtggttagcacgcataaagcccagcataattccggcgaataacaacccggcagcgttccccatgccgaaactgaatgtgctgaactggaaggtgatcatcccgatcatcagcccaataacaaagaaggcgcaaaatgccagcaggtcagtgacctggctgtgaatcgagataaagccgatgcgatcggcgatggtttttacgcgacgggcatcaccgctgacttgtaaaacgtcacctttgttaagcacgacgttgtcatctatcggcatctcaatctggctacgaatgacgcggttaaggaagcaaccgtgatcggtcaacttcagttgtgcgagacgtttacctacagcgttatggtttttaacgaccacttcttcagtgacgatacgcatgtcgagaaggtcacgatcgaaaacttctttaccgttacggaagctgggatcgagtcgggcatgggcgtcgggatagcctaccaacgctatttcatcgcccatttgtagcacggcatcaccgtctggatttgccagaatcccgttacgtcgaatacgttcaatgtagcagccggtttgtcgataaatacccagttcacgcagatttttgccgtcggtccaggccaccagctccgggccgacgcgataggcgcggatcaccggtaaataaaccttacggttggcatcagtgtccaggccacgttcgcgggcgatttgctgggcgctggtctgtaagtcctgatgctgcaatttcggcaagtaacgcgcaccaacaatcaaactcaccagaccgattaaataggttaaggcatacccgaggctcagattatccagtgccagtgagagctgcctgctttccatgccgaaatgacgcagtgtatcgccagcaccgaccagaaccggtgtcgacgtcatagagcctgctaacataccggccgtcaggccaatatcccagccaaacagcttacctaaccctaaggcgatcaccagcgcactgccaaccatcaccagtgctaacattaggtaatttttcccatcgcgaaaaaaaatggaaaaaaagttcggtccggcttcgaccccgacgcagaaaataaacagcataaagccaagattaagcgcatcggtgttaatgctgaaatgttgttggcctaataacagcgatacgactaaaacgccaatggaattacccagttggatcgaaccaagtcgtaactttccgagacatagcccaagcgcgaggaccacaaataataacagaatgtaattcccatttaacaattcggcgacgtttatattcacggaggctaacttcttgtttactagtaagctgttgaaagaaatggtaatttacgataatgttttttaccagaattcagggcgcagattcattcagcgcacctaaacgatagtaaagtaacaatatattttactagtgtaatcacattaggtatcaacggctatatgaattgcgttggcctatattagcatggaatgcgaagcggctttatcttactgaacgccacactggcgaaaaatgtgttcgatagacgcagtgtcaggaggaacgagtgaaacataaacaacgttgggcgggggcaatctgctgttttgtcctcttcattgtggtgtgcctttttctggcgacgcacatgaaaggcgcttttcgggctgccgggcatcctgaaatcggcttgctgtttttcattcttcctggagcagttgccagtttcttttcacagcgtagagaagtcctgaaacctctatttggcgcaatgctggcggcaccctgttcaatgcttattatgcggctgtttttttcaccgacccgctcattctggcaagagctggcatggttactaagcgcggtgttctggtgtgcgctgggggcactgtgtttcttatttatcagtagtttgtttaaaccacagcacagaaaaaatcagtaaagccctcaacgcgagggcttgtcagacgatcaggcgtccagattttctttcacccatgcagcaaaatcggtatagccgccgatatgttgctgatcgacaaaaatctgcggcacggtttctacgggtttacctgccttttgttgtagatcttctttagtgatcccttccgcacgaatatctacatactgatactgaaaatcatcgcgttcattgctcaatttctcagccagatcttttgcacgcacacagtaagggcaacccggacgaccaaaaataacggtttgcattatttctctcctcatagatttatgcctgtaatgatcacgctaaaatgtattcgctgaaagtaggtttaacctgttgcattaattgctaaaagctataactgttaaacacaatacagtgaaaagttttagactgaaggctcactttgcagagggaagcgtatgcgcgcgatcggtaaattgcctaaaagcgtgttgatactggaatttatcggaatgatgttgctggcggtggcgctgctgtcggtaagcgactccctgtcgctgcctgagccattttctcggccagaagtgcagattctgatgatttttctcggtgttttgctcatgcttcccgctgcggtggtggttattcttcaggtggcaaaacgtcttgccccacagctgatgaaccgtccaccgcaatattcacgttcagaaagagaaaaagataatgacgccaaccattgaacttatttgtggccatcgctccattcgccatttcactgatgaacccatttccgaagcgcagcgctgatgaatcccctaatgattttggtaaaaatcattaagttaaggtggatacacatcttgtcatatgatcaaatggtttcgcgaaaaatcaataatcagacaacaagatgtgcgaactcgatatttt

SEQ ID NO: 43 - DNA, 61536 bp, Escherichia coli
  source 1..61536: mol_type = genomic DNA
aaatggcgaagaaacggtctaaataggctgattcaaggcatttacgggagaaaaaatcggctcaaacatgaagaaatgaaatgactgagtcagccgagaagaatttccccgcttattcgcaccttccctaagtaaacgttattagcgtcgtatttagcaccaacggtccatgcttctgctgtttcaccgccagcagttatatcatttctatcaccggcacgggtattatggaaatcaggctttgtttgctcatcagtacggtcagaattggagtaagcagcaccgaaacttaacccgaagtcaaagttataggaggttgacataccataaccgtcaccattctctttagaaagtttacgaccatcgccgctaccggagccttcctgaccaaagaggaaaccatccccggaaccttcattattaccctgatattgcagagcaaagttcagaccatcaacctgaccgaagaagccattgttacggtaggttgcaacgccgttggtacgaccattcatgaaattgtcggcaccagcataggtatcaccaccaaattctggcagcatatcggtccatgcttcgatgtcatatacgacaccgtagttacgaccataatcgaaagtaccattctgaccaaaacctaaacctgcgaatgccagacgggtagcagagttatctccatcgccttctgtgccatttgcctgcaggttgtattcccactgaccataaccagtgaattggtcagcgatctgagtttcacctttgaaaccgatacgggcatatgacatgtcgccatcgctgccagcatcatcagagaagtagtgcaggcccgctacttttccgtacaaatccagtttattaccatctttattatagacttcagccgcatttgctgcgccagcaactaataacgccgggaccagcattgccagaacttttcttttcattatgtattcccttgtgattataatcttcatgaatatatcaataagtgccgttatccaaaaaaaagcacatttggatactattctatgaagttcattttattttaaagattacatgtaacaaatgtatttaaaagatttcaaaatgtttctaatctatttaatataattcaggattatgaattctaaatataaatattcatgaaaattataaatgtatatcaatatgttatgagttgagcggaagcatagggggtatcaatgattgttgcgccaaacggctggtgtgatcacgcgcacattaatgaaggcataaaaaaaagccggcatcatgccggcccaaaaaatataaacaagacgataaaaggctaataacggaggcatcatgacacagaaaaataaaaaggtataattgtattcagtgctaatatattgattaaatgaattaataaagccgatctcaaagataaataaaatcgctcaaaacgatttttcctgtattcactgccgttgcgcaaaaattatctatttgttcaaaaaatgagtgagtcttgactggctcatccaatgtggaaaaatgtgacttttatcacataatagtactaagtctgaattttccgggttatctcaaaatggaatacggttcgacaaagatggaagagagactctctcgcagccctggcggcaaactggctttgtgggctttctatacatggtgtggctatttcgtctgggcaatggcgcgttacatctgggtgatgagccggatccccgatgcccccgtgtcgggatttgaaagcgatttaggctctaccgcgggaaagtggttaggggcactggtcggatttttatttatggctctggtcggggcattgttaggcagcattgcctggtacacccgacctcgtcccgcacgtagcagacgctatgaataaaaactgctaaggtggcgactctttggcaacggagcgcgtatggacttacaacactggcaggcacagttcgaaaactggttgaaaaaccatcatcagcaccaggacgcggcccatgacgtgtgtcattttcgccgcgtctgggctacggcacagaagctggcggcagatgacgatgtcgatatgctggtgattttaaccgcctgttattttcacgatattgtgagcctggcgaaaaatcatccgcaaaggcagcgttcttcaatcctggcggcagaagagacgcgtcgcctgctccgtgaagagttcgagcaatttccggcggagaaaatcgaggccgtttgtcatgccattgccgctcacagtttcagcgcgcaaatcgcccccttaacaacggaagctaaaatcgtccaggatgcggatcggctggaagccctgggggcgattggcctggcgcgcgtgtttgccgtttcaggggcattgggcgtggcgctgtttgatggtgaagatccgttcgcacagcatcgcccgcttgatgataaacgctacgcgctggatcatttccagactaagttgctgaagctaccgcaaaccatgcaaaccgcaagaggcaagcagctggcgcagcacaacgcgcattttttagtcgagtttatggcgaagctcagtgccgaactggcgggggagaatgaaggtgtcgatcacaaggtgatagatgcgttttcatccgctggctgagcgcgtggccctaaatggctgtaattatgttaacctgtcggccatctcagatggccggttaaatctatgcaggaaaatatatcagtaaccgattcatacagcaccgggaatgccgcacaggcaatgctggagaaactgctgcaaatttatgatgttaaaacgctggtggcgcagcttaatggtgtgggtgagaatcactggagcgcggcaattttaaaacgtgcgctggcgaatgactcggcatggcaccgtttaagtgagaaagagttcgcccatctgcaaacgttgttacccaaaccaccggcacatcatccgcattatgcgtttcgctttatcgatctatttgccggaattggcggcatccgtcgcggttttgaatcgattggcggacaatgcgtgtttaccagcgaatggaacaaacatgcggtacgcacttataaagccaaccattattgcgatccggcgacgcatcattttaatgaagatatccgcgatatcaccctcagccataaagaaggcgtgagtgatgaggcggcggcggaacatattcgtcaacacatttctgaacacgatgttttactggccggtttcccttgtcagccattttcgctggctggcgtatcgaaaaagaactcgctcgggcgggcgcacggttttgcctgcgatacccagggcacgctgttttttgatgtggtacgcattatcgacgcgcgtcgtccggcgatgtttgtgctcgaaaacgtcaaaaacctgaaaagtcacgaccagggtaaaacgttccgcatcatcatgcagacgctggacgaactgggctatgacgtggctgatgcagaagataacgggccagacgatccgaaaatcatcgacggcaaacattttctgccgcagcaccgtgaacgcatcgtgctggtgggttttcgtcgcgatctgaatctgaaagccgattttaccctgcgtgatatcagcgaatgtttccctgcgcagcgagtgacgctggcgcagctgctggacccgatggtcgaggcgaaatatatcctgacgccggtgctgtggaagtacctctatcgatatgcgaaaaaacatcaggcgcgcggtaacggcttcggttatggaatggtttatccgaacaatccgcaaagcgtcacccgtacgctgtctgcgcgttattacaaagatggcgcggaaattttaatcgatcgtggctgggatatggccacgggtgagaaagactttgacgatccgctgaatcagcaacatcgtccacgtcggttaacgcctcgggaatgcgcgcgcttaatgggttttgaagcgccgggagaagcgaaattccgcattccggtttcggacactcaggcctatcgccagttcggtaactcggtggtcgtgccggtctttgccgcggtggcaaaactgcttgagccaaaaatcaaacaggcggtggcgttgcgtcagcaagaggcacaacatggccgacgttcacgataaggccactcgcagcaaaaatatgcgcgcgattgccacgcgtgatacggcgatagagaagcgcctcgccagtctgttaaccgggcagggcctggcgtttcgcgttcaggacgccagtctgcccggacgcccggattttgtcgttgatgaatatcgctgcgtgatatttacccacggctgcttctggcatcatcatcactgctatctgtttaaagtgcctgcgactcgaaccgagttctggctggagaagataggtaaaaatgttgagcgcgatcgccgcgatatcagtcgcttgcaggagcttggctggcgcgtactgattgtctgggagtgtgcgttacgtgggcgcgagaagctgacggatgaagcgcttagcgagcgtctggaagagtggatctgcggcgaaggtgccagcgcgcagatcgacacgcaggggattcatttactcgcttgatgcgtcctgaatcactggcgcaactacgggttttgccgggaagagatattttcccaacgtgaccagtaccaccgcgaagacaattacgccgagcgccagccattcaatcttcgacagcgtttctccgcccagtcccgtacccagcaagaccgcgaccaccgggttaacgtaggcgtagctggtggcgagagccggactgacgttgcggattaaatacatataagcgttaatggcgataatcgaaccaaacagcgccagatagccgaccgcaaggaagcctgaaagggaagggagtgccgtcagtttttcacctgcaatcatcgacgcgatcattaacaccacgcctgccgccagcatctcaatcgcacccgccatcatccctacaggtaaggtaatgcgcgagccataaaccgagccaaacgcccagctaatcgagccgattaaaatcagaatcgcgccccacggattgccgcttaaatttccaccgctattgagcatgatgattccggcaagcccaatggcgatacccacccattccagtttgcgcgttttaatgccaaacaggcggctgaagcacagggtaaagaggggcacggttgcaaccacaacggcggcgatgccggaaggaacattttgatgctcggcaaccgtcaccatgccattaccgacagccagcaataacaggccaatcaccgcggcattgagtagcggacgtagcggggggagtttgtgtccgcgcagtagcaaaaatgccagcaataaaataccggctgccaggaatcgaacgcccgccatcattaacggaggccagctttccacgccaatccgaatgacaaaataggttgagccccaaatgatatacaacgcaaacagcgcgccaaaaagcggtaacaactggcggaaacgcataatccctcacggtggaaataaaaaggtgggtcatagtaaacgtgaaaatcattctgctggcgagagatataattgcacttgattgttaaaaaaatgttgacctgtgaagcaagtatcagagctgccgtttttgcttcatacttacacccttcaacaataaaaatgagagggaatgcttttggccgggagtagtttactgacgttgctcgatgatatcgccacactgctggacgatatctccgtgatgggcaaactggcggcgaagaaaaccgccggtgtattaggggatgacttatcgctcaatgcgcaacaagtttcaggcgtgcgggccaaccgggaacttcccgtggtctggggcgtggcgaaaggatcgctgattaataaagtgattctggtgccgctggcgctgatcatcagtgcgtttatcccgtgggcgattacgccactgttgatgattggcggcgcgtttctctgctttgaaggagtagagaaagtgctgcatatgctggaggcgcgtaaacataaagaagatccggcgcagagccagcagcgtctggagaagctggcggcgcaggatccgctgaagtttgaaaaggacaaaataaaaggggcgattcgtaccgattttatattgtctgccgaaatcgtcgccatcacgctggggattgtggccgaagcgccgttgcttaatcaggtgctggtgctttcaggcatcgcgctggtagtgaccgtgggcgtctacggtctggtaggggttatcgttaagattgatgacctggggtattggctggcggaaaaatccagcgcgctgatgcaggcattaggtaaagggttattgatcattgcgccctggttgatgaaggcgttatcgattgtcggcacgctggcgatgttcctcgtcggcggtgggattgtggtacatggaattgcgccgctgcatcacgccattgaacatttcgccgggcagcaaagtgcagtggtggcgatgatattaccgactgttttaaatctgattcttggatttatcatcggcggcatcgtggtgctgggagtgaaagccgtagcgaaaatacgcggtcaggcacattaatactcgcacaggctattatgcaaaattcgccatcttcaactaaggtgaacaagtttcactcgaaaaaaggaggcgagtatgagctttatggttagtgaggaagttacggttaaagagggcggcccgcggatgattgtcatcggatactccagcggtatggttgagtgtcgttggtatgacggttacggggtcaagcgggaagcttttcatgaaaccgagcttgttccgggggaggggagtcgttctgcggaagaagtttgaaagggtatcattaacaccaggccggatcacatccggcctggtgtgccaatgcctgcaatgaatgatagtcgcgtcttatcatgccaccattataaaattatcgctgttttgcggtacgctatcgccaggttatgccagaatcataaaaaagtaggttgggagtcgtcagggtgcagcacgagacaaaaatggaaaaccagagctggttgaaaaaactcgcacgccgcctggggcctggtcatgtcgttaatctctgctttatcgtggtattgcttttttccaccttgctcacctggcgtgaagtagtggtgctggaagatgcctatatctccagccagcgtaatcatctggaaaacgtagccaacgcgctcgataagcatttgcagtataacgtcgacaaactgatctttttgcgtaatggcatgcgcgaagctctcgtagcgccactggatttcacttcactgcgtaatgctgtaaccgagttcgaacagcatcgcgacgagcacgcctggcaaattgaactcagccgacggcgcactctgccagttaatggtgtgtcggatgcattagtcagcgaggggaatctcctgtctcgcgaaaatgaaagcctcgacaatgaaattaccgctgcactggaagttggttacttgctgcgactggcgcacaactcctcgtcgatggttgaacaggcgatgtatgtctcgcgtgccggattttacgtttcgacgcagccgaccttgtttacgcgcaatgttccaacgcgttattacggctatgtcacccaaccctggtttatcggccattcgcaacgagaaaatcgtcaccgcgcggtacgctggtttacttcgcaaccggaacacgccagcaatactgaaccgcaggttaccgtcagtgttccggtagacagtaataactactggtatggcgtgctggggatgagtattcctgtgcgtactatgcagcaatttttaagaaacgccatcgataaaaacctcgatggtgagtatcagctctatgacagtaagctgagatttttgacctcttccaatcctgaccatccaacagggaatatttttgatcctcgtgaactggccttgctggcgcaggcgatggaacatgacacgcggggcggcattcgtatggacagtcgctatgttagctgggaacgtctggaccatttcgacggtgtgctggtgcgcgtccatacgctaagcgaaggcgtgcgcggcgatttcggtagtatcagcattgcattaaccctgctgtgggcgctctttaccaccatgttactcatctcctggtatgtgattcgccggatggtcagcaacatgtatgttctgcaaagctcgttgcagtggcaggcgtggcacgacaccttaacccgtttatataatcgtggcgcactgttcgaaaaagcccgtccgctcgctaaattgtgtcagacgcaccaacatcctttttctgtcattcaggtcgatcttgaccattttaaagcgattaatgaccgctttggtcatcaggcgggcgaccgtgttctttctcatgctgccggattaattagcagttccttgcgtgcgcaggacgttgccgggcgggtcggtggtgaggagttttgtgtgattctgccaggcgcgagtctgacggaggctgcggaagtcgcagaacgtattcgcctgaagttaaatgaaaaagagatgttgattgctaagagtacgacgatacgcatcagtgcctcgttgggggttagtagcagcgaggaaaccggtgattatgattttgaacaactccagtcactggctgaccgtcggctttatctcgctaaacaggccgggcgtaatcgggtatgcgcgagcgataacgcttaacgagcggagaaaaaatggtccagcccttcacgccagccttccggtccttcacgctgcgttcgccagacgcgggtcggatcctcatcatgcagatgcaccccttcacggtttagccctttcacaatcaccgcgtaatccattacctccagtaagggcgcatcgtttggcccatcgcccaggccaagtgtggttgggcgtttgcctgataattgttgataggtcgcgataatccagttggcggcctgatcttttccggcagaggcatccaggacgtgccagaagcgcgcaccctgcataaactgtaagcccagttcgttcagacgagcggtaaattgtgccatacgctcgtcactgtcgcgccagattagcgttaccgacgcctcatgcagctgcgtcagcgccgcctggctacggcttaatcccgtccattcggcgatggttgcatcgtcgacatcatcgaaagtcgtgaatttaaaatgttctttctcgcgtagcgtatttaaaacctggctgatttcgccatggctaatacctgagatgatgcgtggaaaaccgtctatatcctgccattgttcagcaagctggatcactgcgccattttcggcaatcagtggtaacccttgtagccccaacgttttttgcaagtacagcatttccgctgaagttttactgctacagagaatgacgggaacattcgcttcgcgtaaacggctgagccagggggcagccggttgccagtcataactatgactgtccagcagggtgccatcaagatcgctaaaaaccagtagtggttgttgaattgaaaacatgatcgcgcagttctccccttaccaggatgattctcaaaacagcacaaataatcaaagatgattttttcgggagcgatcccgttgacgccagagccaccaaggggtgacgcacgtcacatttctattcataagtagcgttaatcattcatatcgcgaatattttcttgtcagcgaaaaaaattgcggataaggtgatgaacacatcagatttcctggtgtaacgaattttttaagtgcttcttgcttaagcaagtttcatcccgaccccctcagggtcgggatttttttattgtgcattcaacgattcacttcagagacgctgaagtcatgaatatccagttcgaaggcatccgccaattcacgccatgtatgatattcacgtccatcgacgctaacgtgttcagaatcgttctggctgcgatgaacttcgctttcgctaatttcattgatcgccgccagcagggcatcgacatcgacgctgacctcacgttttgcggtatcgctgtactcttttgcggttttcatcatctttcctcgcaaccgttactctgttgttgccgccagtcgttaagtccgcctggcatctcttaagtatagaccgtcgagaaaatcagcactcgcgcgcgcctggcgctgccagaaaaacgaaattgttctacactggcacaaagccacaggaggaaaacgatgaaggtgaatgatcgggtaacagtcaaaacggatggcggtccgcgtcgtcctggcgtggtactggcagttgaggagtttagtgaaggcacaatgtacctggtttcgctggaagactacccgctcggcatctggttctttaatgaagcagggcatcaggacggtatctttgtggagaaagcagagtaatcttattcagcctgactggtgggaaaccaccagtcagaatgtgttagcgcatgttgacaaaaataccattagtcacattatccgtcagtcggacgacatggtagataacctgtttattatgcgttttgatcttacgtttaatattacctttatgcgatgaaacggtcttggctttgatattcatttggtcagagatttgaatcgttccctgacctgccatccacattcgcaacatactcgattcggttcggctcaatgataacgtcggcatatttaaaaaagaggttatcgttgtctcttttttcagaatatcgccaaggatatcgtcgagagattccggtttaatcgatttagaacttatcaataaattttttctgaccaatagatattcatcaaaatgaacattggcaattgccataaaaacgataaataacgtattgggatgttgattaatgatgtgcttgatgtgctgactgttagaagcatcatggatgaaacagtcctcattaataaacaccactgaagggcgctgtgaatcacaagctatggcaaggtcatcaacggtttcaatgtcgttgatttctctttttttaacccctctactcaacagatacccggttaaacctagtcgggtgtaactacataaatccataataatcgttgacatggcataccctcactcaatgcgtaacgataattccccttacctgaatatttcatcatgactaaacggaacaacatgggtcacctaatgcgccactctcgcgatttttcaggcggacttactatcccgtaaagtgttgtataatttgcctggaattgtcttaaagtaaagtaaatgttgcgatatgtgagtgagcttaaaacaaatatttcgccacaggagtatcctggaagatgttcgcaggtattatttttcggataatccttaggataacatgataaacgttacggaattatattaatggcaattcactaataatatcagccagcaaattaaacatctcactgaataaatgttcgcaaaaaggtgcaattaacggcattaatgccgccattaaagagataccgacagtcagagttaatggaaatccaataacaaaaatggataattgcggggccatacgattaagtaaacctaatgccagattcagtgtcagcagcagagtaatgagcggtaacgccagcatcagcccgttaaggaaaatcaaactccctgctttggtgagtgccagaaacgcattgctgttcaacggttcgccaccaattggcagggtgtgaaaggtatcgaccagcagtgaaatcaaccataaatgaccgttaaatgtcaggaacagtagtaacgccagcatatccatgatacgcgctaaaacaggcatattgagatggctggccggatcgacaaacgtcgcaaatgacagccccatttgcagaccgataatttcgccagcggttcgcacagcggcaaaggcaaattgcatggtaaaaccaagcgcaatgccgatcaggatctgctgcacggccagccacagagcaaagaacgaaaaaacaggaacatcgttggcaggtaatgatggggcaatagcgaacgtgatcatcattgccagacccagttttacccgtttcggcacgctgcgttcgctcagaattggcgcggtagaaatgagcgccagcacgcgcagtaacggccagaagtacagacttagccaggaaagccattgatcgcttgtcacctgcatcattgtacgggctacccgatgatatacggcaggttagtgaacaaggtgcggacgtaatccagcaacagattgagcatccacggtccggcaataataatggcaataaatacggcgatgatttttggaataaacgacagcgtcatttcgttgatctgggtggcggcctgcaaaatactgatgataaggcccgtgaccagcgccaccagcaacagcggggcagccagtgccagcgcgactttcatcgcttcagtccccatcatcatgaccgattcaggtgtcattttgcctctctagctgtaaaagctctgcgccagcgaaccgaccagcaattgccagccatccaccagtacaaacagcatcagtttaaagggcagagcaatggtggcgggggggaccatcatcatccccaatgccatcaacacgctggcaatcaccaggtcgataatcaaaaaagggatgaaaatcgtgaagcctatctgaaatgcggttttcaactcgctggtcacgtaggccgggagcaaaatgcgcatcggcacggcttcaggtccctgcaacgggccggtattcgctagtctggcaaacaaccctaaatctgcctcacgggtctgacgcagcataaactcacgtagcggctgcgcccctttttccagcgcctcctgcattgatattttctcttcgctgaatggctggtacgcatcgacataaattttgtcgatcaccggtgacataataaaaaaggtcaaaaatagtgccagccccagcaatacctggttaggtggcgcggagggcgttcccagcgcgttacgcaataaaccaaaaacaatgatgatgcgggtgaaactggtcatcatcagtaaaattgccggaataaacgtcaacgaggtgatgaacaccagcgtctgcaccgggagcgaccagctttgtccaccgccaggcagcggctggctggtgatacccggcagttgcgcgaaggcgaggggcgtaaccagccagagaaggacaggtgcgacagacaacaaacgacgcatcaggatctcccgctacgcttaagcaaatttttcatgaccgactgaaaatcggtctgcggtatctcttctgttggtgctgaagggggaagtttatgcagcagattgatttgccctgcggtaacgccgagcaccagccgtgcatcttccacatcgaccaccacaacccgttcacgcgcgcccagcgaagcactggcgctaattttcagaccgttaacgccagtgcgtttcggggcaaatcccaaccgttttaccagccaggcagcagcgaggatcagggcaataatggcgatgagtgcgccgctgacctgcagcagtggcgcagcagaaaccggcgcggaagattgcacagtagcgtggttattcatcactaacggctcaggcgacgcattcgctcagacggagtaatgatatcggtgatccgcacgccatatttatcggcaacgaccaccacttcgccctgggcgattaaataaccgttgatcagaatatccagtggttcgcccgccagaccgtccagcgccacgacggacccttgcgtcagacgcaacagctctttgatggtcatccgcgtacggcccagctcgacggtcagcttgaccggaatatccattatcaggtcgatatcctgcaacgttccgctgacatcaccaccgccaaattgctggaacaccgcgtcggcagcgcttttgctgctggttgatttttgttcgctcaacgcttcagcccacagatcgtccattgcgccgttgttgtcatcggccggattattcatgtcactcatttgggctgttcctcgttcagagaatttaaaatcgggttaatcaaatgttctatccgtaacgcatactgaccgttgagggtgccgtactgactggtcagtaccggaacgccgtcaacatgagcgatgatgcgatcgggtttttctatcggcaggacgtcgccgggtttcagttttaaaatctgcgacaggcgtagcgagatatcggcaaagttggcgaccaactccagctgtgaatgctgcacctggcgcaccaggttatcgcgccagttctgatcttcattacgcgagttttccagcggcgggttaaccaacaattcccgtagcggctcaatcatgctgaatggcagacagatattaaattcgccggtcaggttgccaatctccacatggaacggcgtgttaaccacaatgtcgttcggcgaggtggtgatattggtaaatttcacctgcatttccgaacgcacgtactcaacttccagcggattaatcgccttccaggcgtcgctatagccttcaagcgccagctttaacatgcggttgatgacgcgctgttcggtatgggtaaactcgcgaccttccactttggtcgggaagcgtccatcgccgccaaacaggttatccacggcgataaacaccagactcggtgaaaacaccaccagcccagtgccgcgcagcggtttcagatggataaggttcaggttggtcggcaccggcaggttgcgggcaaattcatggtacggctgaatgcggatggccccgacggttatatccgggctacgacgcagcaggttgaacagccccatacgaaaatggcgggcaaagcgctcattaatgatttccagcgcctgcaaacgttcgcgcacaacccgtcgttgggtattcggatcgtacggacgaatgtcactttcgccgctaacactggctgtcggttcgtctttgacttcgctgtcaccattcaacagcgcatcaatttcagcttgagaaagaatactatcgcccatgtcgttatcgcagaataaaagcggtatacagcacgtcggtgacatcctgtttcggttgcccggcaacaagcggggtggaaagcgtggttttaatctcggcaatcaggtttttcttgccttcttctgtcgccagtacggcagcatcctgacgcgaaaacagtaacagcaaacggctacggacttccggcaaatactcactcagccgcgagcgggtagcttcatctttcaggcgcagggttacgccgatataaagcacgcgatccgcatcgcccaaattgaccgtgaaggtatccagcgcgtagaagaccggggagggtacgacgcgttgctgcgctttgtcgtcagcggcaacctgatgcgaatgccagtagctgtaacctgcgctggcacaggccgcgagggtaatgaataccagaatcgggatccaaagcgatcgcttgcttttcttgcttatcgcgtaatcagtcatgtgttgcggtcttcctgtgtcgctactgcttatcggctaattatcctgcgtcttgagcgcaacaaagcggggaaaagacgcggattacggtgctacctctgacgttaggcgaaaatatcaacgccgctgttgcctgttacgcgcccttgtatagagacgggaaccggaagcgtatcgtcgtcttcccccgccagaggttcatggtttactgtgcgttggctttgctgttgttgggaagcggcctgctgctgaccactaaagctttcgccactgatgttgctttgccctaactgaatgccactttcggccagctgcgtacgcagtaccggaagcgctgcttccagcgcggcgcgtacatgctgatgcggtgaaaccatctggatttgtgcctggttatcatccactttgagggagatttgcacttcacctaaatcctgcgggtgcagacgcaactctgcactttgttgcccctggcgggtgaatagcgaaatatgctggcttaatgattgttgccattcgtgagaacccagcggtgcactcaaaacaggcgcggcgacggtgggcagtggctgtgtctggtgtggagtaattagcgggctggcggcagcggtcaccggtgacggtgtgctgatgacttccgctttactctgggcttctgctaccagcggtgttaatggctgagctggcgtgccgggggcatcatcaggctgtgctgttgtgagttgcgcagaagtcagttttgtgaagagcgttggtttctctgccggtaacacggttgacggcacatcagtcactttgggcgtattgtcaaaacccggcaacatcgcaaaaagggcgctcaggcttgcggtgacgtcttcattcagatcatccgctttttcgtcttttgtcgtatttttgtcagccaccgcagccaacgtcatcgtctgagcggtggttaacggtgttgatgtggattgttcgacgttgatgacaggcagtgtttcatccacagggatcagtaaatccgcttgttgcgcgtcggaaacaatatcgctgatcagcagctcgccttttgtcgtgggcttatctgttgccaccagcaactggggggccgctttgtcggtagttgtctcgcctgctaatgcttcgctcaacaacgcgagaaaatcttgtgcagcatcgctggctttgccgccaggcaatgtggtggtgtcaacgtcggcggtaattaagggcgctaagcgaatcattcaggtttcctcatggcggcgcgctgggcgaactcatccatctttttctgatcgaggcggttttctgcaagcagtgccgccgtggattgccgttcctgcagtgtctgccaggcctgcaaacgttgtttcttttctcgccagctgttcagggcaatgtcaactttctgcgtccactgattaagttgctggcgatgctgagtaatggctttttccagcgtctggataaactgctgatagttgatccagcggttgctggtcatcccggcactcatatcgctgttgaggttattgcgatattcattctgataatcgatcagcattttgagctgttcttccgcctgctgacacccgcgacgcatttcacccagcaggcgcgcggcatcctctacctctttttctgccagatctttcagggtcgccagcgcgccatgttctgccatctgccgttatctcctgggttatgacactgtcgggaaaatacgctccagcccctggagagacgcttcccagtccgcgcgttcaaaaatgccttgttgcaaatagccctccagctgcggccacagggcgatggctttgtcgagcatcggatcgctgcctttggcatacgcgccgacgctaaccagatcgcggttacgctgaaaactcgacaacagctgtttgaaggtgcgcactcgcgcgtaatgttgctcactgatcaacgccgtcattgcgcggctgatcgacgcttcaatatcgatagccggatagtgcccggcttccgccagtcggcgagacagcacaatgtgaccgtcgaggattgcccgcgcggagtcggcaatggggtcctgctggtcatcgccctcggtgagcacggtataaaacgcggtaatcgatccgccgccgctaatgccatttccggcacgctcgaccagtgccggtaatttggcaaacaccgacgggggataacctttggtggcgggtggttcgccaatcgccagcgcaatttcacgctgggccatcgcgtagcgggtgagggagtccataatcagcaacacatgctgaccacgatcgcgaaaatcttcggcaattcgcgtggcataggcggcaccttgcattcgcagaagcggagagacatccgccggagcggcaatcaccacggagcgtgcacgtccctcggcaccgaggatattctcaataaaatcttttacttcgcgcccacgttcaccaatcaaacccacgacaatgacatcggcgcgggtgtaacgggccatcatccccagcagcacacttttaccaacgccagacccggcaaacagccccatacgctgcccacgcccaacggtaagcagggcattgattgggcgcacgccggtgtccagcacatgttcaatcggtgtacgttgcaacgggttaaatggcggggtaatcagcgcaccggtttccgtcgtatcgggggaggggaggccatcgagcggtttaccgctgccgtccagaacgcgacctaataacgccggaccgagcggcaactgcttgccgctttgcagcccttcagccgaaatgtttttggcataaacccgcgcgccgggcaggacaccttccacttcctccagcggcattaaaaacagccgttgaccgttaaagccaacgacttcgctttctacttcgtgcgtttcgctgccgttctggcgttcaatgacacaggttgcgccgagcggcaattgtaatccggtggcttccagcaccagcccggtagcgcgggttaatcgcccatagcgacgtaccgcaggcaactgcgccattttggcttcaaagttatccagcgtggttagccagcgagtcaggcgcgtggtcattacaccactcctggtgctgccagacggcagagttcttgccagcgagtggcgacactggcgtcgagatcgccttcatcggcggagactttacagccgccaggatggagtgtgggatcgccccgcaagcgccagccatgcaaacttaaggttgcgccgagcatatcatccacacgttgcagatcatccgggtgcacgcgcagctgtggtttaccgctgaataacggttcttgctgcaacaactgttggatctgtttgatcagtgccgagttatccactgttggcgtctgaccgatcacctgacgtgccgcctccagcgccatctgcatcaggcgcgaagcaatcacactatcaagcgcatcaagggtagtttgaaattcgctgaccagttgctgcatccgggcatgaattggcgcttgttgagacttcgcctctgccagaccttgctccagcccccgggccagtccttcctgatagccctgctcatgaccttgctggcgaccttcggcaatccccgcctgataaccttgctcatgggcctgcatttgcagttgcgccagttgctgctcaaggctgggttcggcctcttcaatgatggtttcttccggctcgaccatgggcacaaactctgcctgtggtggcgcgagatcgtccggcgtccaggttttccacggcagattatcagacataggtatcctcgccgctgccaattaccatctcgccagtttcggcaaggcggcgcacaatcagcagaatcgctttctgttcgttttccacctgcgacagacgcaccggaccacggttggcgagatcgtcgcgcagaatatcggcggcacgctgcgacatattgcgcaggaatttctcgcgcagtggctgctcggcccctttcagcgcgatcaacagcgattcggaatccacttcctgcaacagacgctgaatgctgcgatcgtcgacatccaccagattttcgaacaggaacatctcgtcgataattttttgcgccagctcgccgtcgaattcgcgcacggcggtaataacggcttcttcctgctgagttttcatcaggttgataatttcggctgccgttctcacgccgcccattttgctgcgcttgagattctgaccgtcgagcaagccattcagtacttcggtcagttccgccagcgcggctggctgcacgccgccaaaggtggcgatacgcaacatcacgtcgtggcgcagacgttcatcgaacaacgccagaatatcggcggcctgggcgcgcttcagatgcaccagaatggtggcgataatttgcggatgctcatcgcgaatcagatcggcggcactctgcggctccataaagttgagcgtttcaataccgctggcggtatcgcgagtttcgagaatatcttccagcaggctggcggcacgttcctcacccagagctttgaccaataccgaacgcagataatcgttggcgttgatattcagtgcggcaaactgttcagcttcttgctcaaactccgccagcacatcggttagctgcttgttggagatctgcgtgacgttcgccattgcagcgctcagggtttgcacttcgcgctgggagaggtgcttgaacacctctgccgcccggtcttcgccaatggtcatcagcaggatgacgcttttatcggtgcctgtcaggttactcatgatcgttatttatccactggcgaatgaccagcgccaccacgcgcggatcgttatcagacatttcacggatacgctggctcatgacttctgcccccagacgttggttagcgcgtcgttgttggagttgttcgtctttgctcaggcggacttccaccgcatcttccacttcctcacgggcctgcgcctgttgctgtacagctttcatcgcctcggcgcgacgtgttaactgcgggcgtaccgctttccgccacagcagccacgccaccagcagtaccagcaaccagcgaccggcagccagcaactgatcgataaacgcttgctgttgccagaacggcagttctccgccgctttcgtcactgctattgaacggcgagttaacgacattgagcgagtcaccgcgtttttcagaaaagcccatcgcctcgcgggtcagatcttcaatttgcttcatctgttcgttgctgagaggcaatggtttaccgtctggcaaggttttgtaattcaccactaccgcgactgacagacgttgcacatcgcccacgttcattttggtatgacgaatggtgcgatcgacttcgtagttactggtttcattccgctgtgtgctacgcggcccgctattgctggtggtgctcgcctgctgctggcggttattttgatttgccggaggcgtgctgattggcgcgttattcgcaggtgccggttgattcgacaacgcccccggtacgccgcccggataaccggaaccgctttgctcgctctcattaagctggcgtgaacgaagcgccgcatgagattcatcaccgttagggcgatactgttcttccgtttgttctttactggcgaagtccagctgcgccgtgacctgggcgtgaatattaccgttaccaacaataggcgacaggattgcttcaatacgccgctgaatacggccttcgacatcgctggcatatttcaactgagcatcattaagatcgcgcccgctggtattggactgggttaacagatgtccgccctgatccaccagcgtgacgtttcccggcggcagaccagcaacggcgctggaaaccagatgcacaatggcgctaatttgcccttcatcgagtgcgcggccgggtaacagatttaccgtcaccgatgcagaaggggatttttgttcacggacgaataaagacggtttcggcattgccagatgtacgcgcgccccttttaccgggccgatagttgcgatggtacgagaaagctcgccttccagcgcccgctgataattcacctgttcgctgaactggctgataccaaacttttcctgatcgagtagttcgaaaccgaccgcgccgcctttgggcaaaccttgttgtgccaggcgcagacgcagttcgtgaactttatctgccggaacttcaatagcgccgctggcttcgctgaagcggtaaggaatattcatttgcgtcagttggctgacaattgcgccaccatcttgatcggaaagattgctgaataatgtgcggtagtcgggggctttcgcccacaggatcagtgcgaccatgaccgccactgccgcggaaccggcaacaatcaatggaattttcggattcgcacgcaggcgattaagccactcaagagattttgtctgggctgcagtcgcattcatcgcgcacctcgtggctgattatggacggcgttattggcaaagtggaacaagactcactcccgggtcagcaaactcgaaaaattgacgctgccattatttgtgctttcgtttttttctatccgccaataaacccgtttttttgttgctatttagcgcctttgtcttattgacttactggtaggctttgctaccagaaattatccaggagacgaaaatgtcagcgatacagggaattgaaggggttatcagccagttacaggctacggcgatgagtgcgcgtgcgcaggattcactgccgcaaccgaccattagttttgccgggcagctgcacgccgcgctcgatcgcattagcgatacacaaacagctgcccgcacgcaggcagaaaaattcaccctcggtgaacccggcgtggcgttaaacgatgtgatgaccgatatgcaaaaagcctcagtttctatgcaaatggggattcaggtgcgtaataagctggtggcggcgtatcaggaagtgatgtccatgcaggtgtaggttttgtaacctgttgttaattacatcccatctgcccgcgtggggcatggatggggcaaactcaccctatttctggtttaaaatggatacctgatcctgaaagttttctgccatccacgatccgtatacgcgataaaccctctgatcatcagaggcctcatttgatacacatcaccacgtcggatgttgttacgaccgcagacgcaacagtaacgtttgaataatttaatctttgttgatgtttttattcatattccgggctagggaaataatcaggcgtaattgtgtcactggaatagaggtttcttgtggcgcatgtggaaggagcgtctactttgtctaatagagatttcttatgacgcagtattattgatcaatagtctcctggcttatcaaaccggttgaattaactccgctccctggtttttgatattacccaccgcgcgcgatacagggtgccaggagaactggtttgctggcacacagccgttggtagcaatttctgatgcttctttaccgccaatctcttgccgcatccattcctgtgcagcttctggcgacagaaccagcgggcggcggtcatgaatatctaccagaccctggtctgctgctgcagtgacaattaaaaatccttcggcttcgtcaccacgctcaaacggtgtgctacctatcgcggccataaaaacaggttgtccatcagcgcgatagataaaataaggctgttttttgtcgccttcttttttccactcaaaccagccatcggcaaaacagattgcccgaccatgttgccagagcggtttaaacatacgactggtggccgcagtttctacgcgggcgttaatcagcggcggtttatcccaccatccgggagcatatccccagaaaaccggatccagatgaaggtgttcatcacgttcactgagcagaagaactttggttcccggcgcgacgttgtatctgccaatgggttcgggatcgtagggaatatcgcgttcaatatcttccgcgagaagcgcaaggtaatcttcacgcgtttgggattgggcaaagcgtccacacatagaaacctcctgagatcatactgaaaagaataggagagggggcgggtaaaatctatgtgtcagaggcaacgatgttcccgctgtgggccacagcgggaatgagggattacttctgaattaaataacgaatggtcggcccgtcttgctgaatatccagcaccgtatagccgtgattacgcgcatccagtggaatattattgatcgactgtggacagtcgctcaccacttccaggatttcccctttttttaactgcggcatcgcctcaagagttgcgactgccggataagggcagggttcacccaccatatcaaggcggtaatcaggaacgatatttttcatgcgatctccttagcagtctgcggtgccgcacggcggaagaagcgtttttcccagccgataatcaacatcagcgcagtaaacaacagcaaatatgtcaccagcaggccacccatcgggccaaaggttttcagcaggttgattttgtcccagtcggtggccagcgccggagcgaaatcatcccagtaatacgccagaatcgttgagccgatcacgttgcccagaccgacccaccagtagtgcacctggccttctaccgcgcggtacatccagccggtttcgcagccgcctgccagcacgatgccaaaaccaaacagtaaaccaccaattaccgcgtttggtcccgcccacatgattttgggttcaacgcctaactgtacgtaactgaagatcccgatggcactcaccgccataccaataatgattgctttcgccatatgggtacgtccggtgatccacatatcgcggaacgctgaagtaaagcagatttgcgcacgttcaatcagtaaaccaaagccgacgccaaacagcattgccagccccagtttgggttggttcatcgccgtgagcagcgcccagcccagcatgccgaaaaagaccagcatcccgagacgaaaacgacgccgcgcctgatccggtttttgcgtcagcggtgaggcggcagaaactttctgcattttcacgggaatacggaagatgggcagcagggtaaagcgcgcgccaaaccatgaaccaatggcagtggcgatggcaaagaaccaggcatgcagcgagaactgaggaataccggtaaagaacgccgccaggttacagcccattgccagacgcgcgccaaaaccggcgataatgccgccaatgatggcctgcataatgcggatacggctacgcggcatgcgtagtttgacattgttggcccacagcgctgcggcaaagcagccgccaaacataccgaggatcatcatcccgtcgatgcgggttaatggcgatccttccagatggataattttaaaataaccccactcttcagcatggacgccaaacagctgcaggagctgaccgccccaacgggtaaattcacccgtgacagcccaaaaggtgccagtaatgccaaaatagtaagtagagagaatacccgccgcgatgaccgcagggatgggtgcccagaatttaatcaaccaggcgtgtttgaattgctgccatgacatgaatgtagcctctgaactcagaaggtttgaaacaagtatcgcgaatcatacatcatgcaaatttattttcggggtaataattcacaaaaataatagttagatcaaatttctctctgaacctggaaaggctggcgacatcagggctttaatgccacaatcctcttttcttctcatgcaggacgaatgatgaaaaaactcgcaattgcaggcgcgctcatgttgctggcgggctgtgccgaagtcgaaaactataacaatgtcgtgaaaacccccgcgccggactggctggcgggctactggcagaccaaagggccgcaacgtgcgctggtcagtccggaagcgataggcagcctgattgtcactaaagagggcgataccctggattgccgtcagtggcagcgggtgattgccgtgccgggcaagttgacattgatgtctgatgatctcactaacgttaccgtaaaacgtgagctgtacgaggttgagcgtgacggtaacaccattgagtacgatggtatgacgatggagcgtgtggatcgcccgacggcagagtgtgccgccgcgctggataaagcgccgttaccgacgccactgccgtaatgaaatctccccggcttgccgccggggatgaatttaaatcacctcttcgataacccacacgctgacgctgccgccgttgcaaaagaaggtcgcttcaccgttttcgtcggttactacgctctcttgccggttccccagaaaatcacgccaggttttattgccgtaattctctcccagattaatggttttttcgccatcatccccgttcgacatgaccaccacgcagccgggatattcgtcagtgccactgcggctaaaggcaatgcagttcggatggtcgaaaaataatgtctgtacaccgtgggcgaaacgctgacgggcgagaattaactcatcaagctgttcgattattggcatatctatcggataggtttgcccgtcaccgccgacatcttcgtaatgcgcaccgtagaggtccggatagaataccgaaggaacgccattttcccgcaacaaaattaaggcatatgccagcggtttaaaccacggttcgaccggcgcttcgagggcttgcaacggttgggtgtcgtgattggcaacgagcgtcacggcgtggaaaggatcggcttccactaatgtacccgtgaaaatctgcgtcatgtcgtagtcacgccccatgcgcgatgcttcatggaatttcatctgcagcggcgcatcgaacagcatggttttgccttccacctgatcaatatacgtttgcagtttatcgacttcatgcgaccagtattccgccacaataaacagcggctttggcgcaacttcttgtacgtgttcgatccactctttataaaaccacgccggaatatgtttgaccgcatcaagacgaaaaccgtcgcattgcgtttgttccatcacccagcgcgcccagtatttaatctcttccgtcacggcatgattgcgaaaatcgatattctcgcccatcagataatcgaaattacctaattcatcatcaacctgatcgttccagccttcgccggtgtagtcgttaacaattttaaaaatgccatcttcatcagggttttcgatatggtcgataccgctaaaacatttgaaatcccagataaactgcgagtattgcccggcacgagcggggaaggtgtaacgcgtccagccttcacactcaatgatttcttcgtcaatttgcgtacggtcatcagcatttacacgctgcacgcgaatagcttctttttcatccgctcccattttgtggttgactaccacgtccaacagcaccgcaatgtcattacgtttcagggcgtcaatggcggccagcagttgtgctttatcgccatatttagtagggatgctgcctttctgatcaaactcgcctaaatcaaataaatcataggagtcgtagccgaccgaatacccgcccgatgcgcctttataggcgggcggcaaccagaccatattgataccaatatcattaaaaccgtcggcgcgctcggccagttcaggccagagcttaccgccttccgggtaataccagtgaaaacattgtaacagcgtgggattacgcattcttcgactccattcaaggggaacattagaagcgtagccgtaatcagattattcgcgagccattagcttgttaagattcacaagaagttatcttgcggagccagcacaaagccgccctgatcgccataggcacttaacaccgatttttgcaccgatgactgaccgaccagtttcgccagttcatccatccgaatctgtaataactgctttaccttgctttcgttgtcgagaatcaggcgcagcatcgggcggagctgctcctgcatcgtggtggatgggttaatctcttcagtcagatgtgcaatctcctgcaccgcattcacatacgccatttcgctggcgatgagttcgtcccattgttcttccgttgccaggcgtaacatgagctggcttttttcgacgagttgttgccaggcgaaatacaaatgcggtgcgtggttcatcagactgggtcctgaatcaaagaaggggagagtaacgactctttccaggcatcggcaatattacgcattaatgcttccacttcttcgactgcggagacatcgttgcgtaaattggcttgcagcaagcgcctgaccatatagctataaagagcaatcaagttttgggttaattcgtctttgctctcttcatcaagactcacccgaagtccgttctcaatgatgttgatcgcttttgacaaagagacgcctttgccttgctgattgttgtcctgcataaacaggcgcgctctaaccagtgcgctcagcactccatcaaatagcatggtgaccagctgctgctggctggcgctcattacggcgctttcgacgccaatttgtgcataggcctgggtgccttttgccgcgtacatgacctgtctcccgatgaatattgcttatttggaattactgttgttttcgaactgctgcgttaagtaactgctggtgctgtttaacgaggtcattaaaacgtccagttgggtaaattgttctttgtagcgcgcgacctgcgcatcaatgcgatcgctggcagcgttgtagtctttagttaatttattcagggtcttactaacgccatcggtagcggctttaataatgcccgttgtcgaaagccaactggtcaggttgctgccgatggtggttgtgatgccggtttttttaccatcgccaacaatcaatgcacctacgccgctggcatcttttttcagtgcagcggtgagtttgtcggcatccagttccagtttgccatcgctgggatcggtcgtgataccaatctgcgccaacgttttatagctggaagaactgacggtattactcagcatcgacttcaactgcgtctgaatcgtccgcagcgtggagtcgccgagcagtgcgccattgctagaactctggctatcagctcccgcatctacggcggtgtatttggtcaggctgctgaaggtatctattagcgagttataggcattcacccagtctttaatcgctgtttgcgctttggaggtgtcctgagtgatggttagcgtctggttgcccgtggtgacatcgttcaggttcagggtgatgttttccagcgcgtcgctgatggtgttgctgctgttctcaatggcgacgttgttgaccgtcagctgcgcattctgggcggcgaccgagacttccataccgttgctgctggcactggcgtcatagcccataaaactttgtagcgcatcatcaccgctgaccgagagtgtcatcgcattatcaaggccggtgtcatttgatgtgactgacagacgatattcaccgttacccacgttaatgatgctcgcacttacgcccgcttttgcgttgttgatagcatcacggatcccgcttaacgacgagttagccgcgctgatatcaatggtaatcggatctttgtcgccgccttgttgaatggtgagtttactgtcgctggtggcgatcgccgttttcgtatcgtctctggtggtgcgcgtggtcagggtttgtgcctgcgccagatgggtgacgctgatggtgtatttcccggcgatggcgttacccgcggtggtggcactgaacgcggtggtgctgctggtagtgctggtggcggaaaaaagatcggctttagacaatgcagtattggcggtctggaaagtcgtcagcgcgcttttcagcgtaccgtaggcgctaagtttagcggtaaacgacgattgctgatttgaaataggggttagcgtcgctttttgcgcggcggtgaggctatcgaggattgaacttaaatccagacctgacccgactcccagcgatgaaatacttgccatgcgatttccttttatctttcgacacgtaaaacgaataccggggttatcggcctgaattgcgcaaagtttacgtttaattgttttttttaatagcgggaataaggggcagagaaaagagtatttcggcgactaacaaaaaatggctgtttgtgaaaaaaattctaaaggttgttttacgacagacgataacagggttgacggcgattgagccgacgggtggaaacccaatacgtaatcaacgacttgcaatataggataacgaatcatggcacaagtcattaataccaacagcctctcgctgatcactcaaaataatatcaacaagaaccagtctgcgctgtcgagttctatcgagcgtctgtcttctggcttgcgtattaacagcgcgaaggatgacgccgcaggtcaggcgattgctaaccgttttacttctaacattaaaggcctgactcaggctgcacgtaacgccaacgacggtatttctgttgcgcagaccaccgaaggcgcgctgtccgaaattaacaacaacttacagcgtgtgcgtgagctgactgttcaggcgaccaccggtactaactctgagtctgacctgtcttctatccaggacgaaatcaaatctcgcctggaagagattgatcgtgtttcaagtcagactcaatttaacggcgtgaatgttttggctaaagatgggaaaatgaacattcaggttggggcaaatgatggacagactatcactattgatctgaaaaagatcgattcatctacactaaacctctccagttttgatgctacaaacttgggcaccagtgttaaagatggggccaccatcaataagcaagtggcagtaggtgctggcgactttaaagataaagcttcaggatcgttaggtaccctaaaattagttgagaaagacggtaagtactatgtaaatgacactacaaatagtaagtactacgatgccgaagtagatactagtaagggtgaaattaacttcaactctacaaatgaaagtgggactcctcctactgcagcgacggaagtaactactgttggccgcgatgtaaaattggatgcttctgcacttaaagccaaccaatcgcttgtcgtgtataaagataaaagcggcaatgatgcttatatcattcagaccaaagatgtaacaactaatcaatcaactttcaatgccgctaatatcagtgatgctggtgttttatctattggtgcatctacaaccgcgccaagcaatttaacagctgacccgcttaaggctcttgatgatgcaattgcatctgttgataaattccgctcttctctcggtgccgttcagaaccgtctggattctgccattgccaacctgaacaacaccactaccaacctgtccgaagcgcagtcccgtattcaggacgccgactatgcgaccgaagtgtccaacatgtcgaaagcgcagatcatccagcaggccggtaactccgtgctggcaaaagctaaccaggtaccgcagcaggttctgtctctgctgcagggttaatcgtcgtaacctgattaactgagactgacggcaacgccaaattgcctgatgcgctgcgcttatcaggcctacaaggtgaactgcaatttattgaatttgcacatttttgtaggccggataaggcgtttacgccgcatccggcaacatgaatggtaatttgtcagcaacgtgcttccccgccaccggcggggtttttttctgtccgcaatttaccggtaacccccaaataacccctcatttcacccactaatcgtccgattaaaaaccctgcagaaacggataatcatgccgataactcatataacgcagggctgtttatcgtgaattcactctataccgctgaaggtgtaatggataaacactcgctgtggcagcgttatgtcccgctggtgcgtcacgaagcattgcgcctgcaggttcgactgcccgcgagcgtggaacttgacgatctgctacaggcgggcggcattgggttacttaatgccgtcgaacgctatgacgccctacaaggaacggcatttacaacttacgcagtgcagcgtatccgtggcgctatgctggatgaacttcgcagccgtgactgggtgccgcgcagcgtgcgacgcaacgcgcgtgaagtggcacaggcaatagggcaactggagcaggaacttggccgcaacgccacggaaactgaggtagcggaacgtttagggatcgatattgccgattatcgccaaatgttgctcgacaccaataacagccagctcttctcctacgatgagtggcgcgaagagcacggcgatagcatcgaactggttactgatgatcatcagcgagaaaacccgctacaacaactgctggacagtaatctgcgccagcgagtgatggaagctatcgaaacgttgccggagcgcgaaaaactggtattaaccctctattaccaggaagagctgaatctcaaagagattggcgcggtgctggaggtcggggaatcgcgggtcagtcagttacacagccaggccattaaacggttacgcactaaactgggtaagttataacgtcaataaatgccgcactttaattttgactaccaggagttcttaatgatggtgcagcacctgaaaagacggccattaagccgctatcttaaagactttaaacacagccagacccattgcgcgcattgccgtaaattactcgatcgcattaccttagttcgcgacggcaaaatagtgaataaaatcgagatttcccgcctggacacgctgcttgatgaaaatggctggcaaacggaacaaaaatcatgggcggcattgtgccgattttgcggtgatttacattgcaaaacgcagagtgattttttcgatattatcggctttaagcaatttctttttgagcaaactgaaatgagcccaggtacggtgcgtgaatatgtcgttcgtttgcgccgtttggggaatcatctacacgagcaaaatatttccctcgaacagctgcaggacggtttccttgatgaaatcctcgccccgtggctgcccaccaccagcaccaacaattaccgcatcgcattacggaagtatcaacactatcagcgtcaaacgtgtagcggacttgtgcagaaatcctccagcctgcctgcttctgatatatattaaataagaataagatgtagcggagttgtttttgtgtttacaaacaatggctctacactgcaaacagacataacaacattcggggtgaatatgaaattagcacatctgggacgtcaggcattgatgggtgtgatggccgtggcgctggttgcgggcatgagcgttaaaagttttgcagatgaaggtctgcttaataaagtcaaagagcgcggtacgctactggtagggctggaaggaacttatccgccgttcagttttcagggggatgacggcaaattaaccggttttgaagtggaatttgcccaacagctggcaaaacatcttggcgttgaggcgtcactaaaaccgaccaaatgggacggtatgctggcgtcgctggactctaaacgtattgatgtggtgattaatcaggtcaccatttctgatgagcgcaagaaaaaatacgatttctctaccccgtacaccatttctggtattcaggcgctggtgaaaaaaggtaacgaaggcaccattaaaacggctgctgatctgaaaggcaaaaaagtgggtgtcggtctgggcaccaactatgaagagtggctgcggcagaatgttcagggcgtcgatgtgcgtacctatgatgatgacccgaccaaatatcaggatctgcgcgtaggccgtatcgatgcgatcctcgttgaccgtctggcggcgctggatctggtgaagaaaaccaacgatacgctggcagtaaccggtgaagcattctcccgtcaggagtctggcgtggcgctgcgtaaaggaaatgaagacctgctgaaagcagtgaacgatgcaattgcggaaatgcaaaaagatggcactctgcaagccctttccgaaaaatggtttggtgctgatgtgaccaaataatcagcataatgacaaaaaagggcgctttcactagcgccttttttatttacgcgttttcagcgtgcataataagaaaatcacaacaacacacatcggaggctattatgccactgcataatttaacccgttttccacggctggagtttatcggcgcgccaacgccgctcgaatatctgccgcgcttttctgattatcttggacgggaaattttcatcaaacgggatgacgtcacacccatggcaatgggcggcaataaattacgtaagctggaatttctcgcggcagatgccctgcgcgaaggtgccgatacgctgattactgccggcgcgatccagtctaaccatgtgcggcagactgccgcagttgcggcgaaactcggcctgcactgcgtggcgctgctggaaaatcctattggcacaaccgcagaaaactatttaaccaacggcaatcgtttgttgctggatctgttcaatacccagattgaaatgtgcgacgcactgaccgatcccaatgcccaactggaagagctggcgacgcgagtcgaagcacaaggctttcgcccgtatgtcattccggttggcggttctaatgctctgggcgcgctgggttatgtggagagtgcgctggaaatcgcgcaacagtgtgaaggggcggttaatatttcgtcggtggtggtcgcatcgggcagtgccggaactcacgccggattggctgttgggctggaacacctgatgcctgaaagcgaactgattggcgtgaccgtgtcgcgttccgttgccgatcaattgccgaaagtggttaacctacaacaggcgattgcgaaagaactggagctgaccgcatcagcggaaattttactctgggatgactattttgcacctggctacggcgtgccgaacgacgaaggcatggaagcagtgaaattgctggcgcgtctggaaggcattctgcttgatcctgtgtataccggaaaagcgatggcggggctgattgacggtatcagtcagaaacgcttcaaagatgaagggccgattctgtttattcataccggcggcgcgcctgcgctgttcgcctatcatccccacgtttagctccgggaacgctcatgcaagaaagtatacaactggttattgattccttgccgttcctgttgaaaggggctgggtataccctgcaactcagtatcggcggcatgttttttggcttactactcgggtttattctcgcgctgatgcgcctgtcgccaatctggcccgtgcgctggctggcgcgtttttatatctctatttttcgtggtacgccgctcatcgcacaactgtttatgatctattacggcctgccgcagtttggtatcgaattagatcccattccgtcagcaatgattggtctgtcgctgaacactgccgcctatgccgccgaaacgctgcgcgccgccatttcttctattgataaaggtcagtgggaagccgctgccagtattggtatgacgccgtggcagaccatgcgtcgcgcgattttgccacaggcggcgcgggtggcgttgccgccgctgtcgaacagctttatcagtctggtaaaagatacgtcgctggccgcgacaatccaggtgccggagctgttccgtcaggcgcagttgattacctcgcgcacgctggaggtgttcaccatgtacctggcggcttcgctcatctactggatcatggcgacagtattatcgacgttgcagaaccattttgagaatcaacttaatcgccaggagagagaaccaaaatgagtgccattgaagttaagaacctggtgaaaaaatttcacggtcagacggtgctgcacggtatcgacctcgaggtaaagcctggcgaagtggtggcaattatcggtccgagtggttccggcaaaaccacgttgctacgcagcataaatctgctggaacaaccggaagcgggaacgatcaccgttggcgatatcactattgatactgcacgttcattaagtcagcaaaaatcgctgattcgccagttgcgtcagcacgtcgggtttgtcttccagaactttaatttgtttccgcatcgtacggtgctggaaaacattattgaagggccggtgatcgtcaaaggcgaaccgaaagaagaggccacggcgcgcgctcgcgagctgctggcgaaagttgggctggccggtaaagaaaccagctatccacgtcgtttgtctggcggtcaacagcagcgtgttgcgattgcgcgtgcgctggcaatgcgtcctgaggtgattttgtttgacgagccaacgtcagcgctggatccagagctggtgggcgaagtcctgaacacaatccgccagctggcgcaggaaaagcgcacgatggtgattgtgacgcacgaaatgagctttgcccgggatgttgcggaccgggcgatttttatggaccaggggcggatagtcgagcagggggcagcaaaagcgttatttgctgatccccagcagcctcgcacccgccagttcctcgagaagtttctgctgcaataataagaaaaaatcagccccgacgattcacctgtcggggcgggacgccatttcaagcgtgataaaactgcttaacaaatcagcataactcattaataacataagagaatgcgatggcttgcaaaagtaattcattgcctgaataatataaattatatataaatcttatttatgtgatagtttgaattatcattataaatgatactcactctcaggggcgttgcggtttactatgcaggatacggattttttcagctggcgtcgcacgatgctgttgcgttttcagaggatggaggccgcagaagaggtctaccatgaaatagagcttcaggctcagcagctggagtacgattactattcgttatgtgttcgccacccggtaccattcacgcgacctaaagtggctttctacaccaattaccctgagtcgtgggttagttattatcaggcaaaaaattttctcgcaattgatccggtgctgaaccctgaaaactttagtcagggccatttaatgtggaatgatgacttattcagcgaagcacagccgttatgggaagccgcgcgcgcacatggtttacgccgcggtgtcactcagtatttaatgttgccaaatcgggcgttgggctttttgtccttttcccgttgcagcgctcgcgaaatacccattcttagtgatgaactgcaattaaaaatgcagttactggtgcgcgaaagtctgatggctctgatgcgtttaaatgatgaaatagtgatgacgccagagatgaatttcagcaagcgcgaaaaagaaattctgaaatggacggcggaagggaagacatcagcagagatagcgatgattttgtcaatctctgagaatacggtcaatttccatcagaaaaacatgcagaaaaaaatcaatgcaccaaataagacccaggtggcctgttacgcggccgctactggcttaatttgatcgcttttctttctgcgtgccagatgcaaaaaccggctgaaaggcacgctctcagccggttttatattactgacggtaggcttgtttaatttgcttaaccgttttggaaaatactgcagcctgggtttcgtcttcgatcagcgcaagctgtttttccatctttaacatcacgcggcccgcgtcagcttgtcccatcgcctgcagcatcagcgtcagcatcgctttcaggcaggagacttcatttgccagttcttgattattctcggcagtagaaaaatcaggcgtactcatttattttcctcgtcatgttgcaatgaaaatttgcggtgaaaaatgttaaggcggcggagtataccataagctttgctaaaaatagcagtggttgttttttgagcgtgatatcggcagtgctataaaatacgttaatataatgaccaataaatatttttatcatgaatgttttttgcccatattgttcgggttaattaatgttacatattcagcgggctgattttcatttttgctgaataaagtcaatttttgtcacatttcatcgtagggcttactgtgaaacgatccggtaagccgttggtgacgggcgtgaccataactgtggacaatcgaattgacaaaaacgagagaaaaatcgaatacccaccatttttaacgtttcaaagttgcaataaaaaccgctaatatacgaatgactaactatcagtagcgttatccctatttctggagatattcctttgatcaacgttctacttgttgatgaccacgaactggtgcgcgcagggatacgacgcattctggaagatataaagggtataaaagtcgtcggtgaggcatcgtgcggtgaagacgccgttaagtggtgccggacaaatgccgttgacgtggtgctaatggacatgagtatgccgggcattggcggtcttgaggcgacgcgtaaaatcgcgcgttccacagctgatgtcaaaatcatcatgcttaccgtccatacagaaaaccctttaccagcgaaagtcatgcaggccggtgctgcgggctacctcagcaaaggcgcggctccgcaggaagtcgtgagtgcgattcgttctgtctattcagggcagcgttacattgcttctgacatcgctcaacaaatggcgttaagccagatcgaaccagaaaaaacagaaagcccatttgccagtttgtctgaacgtgaattgcagattatgctgatgatcaccaagggccagaaggtcaatgagatctcagaacagctcaatctcagtccgaaaacggtgaacagctaccgctatcgtatgttcagtaaactaaacattcatggcgatgttgagctgactcacctggcaattcgccatggtctgtgtaatgcggagacattatcaagtcagtgagtgatcagtttgacgcaaaagcgtttttaaaaaccgtaaccagccagccaggcgtttatcgcatgtacgatgctggtggtacggttatctatgtcggcaaagcgaaagacctgaaaaaacggctttccagctatttccgtagcaacctcgcttcgcgcaaaaccgaagcgctggtcgcccagatccagcaaattgatgtaacggttactcacacagaaaccgaagcgctgttgctggaacacaactacatcaaactctatcagccgcgttacaacgttttgctacgcgatgataaatcatatccttttatcttcctgagtggtgatacccacccgcgtctggcgatgcatcgtggtgcgaagcatgccaaaggtgaatatttcggcccgttcccgaatggctatgccgtacgtgaaacactggcgctactacaaaagattttccccattcgccagtgcgaaaatagtgtttatcgcaatcgctcgcgtccgtgtctgcaataccagatagggcgctgtctgggaccgtgcgttgaaggactggtgagtgaagaagaatacgctcagcaggtcgagtatgtgcgcctgtttttgtctggcaaagatgatcaggtgcttacgcaactcattagtcgtatggaaactgccagccagaatctggagtttgaagaagctgcacgtattcgcgaccaaattcaggcggtgcgacgcgtcaccgaaaaacagtttgtttccaataccggcgacgacctcgacgttattggtgtggcgttcgatgcgggcatggcttgtgtccacgtattgttcattcgtcagggcaaagtgctcggcagccgcagctatttcccgaaagtgcctggcggtacggaactgagcgaggtggtagaaaccttcgtaggccagttctatttacaaggcagccagatgcgcaccttaccgggtgagatcctgctcgattttaatcttagcgataaaacgctgctcgccgattccctttcagaactggcgagacgcaagattaatgttcaaaccaaacctcgcggcgatagggcgcgttatctgaaactcgcgcgcaccaatgcggcgacggccttaaccagcaaactttcgcagcaatctaccgttcaccagcgactgaccgcgcttgccagcgtgttgaaattgccggaagtgaagcggatggagtgctttgacatcagccataccatgggcgaacaaaccgtcgcttcctgtgtggtgtttgatgctaacggcccgctgcgtgcggagtatcggcgctataacattactggcatcacgccgggcgatgattatgcggcgatgaatcaggtgctgcgtcggcgttatggtaaagccatcgacgacagtaagatcccggatgtgatacttatcgacggcggcaaaggccagcttgcgcaggcgaaaaatgtcttcgccgaactggatgtctcatgggataaaaatcatccgctgctacttggcgttgccaaaggagcagatcgtaaggctgggctggaaacgctgttctttgagccggaaggtgagggattcagtttgccgccagattctcccgcgctgcatgttatccagcatattcgcgatgaatcacatgatcacgcgattggcgggcaccgtaaaaaacgggcgaaggtcaaaaataccagttccctggaaaccattgaaggcgtcgggccaaaacgccggcaaatgttgttgaaatatatgggcggtttgcaaggtttacgtaacgccagcgtcgaggaaattgcaaaagtgccgggtatttcgcaaggtctggcagaaaagatcttctggtcgttgaaacattgatgtctctgtagcaacataggggtaatcttactgacaacagatagttacccgtcattatgcaatttaatatccctacgttgcttacactgttccgtgtcatccttatcccattctttgtattggtcttttatctgcctgtcacctggtcgccgtttgccgccgcgctcattttctgcgtcgcggcggtgactgactggttcgatggttttctggcacgccgctggaaccagagtacccggtttggtgctttccttgaccctgtcgcagataaagttctcgtggctatcgccatggtgctggtaaccgagcattatcacagctggtgggtgaccttaccggcggcaacgatgatcgcccgtgaaattattatttctgcgctacgcgaatggatggcggagttgggtaaacgcagtagcgtggctgtctcctggattgggaaagtgaaaaccactgcccagatggtggcgttggcctggctgctgtggcgtccgaacatttgggttgagtacgccggtattgcacttttctttgtggctgcggtactgactctgtggtcaatgttgcaatatttgagcgctgcgcgtgcagatttgcttgaacagtgatcgtttcggcgtaattttcagcaaacaatcaaaagtggtgaaaaatatcgttgactcatcgcgccaggtaagtagaatgcaacgcatcgaacggcggcactgattgccagacgataataaaatcaagtgattaactgattgcttgatgaatgcgggaatagctcagttggtagagcacgaccttgccaaggtcggggtcgcgagttcgagtctcgtttcccgctccagtttaaaagacatcggcgtcagcggatgtctggctgaaaggcctgaagaatttggcgcgttaacaaagcggttatgtagcggattgcaaatccgtctagtccggttcgactccggaacgcgcctccactttcttcccgagcccggatggtggaatcggtagacacaagggatttaaaatccctcggcgttcgcgctgtgcgggttcaagtcccgctccgggtaccatgggaaagataagaataaaatcaaagcaataagcagtgtcgtgaaaccaccttcgggtggtttttttgtgcctgcaacttgtcgttacaccctccttaatttttaatcaccagcaaagccactcaaaaagtatctctgatacggaccggcatgtaagataggtgctggcgagttgagatccacaaggaaaagcgtatgaaaacgggaccgttaaacgaaagtgagttggaatggctggacgatattctgaccaaatacaacactgaccacgccatccttgatgtggcggagctggacggtttattgacggcggtgttgagttctccgcaagagattgaaccggaacagtggctggttgccgtgtggggtggggctgactatgtgccgcgctgggcgtcagagaaagagatgacgcgctttatgaatctggcttttcaacatatggccgataccgcagagcgtctgaacgaattcccggagcagtttgagccgttattcggcttgcgagaagttgatggcagcgagctgacgattgttgaggagtggtgctttggctatatgcggggcgtggcactttctgactggtcaacgttgcccgattcgttaaaaccagcgctggaggcgattgcgctgcacggtactgaggaaaacttcgagcgggtagagaaaatgtcgccagaagcgtttgaagagagcgtagatgccattcgactggcggcgcttgatctacatgcgtactggatggcgcatccgcaggaaaaagctgttcagcaaccgatcaaagcagaagagaaaccggggcgtaacgatccttgcccgtgcggtagtggtaagaaatttaagcagtgctgcctgcattaagaggtcaaattgggtgtcagcgttaattctggcacccaataaggaatttgaggctatctgatcaccccacttctggtaacaaccctgccgcaatcaaaaattgcacgccaatcacagcaataccacagagaaacaccaccaccagcgccggacgaccacctttcacccggtaacccgcctgaggattgtgctttctgctttgccaggtcaacagcgaagggataatcaatgccagtaccgccagcgccacaccggcgtaacccagcgccatcacaaatcctcgtggataaaacagtgcaaacgccaacggcggcagaaaggtaattgcaccagtttgcaaccgtccaccaacggtatttgaacgctgaaataaatcagccagataatcaaataagcctaacgcaacgccgagaaatgacgtggcgagggctaaatcagcaaataaatgcactgccagctcaacatgcggagaggccaccatttcgcgtaatgcctgtaacagcccgtttaatccggcatgattagccagcaatcccataaaggttgttgaatcaatgctgccaagcgttgccacctgccagaaaatatatgccaccagggggatcgcactaccggttataaacacccagcgtagcttacgaacgttgccatccatatagctgacaatactcggcacgctaccgtgaaaaccaaatgaggtaaaaatcaccgggattgcagacagagccagcccctgttgcaacggcagggttaaaagattcactttgtgaatatgcggcagcagtagtaccagcattaccaccagaaaaataatcttggcgctgaacagaaaacggttaaataaatcgaccagtgaagttccgacacaaaccacgccaccggcaacaaaagtgaacaacagcacgccagcggttgccgacattgaaatacctgtccagtcgctgatgctggaggccaacaattcaccggcaccgctgatgtatgccgcagtcagagcatacattaagaacatcatactgaagcccgtcagccattgaccgtagcgtcccagatagcgttttgccagcgtgcccagaccggtatctgccggaacatgctggtacacctccagcagtaatagcgccgtgtagcacatcaacgcccaaagcccaatcaacaagattaacgtaacgctaaaaccaacaccggccgcagccagcggcattgccagcatgcctgcgccaattgtggttcccgccacgataaaaacacttcccagggttctgtttttcacgctttcttctgtcctgacgatctttatgagtgatatctgcggcgcaggttaaggcataacggctgcttcgtcaaaccgacgttacatatggtgtaaatataaatgtacaataaaaagcattcagtcctgcgctggcgcaaagtcttcataagcggcaatcgctacgctaggctttttttgaggagggacgatggactctattcacggtcatgaagtgttaaatatgatgattgaatcaggcgagcaatatacgcatgccagtctggaagctgcgattaaagcgcgttttggtgaacaggcacgttttcacacctgctcggcagaagggatgacagcgggagagctggtagcgtttctggcagcaaaaggcaaatttataccttcgaaagacggtttttcgaccgatcagagtaagatttgccgtcactgatttgaaacggcggcagtaaacctgccgccggagagcattagttttgtgtgtcgagggtagagagttctttgtcgataaaatacagaccttcgccgcttttgcctgccaggcttaatttatcaataatcgatttgaacagtttctcttcttcatgctgctcagaaacataccattgcaggaaattaaatgttgggtagtcctgattggtcattgcagcatgagccagttcgttaattttctgggtgattaattgttcgtgtttataggtttcctggaataattcatcaagtgaggaatattcagcaaacggagattcaacggtattaatacgcggtaaattgccggtatcagtcaggtaatcaaacagacgctgcatatgcgtcatctcttcctgggcgtgacggcgcaggaacgcggcagcaccttcgaaggtatgatagctgcaccaggcgctcatttgctgataaagcagtgaagagtacagttccaggttcatctgctcattaagtttttcaatcatttctggtttcagcatgatagtgctccacaaaggttatatttgttgctgtggcgtcactataatttgttattttattatttgcaaaaggtaaaatataaacttcaattattaaaaatacgaatgggaataaaacgcattaccgctatttctttaatcagcgaagatcccctcgctgattaaaatatttagagaaagacagggaaggcggaatgatggcactgatatgacaaagtgaattccgtattcaaacataaggaacccgcaaaaaggctacagttgcctactggctgaccaaaggggaccgcgtgggtatagccttcctgctggcatgcgcgatcggcgatcccgcgactgacataacgatcggtatgggcatgctgcaaaaaagcctggtcataaactaaccgtacaatacctgttgccgcgtcaacttcgctcacatgggcttggcgagtaaccgtacaccccgccagcgttattaatgaaagagtcagaatcagaagtctcatggtccagccagaagagtaagagaaagcactattttacgcgttacagtgctgcgacaatggccggaaaagacgcctggcaggcgctatttcttgccatctgtaggtgtcagaaataggggggctgttttttgattatcatttttataacattaaaggggtatttatgtgatttgtatcacataaagattgatttttgtgatggttgtcatattataagcgcaaagacaataacacctgtataacaaatggtcggagtgccgcgatgaaactgcgcaaaatcctgaaaagtatgttcaataactattgcaagacgttcaaagacgtaccgccaggcaatatgttccgataacaaaaaacctgctccggcaggtttttttgtgtcctgatgacggtggatgtgactatcgctgaagatgtgaagccgctactataacggctttcaaaatgctatcaggagtttacgatgtcccagccgctgaatgccgatcaggaactggtttctgatgtggttgcttgccagttggttatcaaacaaattctggatgttctcgatgtaatcgcgcccgttgaagttcgtgaaaaaatgtccagtcagctgaagaatatcgactttactaaccatcccgccgccgcagacccggtcaccatgcgggcaatccaaaaagccatcgcgcttattgaactcaagtttaccccacagggtgaatcccattaaaaaaaccgctgcttcaaacagatgaggcagcggtttctcaaaaccttcatcggcgcaatgcattagcgccgatgatgatcaatgcagctggtgtgacacgacattcagaacatgttggtcggtctgcacagggcacatacccgcaagtttcgcactgcgcacttcatcaagaatggtttgcagcaacagaccatcatgctgctgttctttttccagatcgcgcaggaaattgacggttgaatcatcattcagttctttcgcttcatcggctaactgtgccaacgtactagaacgttgctcgtattcttccatcgttttttggaacagttcttccagagagttcagtttttcaccgggaacatcaatggctttaacgatgggggtagcgccgacactcttcataaagttaaacatgcgcatcatttgggtcacattactctgtgcctgggcgcgaaggaaagtggcggtgccgttcagactctgttcagaacaccagttactcaggtgaaggtagagattggatgcgtaaaactcgcggttcatttgagagttgagtttgagaagcattccagcggttgccatacctaatatccttatatccagaagtggagaggtgcaagataaatcaaaacaccataattactgtttgcagaataattcctttctgccggtccgaaatgtgatcgtggagtcaattctgacgatgatctgaaataagaataacgtctgaacgggtataagaaaatgcttaaatcatcaagtttatatatttttacatttcattgatgaaatcaatgtaactgcaatgaattttaatgatagtgctttttgtatcttattgatattaatcaatgaatttgaattcatgatgaagtgatgattttataaaacgttttttcatttttgcgagatggctctcattatacgtgttctgttaattaatgagcacagtgataattaatggcgaaatgaatgacgtgcattttccacatctttgagttgcggttattacaccatttcaaaaactcaacgccaggtaatgcggcctattgactggttaaaaagaagacatcccgcatgggtaccaaagacaacaaggatttccaggctaatcttatggattaatctgctgtgcattcgacaatttgtctgacaaattggctttcccttatgtcttttcccgctaaatttatgcacgttctcactgtaattctgcgatgtgatattgctctcctatggagaattaatttctcgctaaaactatgtcaacacagtcacttatcttttagttaaaaggtaatgctttgttttccgattaatttaacgaatgtcattcgtttttgccctacacaaaacgacactaaagctggagagaaccatgcacaaatttactaaagccctggcagccattggtctggcagccgttatgtcacaatccgctatggcggagaacctgaagctcggtttcctggtgaagcaaccggaagagccgtggttccagaccgaatggaagtttgccgataaagccgggaaggatttagggtttgaggttattaagattgccgtgccggatggcgaaaaaacattgaacgcgatcgacagcctggctgccagtggcgcaaaaggtttcgttatttgtactccggaccccaaactcggctctgccatcgtcgcgaaagcgcgtggctacgatatgaaagtcattgccgtggatgaccagtttgttaacgccaaaggtaagccaatggataccgttccgctggtgatgatggcggcgactaaaattggcgaacgtcagggtcaggaactgtataaagagatgcagaaacgtggctgggatgtcaaagaaagcgcggtgatggcgattaccgccaacgaactggatacggcacgtcgccgtacaacgggttctatggatgcgctgaaagcggccggattcccggaaaaacaaatttatcaggtacctaccaaatctaacgacatcccgggggcatttgacgctgccaactcaatgctggttcaacatccggaagttaaacattggctgatcgtcggtatgaacgacagcaccgtgctgggcggcgtacgcgcgacggaaggtcagggctttaaagctgccgatatcatcggcattggcattaacggtgtggatgcggtgagcgaactgtctaaagcacaggcaaccggcttctacggttccctgctgccaagcccggacgtacatggctataaatccagcgaaatgctttacaactgggtagcaaaagacgttgaaccgccaaaatttaccgaagttaccgacgtggtgctgatcacgcgtgacaactttaaagaagaactggagaaaaaaggtttaggcggtaagtaatttgccggaaaaattcccctctgcatgatgcagagggggtgtgaacgaccagtgattcacggagacgttatgcaacagtctaccccgtatctctcatttcgcggcatcggtaaaacgtttcccggcgttaaggcgctgacggatattagttttgactgctatgccggtcaggttcatgcgttgatgggtgaaaatggcgcaggaaaatcaactctcttaaaaatcctcagcggcaactatgcgccaaccacgggttctgtagtgattaatgggcaggaaatgtccttttccgacacgaccgcagcacttaatgcgggtgtggcgattatttaccaggaactgcatctcgtgccggaaatgaccgtcgcggaaaacatctatctcggccagctgccgcataaaggcggcattgtgaatcgctcattgctgaattatgaggcgggtttacaacttaaacatcttggtatggatattgacccggacacgccgctgaaatatctctccattggtcagtggcagatggttgaaatcgccaaggcgctggcgcgtaacgctaaaattatcgcctttgatgagccaaccagctccctttctgcccgcgaaatcgacaatcttttccgcgttattcgtgaactgcgaaaagaggggcgggtgatcttatacgtttctcaccgtatggaagaaatatttgccctcagcgatgccatcactgtctttaaagatggacgttatgtcaaaacctttaccgatatgcagcaggttgaccacgacgcgctggtgcaggcgatggtcgggcgcgacattggcgatatctacggctggcaacctcgtagttatggcgaggagcgcctgcgtcttgatgctgtgaaagcaccaggcgtgcgtacgccaataagtctggcggttcgcagtggtgaaattgttgggctgtttggtctggtaggagcggggcgtagcgaattaatgaaaggcttgtttggcgggacgcaaatcaccgccggtcaggtttatatcgaccaacagccgatcgatattcgtaaaccgagccacgccattgccgcaggcatgatgctctgcccggaagatcgcaaagcggaaggcattattcccgtgcactccgttcgcgacaatatcaacatcagtgccagacgtaaacatgtgctcggcggttgtgtaatcaacaacggttgggaagaaaacaatgccgatcaccacattcgttcgctcaacatcaaaacgccgggcgctgagcaactgatcatgaatctctcaggcggaaatcagcaaaaagccattctgggccgctggttatcggaagagatgaaggtcattttgctggatgaacctacgcgcggcattgatgttggtgctaagcatgaaatttacaacgtgatttatgcgctggcggcgcagggtgtggcggtgctgtttgcctccagcgacttacctgaagtcctcggcgttgccgaccggattgtggtgatgcgggaaggtgaaatcgccggtgaattgttacacgagcaggcagatgagcgtcaggcactgagccttgcgatgcctaaagtcagccaggcagttgcctgagtaaggagagtatgatgtcttctgtttctacatcggggtctggcgcacctaagtcgtcattcagcttcgggcgtatctgggatcagtacggcatgctggtggtgtttgcggtgctctttatcgcctgtgccatttttgtcccaaattttgccaccttcattaatatgaaagggttgggcctggcaatttccatgtcggggatggtggcgtgtggcatgttgttctgccttgcttccggtgactttgacctttctgtcgcctccgtaattgcctgtgcgggtgtcaccacggcggtggttatcaacctgactgaaagcctgtggattggcgtggcagcggggttgctgcttggcattctctgtggcctggtcaatggctttgttatcgccaaactgaaaataaatgctctgatcacaacactggcaacgatgcagattgttcgaggtctggcgtacatcatttcagacggtaaagcggtcggtatcgaagatgaaagcttctttgcccttggttacgctaactggttcggtctgcctgcgccaatctggctcaccgtcgcgtgtctgattatctttggtttgttgctgaataaaaccacctttggtcgtaacaccctggcgattggcgggaacgaagaggctgcgcgtctggcgggtgtaccggttgttcgcaccaaaattattatctttgttctctctggcctggtatctgcgatagccggaattattctggcttcacgtatgactagtgggcagccaatgacgtcgattggttatgagcttattgttatctccgcctgcgttttaggtggcgtttctctgaaaggtggcatcggaaaaatctcatatgtggtggcgggtatcttaattttaggcaccgtggaaaacgccatgaacctgcttaatatttctcctttcgcgcagtacgtggttcgcggcttaatcctgctggcagcggtgatcttcgaccgttacaagcaaaaagcgaaacgcactgtctgatgcttttttccacaacaatttaacgttttttcccaccacagccagccgccacaacggttggctgttcttcattgcaaatggcgacccccgtcacactgtctatacttacatgtctgtaaagcgcgttctgcgcaaaacaataagaaaagagaaggaggagagccgggtgacagaaccgttaaccgaaacccctgaactatccgcgaaatatgcctggttttttgatcttgatggaacgctggcggaaatcaaaccgcatcccgatcaggtcgtcgtgcctgacaatattctgcaaggactacagctactggcaaccgcaagtgatggtgcattggcattgatatcagggcgctcaatggtggagcttgacgcactggcaaaaccttatcgcttcccgttagcgggcgtgcatggggcggagcgccgtgacatcaatggtaaaacacatatcgttcatctgccggatgcgattgcgcgtgatattagcgtgcaactgcatacagtcatcgctcagtatcccggcgcggagctggaggcgaaagggatggcttttgcgctgcattatcgtcaggctccgcagcatgaagacgcattaatgacattagcgcaacgtattactcagatctggccacaaatggcgttacagcagggaaagtgtgttgtcgagatcaaaccgagaggtaccagtaaaggtgaggcaattgcagcttttatgcaggaagctccctttatcgggcgaacgcccgtatttctgggcgacgatttaaccgatgaatctggcttcgcagtcgttaaccgactgggcggaatgtcagtaaaaattggcacaggtgcaactcaggcatcatggcgactggcgggtgtgccggatgtctggagctggcttgaaatgataaccaccgcattacaacaaaaaagagaaaataacaggagtgatgactatgagtcgtttagtcgtagtatctaaccggattgcaccaccagacgagcacgccgccagtgccggtggccttgccgttggcatactgggggcactgaaagccgcaggcggactgtggtttggctggagtggtgaaacagggaatgaggatcagccgctaaaaaaggtgaaaaaaggtaacattacgtgggcctcttttaacctcagcgaacaggaccttgacgaatactacaaccaattctccaatgccgttctctggcccgcttttcattatcggctcgatctggtgcaatttcagcgtcctgcctgggacggctatctacgcgtaaatgcgttgctggcagataaattactgccgctgttgcaagacgatgacattatctggatccacgattatcacctgttgccatttgcgcatgaattacgcaaacggggagtgaataatcgcattggtttctttctgcatattcctttcccgacaccggaaatcttcaacgcgctgccgacatatgacaccttgcttgaacagctttgtgattatgatttgctgggtttccagacagaaaacgatcgtctggcgttcctggattgtctttctaacctgacccgcgtcacgacacgtagcgcaaaaagccatacagcctggggcaaagcatttcgaacagaagtctacccgatcggcattgaaccgaaagaaatagccaaacaggctgccgggccactgccgccaaaactggcgcaacttaaagcggaactgaaaaacgtacaaaatatcttttctgtcgaacggctggattattccaaaggtttgccagagcgttttctcgcctatgaagcgttgctggaaaaatatccgcagcatcatggtaagattcgttatacccagattgcaccaacgtcgcgtggtgatgtgcaagcctatcaggatattcgtcatcagctcgaaaatgaagctggacgaattaatggtaaatacgggcaattaggctggacgccgctttattatttgaatcagcattttgaccgtaaattactgatgaaaatattccgctactctgacgtgggcttagtgacgccactgcgtgacgggatgaacctggtagcaaaagagtatgttgctgctcaggacccagccaacccgggcgttcttgttctttcgcaatttgcgggagcggcaaacgagttaacgtcggcgttaattgttaacccctacgatcgtgacgaagttgcagctgcgctggatcgtgcattgactatgtcgctggcggaacgtatttcccgtcatgcagaaatgctggacgttatcgtgaaaaacgatattaaccactggcaggagtgcttcattagcgacctaaagcagatagttccgcgaagcgcggaaagccagcagcgcgataaagttgctacctttccaaagcttgcgtaggagcggttaatcacccgtaagtggaactaacagcacatcgacctcacttgaggcaatcactcttttcgccgagcaggatgctcgcgaaaagaaactgtgattgtgattaccgcaaatcaccaaatcgaaatgatgtttgtgacatacttccagaatatgttcgcttaactcaccgtaggcaataaacgtcttgtcaacgggataccccgcatcctgaattaacttatcaagaaagctttgcgtttcttcttgcatcacgctgcgtaaatcttcaagcatcggcgcggctaattgattgtacatttccgggtcggaagcgagagtaattaaactgatgtgtccctttactggcctggcgatagataccgcttttgccagcagttgctgactttccggtgtaaccgcaacagcgacaagaatattgctatagctcataacctgttccttattctgtgaacttcaggtgacattaaagctttactcctaatggagaaacgacgcaatcccaactcggtcaaacaggtaaatattagtctgattattagtaaagacaattaatcaatcactcccggtgatcatataatttcaaatgtaattataagaaaatagtgtactgattctccgcattaaacaagtggttaatatatgtaaaacatttcattaacattaagttgattgttgcctttctttgtatttaattagtttgttgtgcggtaagtgtctgtttaaaaatagcttatctggtattgcatgaaagtgattatttatagcagatgattatttacggtgagttattttaactgtgcgcaacatcccatttcgattattcctgtttcatttttgcttgctagcgtagcgaaaaactttttaacagattgaaatacacccaaaacaaaagtatgacttatacatttatgttaagtaattgagtgttttgtgtgatctgcatcacacattattgaaaatcgcagcccccctccgttgtatgtgcgtgtagtgacgagtacagttgcgtcgatttaggaaaaatcttagataagtgtaaagacccatttctatttgtaaggacatattaaaccaaaaaggtggttctgcttattgcagcttatcgcaactattctaatgctaattattttttaccggggcttcccggcgacatcacggggtgcggtgaaaccgcataaaaataaagttggttattctgggtgggaataatgcatacctccgagttgctgaaacacatttatgacatcaacttgtcatatttactacttgcacagcgtttgattgttcaggacaaagcgtccgctatgtttcgtctcggcataaatgaagaaatggcgacaacgttagcggcactgactcttccgcaaatggttaagctggcagaaaccaatcaactggtttgtcacttccgttttgacagccaccagacgattactcagttgacgcaagattcccgcgttgacgatctccagcaaattcataccggcatcatgctctcaacacgcttgctgaatgatgttaatcagcctgaagaagcgctgcgcaagaaaagggcctgatcatgagtgaaaaaagcattgttcaggaagcgcgggatattcagctggcaatggaattgatcaccctgggcgctcgtttgcagatgctggaaagcgaaacacagttaagtcgcggacgcctgataaaactttataaagaactgcgcggaagcccaccgccgaaaggcatgctgccattctcaaccgactggtttatgacctgggaacaaaacgttcatgcttcgatgttctgtaatgcatggcagtttttactgaaaaccggtttgtgtaatggcgtcgatgcggtgatcaaagcctaccgtttataccttgaacagtgcccacaagcagaagaaggaccactgctggcattaacccgtgcctggacattggtgcggtttgttgaaagtggattactgcaactttccagctgcaactgctgcggcggcaattttattacccacgctcaccagcctgttggcagctttgcctgcagcttatgtcaaccgccatcccgggcagtaaaaagacgtaaactttcccagaatcctgccgatattatcccacaactgctggatgaacagagagtacaggctgtttaactgatacggtgaggcgcaacattccagcagcggtaacgacgtaccgctgcttttttttgccccaatcgcgcgttaacgcctgacgactgaacatcctgtcatggtcaacagtggaaggatgatgtcgtgcttatcttattaggttacctggttgttctcggtacagttttcggcggttatttgatgaccggtggaagccttggagcactctatcaacccgctgaactggtgattattgccggtgcagggattgggtcgtttatcgtcggcaataatggcaaagcgattaaaggcacgctgaaggcgctgccgttgctgtttcgtcgctccaaatacaccaaagcaatgtatatggatctgctggctctgctttatcggttgatggcgaaatcgcggcagatggggatgttttcgctggaacgtgatattgaaaatccccgtgagagcgagatcttcgccagctacccacgcatcctcgcggatagcgtcatgcttgattttatcgtcgattatctgcgtctgattatcagcggtcatatgaacaccttcgaaatcgaagccctgatggatgaagagattgagacgcacgaaagcgaggcagaagtcccggcgaacagtctggcgctggtcggggactcacttccggcgtttggtattgtcgcggctgtaatgggggtcgttcacgcgttaggttcagccgatcgtcctgccgccgagctgggtgcgcttatcgcacatgcgatggtggggactttcctcggcattttattggcttacggatttatttccccattagcgagtgttttacgtcagaaaagcgccgaaaccagcaaaatgatgcagtgcgtcaaagtcactctgctttctaatctgaacggttacgcaccgcctatcgccgttgagtttggtcgcaaaacgctctattccagcgaacgtccgtcgtttattgaactggaagagcatgtgcgtgcggtgaaaaatccgcaacaacagacgacaaccgaggaagcatgaagaatcaagcgcatccgattattgtcgtcaaacgacgcaaagccaaaagccacggggcagcacatggatcgtggaagattgcttatgccgactttatgactgcgatgatggccttttttctggtgatgtggctgatctccatctccagcccaaaagagctgattcagattgcggagtacttccggactccactggcgactgcggttacgggcggcgatcgcatttctaatagtgaaagcccaattcccggcggtggtgatgattacacccaaagccagggggaagtgaataagcagccgaacatcgaagagctgaaaaaacgcatggagcaaagtcgattgcggaaattgcggggtgatctcgaccagttgatagagtccgatccgaaactgcgggcgttacgtccccatctcaaaatcgatctggtccaggaaggtctacgtattcagatcatcgatagccagaatcgcccgatgtttagaaccggcagtgccgatgtcgaaccctatatgcgcgacattctgcgtgccattgcgcctgtactgaacggtattcccaaccgtattagcctttcaggtcataccgatgatttcccctacgccagcggtgagaaaggatatagcaactgggagctttctgccgatcgggccaatgcatcccgccgcgaactgatggtcggagggttggatagcggcaaagtgttacgtgtcgtcggcatggcggcaacgatgcgcttaagcgatcgcggacctgatgatgccgtcaaccgtcgcatcagcctgctggtactgaacaaacaagccgaacaggccattttgcatgaaaacgccgaaagccagaatgagccagtaagcgccctggaaaaacctgaggttgcaccacaggtcagtgttcccacaatgccatcagccgaaccgaggtgacagcgtgagcatggatataagcgatttttatcagacattttttgatgaagcggacgaactgttggctgatatggagcagcatctgctggttttgcagccggaagcgccagatgccgaacaattgaatgccatctttcgggctgcccactcgatcaaaggaggggcaggaacttttggcttcagcgttttgcaggaaaccacgcatctgatggaaaacctgctcgatgaagccagacgaggtgagatgcaactcaacaccgacattatcaatctgtttttggaaacgaaggacatcatgcaagaacagctcgacgcttataaacagtcgcaagagccggatgccgccagcttcgattatatctgccaggccttgcgtcaactggcattagaagcgaaaggcgaaacgccatccgcagtgacccgattaagtgtggttgccaaaagtgaaccgcaagatgagcagagtcgcagtcagtcgccgcgacgaattatcctttcgcgcctgaaggccggcgaagtcgacctgctggaagaagagctggggcatctgacaacgttaactgacgtggtgaaaggggcggattctctctcggcaatattaccgggcgatatcgccgaagatgacatcacagcggtactctgttttgtgattgaagccgatcagattacctttgaaacagtagaagtctcgccaaaaatatccaccccaccagtgcttaaactggcagccgaacaagcgccaaccggtcgcgtggagcgggaaaaaacgacgcgcagcagtgaatccaccagcatccgtgtagcggtagaaaaggttgatcaattaattaacctcgtcggcgagctggttatcacccagtccatgcttgcccagcgttccagcgaactggacccggttaatcatggtgatttgattaccagcatggggcagttacaacgtaacgcccgtgatttgcaggaatcagtgatgtcgattcgcatgatgccgatggaatatgtctttagtcgctatccccggctggtgcgtgatctggcgggaaaactcggcaagcaggtagaactgacgctggtgggcagttccaccgagctcgacaagagcctgatagaacgcattatcgacccgctgacccacctggtacgcaatagcctcgatcacggtattgaactgccagaaaaacggctcgccgcaggtaaaaacagcgtcggaaatttaattctgtctgccgaacatcagggcggcaacatttgcattgaagtgaccgacgatggggcggggctaaaccgtgagcgaattctggcaaaagcggcctcgcaaggtttgactgtcagcgaaaacatgagcgacgacgaagtcgcgatgctgatatttgcaccaggcttctccacggcagagcaggtcaccgacgtctccgggcgcggcgtcggcatggacgtcgttaaacgtaatatccaggagatgggcggtcatgtcgaaatccagtcgaagcagggtactggcactacgatccgcattttactgccgctgacgctggccatcctcgacggcatgtccgtacgcgttgcggatgaagttttcattctgccgctgaatgctgtcatggaatcactgcaaccccgtgaagccgatctgcatccactggccggcggcgagcgggtgctggaagtgcggggcgaatatctgcccatcgtcgaactgtggaaagtgttcaacgtcgcgggcgcgaaaaccgaagccacccagggaattgtggtgatcttacaaagtggcggtcgccgctacgccttgctggtggatcaattaattggtcagcaccaggttgtggttaaaaaccttgaaagtaactatcgcaaagtccccggcatttctgctgcgaccattcttggcgacggcagcgtggcactgattgttgatgtctccgccttgcaggcgataaaccgcgaacaacgtatggcgaacaccgccgcctgaatgagtaaaaaggtaacaatatgaccggtatgacgaatgtaacaaagctggccagcgagccgtcaggccaggaatttctggtatttacccttggtgatgaagagtacggtattgatatcctgaaagtgcaggagatccgtggctacgatcaggtaacacggattgcgaacacgccagcgtttatcaaaggcgtcacgaatctgcgcggggttattgtgccgattgttgacttacgaattaagttcagccaggtggatgtggactataacgacaacacggtagttatcgtcctgaatctcggacagcgggtggtcggcatcgtagttgacggcgtttcagacgtgctttcattgacggcggagcaaattcgtccggcaccggaatttgccgtgacgctttcaacagaatatctcactggactgggcgcactgggcgaccgtatgttgattctggtgaacatcgaaaaactgctgaatagcgaagagatggcgctgttagatagcgcggcgtcagaagtggcgtaattctcccgatttcctcaattgaaatgaacccgatgatctgcgcatcgggttttttatttcaatttcgcggcgggtggcatcagcaataaagtttccccccttcttgccgataacgagatcaacttgttttcaggaaggtgccttatgattaaccgtatccgcgtagtcacgctgttggtaatggtgctgggggtattcgcactgttacaacttatttccggcagtctgtttttttcttcccttcaccatagccagaagagctttgtggtttccaatcaattacgggaacagcagggcgagctgacgtcaacctgggatttaatgctgcaaacgcgtattaacctgagtcgttcagcggtgcggatgatgatggattcctccaatcaacaaagtaatgccaaagttgaattgctcgatagcgccaggaaaacattggcccaggccgcgacgcattataaaaaattcaaaagcatggcaccgttacctgaaatggtcgccaccagtcgtaatattgatgaaaaatataaaaactatcacacagcgttaactgaactgattgattatcttgattatggcaatactggagcttatttcgctcagccaacccagggaatgcaaaatgcaatgggcgaagcgtttgctcagtacgccctcagcagtgaaaaactgtatcgcgatatcgtcactgacaacgcagatgattaccgatttgcgcagtggcaactggcgattatcgcgctggtggtggtattgattctgctggtggcgtggtacggcattcgccgtatgttgcttactccgctggcaaaaattattgctcacattcgcgaaatcgccggtggtaacctggcgaataccctgaccattgacgggcgcagtgaaatgggcgacctggcgcagagcgtttcacatatgcaacgctctttgactgacaccgtcactcatgtgcgagaaggttcagatgccatctatgccggtacccgtgaaattgcggcgggcaacaccgatctttcctcccgtactgaacagcaggcatccgcgctggaagaaactgccgccagcatggagcagctcaccgcgacagtgaagcaaaacgccgataacgcccgccaggcctcgcaactggcgcaaagtgcctccgacaccgcccagcacggcggcaaagtggtggatggcgtagtgaaaacgatgcatgagatcgccgatagttcgaagaaaattgccgacattatcagcgttatcgacggtattgccttccagactaatatcctcgcgctgaatgccgcggttgaagccgcgcgtgcgggtgaacagggccgtggttttgccgtggtggcgggtgaagtgcgtaatcttgccagtcgcagcgcccaggcggcaaaagagatcaaagccctcattgaagactccgtctcacgcgttgataccggttcggtgctggtcgaaagcgccggggaaacaatgaacaatatcgtcaatgctgtcactcgcgtgactgacattatgggcgagattgcatcggcatcggatgaacagagccgtggcatcgatcaagtcgcattggcggtttcggaaatggatcgcgtcacgcaacagaacgcatcgctggtgcaggaatcagctgccgccgccgctgcgctggaagaacaggcgagtcgtttaacgcaagcggtttccgcgttccgtctggcagccagcccactcaccaataaaccgcaaacaccatcccgtcctgccagtgagcaaccaccggctcagccacgactgcgaattgctgaacaagatccaaactgggaaacattttgacgagtatttactaacgcggtcattgccgcctgatggggagcgttgatgtttaatcgtattcgaatttcgaccacgctgtttttaattttgattctctgcgggatcttgcagattggcagtaacggcatgtctttttgggcatttcgcgacgatttgcaacgactgaatcaggtcgagcagagcaatcagcaacgtgcggcattagcgcaaactcgggcggtaatgttacaggccagtaccgcgctgaacaaagcgggcactctgacggcacttagggaaggtgcgaacaagtccctgatatgagatcatgtttgtcatctggagccatagaacagggttcatcatgagtcatcaacttaccttcgccgacagtgaattcagcagtaagcgccgtcagaccag

SEQ ID NO: 44 - DNA, 58171 bp, Escherichia coli
  source 1..58171: mol_type = genomic DNA
tgggacaacttgtgaaattaccgacaagaagggaaagggccttcccgagagtggtaaaggagaggccctggaaataccccacagccccgaaaaagagccagtcagttgcttaactgactggcattacagcctccgggctggcattttttatggttgagttaccagcggccggatgcgccgccacctccagaagaaccgccaccgccgctaaatccgccgccacttgagcctccaccggaaccgctgttgtctgaatgataacttttacctgatgctcttttctgaagtacacataaacaggtaaagaccataaatatggtgaaagtaaaaaagaaggaaaatacagcaatggaaaaaattttatcggagaacaggaataaatctaaaagatagattgctgaaatatagactccacttttacatgcgcgacaaaaattactgccttgatgaaaaaaccagaaagggaagaacatcactgcaaatacccaaaaaatagcaaagtaataatgatcactggaagacgctgattcactttctgaaggattagtcggatattggtgttgtgaagtgagttggttattcaaagcgtttatagctagctctaatccctgagcaaatttttgttgtttaaatgcgggtatcatgttgctacggatgatatctccagccagagcatcggttaccttttcttccagcccataacctacctggatgcggacagtacgatctgaccaggcaacaatgatcagtatcccatcattacgtttggcatctcctaaacgccaattgtcaaaaactcttgtagcatattgttcaattgtctcgtctttggttgtgggaacaattaatacagcaatttgcacttgggtattattgaaaatagagtctaacttgtgcgtcagttctttcttttcttgtgagtttaagctactcgtaagatccgtaacttgttgctgtaattgtgggacaatagttggttgggctgcaacaaaggaacacacgaaagtgaacattagtatgaaatagcgcattataaatttctcattaaatctggataaataaattgacggcggcatcggtaattttagattcgttatcattaaaaactaacacagaaaaaataaatataattttggtgaatgttttgacatgattaaatccattttctttattttcttctgacataatacgttactccctttaattattaacgatatgtttcgcatttttctttaaatctgcctgtaacagaatgttaataagacatgattgttgtggcaggatctgcaataattaacaattatccacttcacagagaatgctatgcagtacccgattaacgagatgttccagaccctgcaaggtgagggttactttaccggcgtccccgccatttttattcgtttacagggatgcccggttggctgtgcctggtgcgacaccaaacacacctgggaaaagcttgaggatcgggaagtctcccttttcagcattctggcgaagaccaaagagagtgataagtggggggcggcgagcagtgaagatttgctggctgtcattggtcggcagggatataccgcgcggcatgtggtgattacgggtggtgagccttgcattcatgatttgctgccactgactgacctgctcgaaaagaacggttttagctgccagatcgaaaccagtggaactcatgaagtacgctgcacaccgaatacctgggttaccgtatcgccaaagctgaacatgcgcggcggctatgacgtgttgtcacaggcactggagcgagccaacgaaatcaagcatccagtggggcgcgtacgtgatattgaagcactggatgaactactggcaacgctgaccgatgataaaccgcgagtcattgcactgcagccgattagccaaaaggatgatgccacacgtttgtgcattgaaacctgcattgcgcgtaattggcgtttgtcgatgcaaacacataaatatctaaatattgcctgattaaacatttataagcgttataaatgggtggaacctgtaaagacttctactcatttatattgtttgtcgcctctgaaaactcctccattttacccatccagggctaatcattagcattctctacaaattctgtggcattaatttttcgctggagtgaaaattattgcggtaaagtttggtagattttattttgtatagagttattttaaatatttacctttttaatcaatggattaagtgctctttaacataatggatgtgttgtttgtgtgatactataaagttggtagattgtgactggcttaaaaaatcattaattaataataggttatgtttagagtgttccccgcgccagcggggataaaccgccgatcacacgctcccacgggccgtaccagtcgtgttccccgcgccagcggggataaaccgatgatttttgcacgacgttcaaccggcgtttcgtgttccccgcgccagcggggataaaccgatctaacggagttaatcttatccgactttttggtgttccccgcgccagcggggataaaccggacgccgccgccgcgaagccgtttccgatgttgagttccccgcgccagcggggataaaccaccatataacccgttatctctttctcaagtttttatattagcagtacttgtaataagcaacatatccacgtaacacctcatgttcaaaatagttctccatgccagagaggttcacaattatcgatacaaaaaattaaatttaatcaaagtgttatttgtatgattcttaaatcgttaagaaattttaatctattatttttttaatattgaattaatgcctgttaattttttctttagaataacagtatattttttaagcttgttattcattggttaagtaataaatctggaagtttgtctttgttttgaggctaatgagtggttttacataaccgcctctatacgctgttgatgaatagttcttatgaataaagatatccagttcatactttaagtgaaaattgataaagtgcgattcgtattgtcttttattctaaagacatcgagtgtagttaatattccttgtaaaaacagggataaaccgaactagttaaagtttttattatgttccctgcatcagcggggataaaccggacttgttatcattttttaagttgtcgaacttatgttccccgcgtcagcggggataaccattcaggtatgttcaggccgggcagtttcccgcccggccttcctcacttacgcattcgaccagctctggatcgaatccacattccccaattccccatgcatcacttcatacgattttttcaggatcacatcagtatgtttggttaggtctttgaaaatgcctttattcatcgcgtcgtagcgtttggcattgctctcaatcggtataaagatatctttcacgcgaaccatcttatcaacagccgttgcgtaatccgggtatagccccagacctaccgctgtattaatcgctgctcccagacttgcacaaccgttaatggcgttacggcgtgccggaaggttgaacacgtcggcaaaaatttgcataaacagatcgctgttcgaaccgccgccagtaatgatcacatgcttcgcaaagtgattcatttcattacacatattgtcgtaattgttcttcagcgttagcgccacactttccaatatcgaacgatatatccatgcgtaatccatgctggaatcaaagccgatcataatcccgcgtttgtacggttcccacggattggtcagccagtccagcaccgtcatcagcccattacagccaggtggcacactagaggctttcttgttgagtaaatcttccggtgaaagatcctgcgccctggcatcctgaattaacgactcgcctaacatgtcacgcagccagctcaccgtccacatacctttgcgaataccgtaaccttcatacagcaatgtttgcggaatagaagacataatcggccagtacgccaccggatctttcggcagtgctttgccgttcatcatcaatgcgatgtaagtgccaagagaaattaccgcagtttcatcatccagtaatccggcccccagagcttctaccggtttatcactggtggtacaaacaaccggcagtcctgccgggaaatgtgtcgccagtgcggcttgtggtgtgatatgtccgaggacggtgccaggcatttgcacatcaaacagcatatgacgggggatattaaacttatccattaccgcagcatcttcgctccatgccctgctcttataatccaccggccactgaccaaaatagttggcgatattgtctttaaactcgccggttaagcgatgcgtcagataacccgaaaaagaggtgacatacgccacgtcaggattcgtatgttcgtaagggcgtgtaacgcgtgcatcctgccagctaatcaacggcgcagctggcgtgccgtcggctttcaataacgcacggcagcaacggatggagcccaggccgatgccaacaatatcttctttattcccggcaaactggctcatcaaatcgtgacctgcaaaacataatgatgcccataaatcgtcgtcaggatgttctgcagtatcggcataaggcgtgtgcatcggctgtaataagcctttaccttcgcaaaccacattactttccagatcgtacatcaccacttttgtgctctgacttccgccatcaatccctatgatgtattttttcgacatgatttttctcctgtaattttcctggcttacttgctgctagccattgcgggggcgctatcagcagtacgaattttttggaacagcaaaaaggtaaagacaatcaccatggcaagcgccgccattcccatcagccacatattgcggtaggcttctgctgcgggcagggtgtcttgccagtggccgataatcgggtaaacgaagacatccggcaggaatccaatcaccgaacaaatacctaccgtggtgcccataatgtaagacggtgttctcgcttcgccagggcaggcccagtacagcccgcgtgaggcgtaacaggtgaatcccagcagtaaaatcaggccaatccccatcgcgaccgattgcgggttagagttcgtgacgagcagggcagttaacgccagcaggccgagtacggaaaggatttggatcacgcgggtaggggatttcactttactgtaggtggtgataatgccgccaagtgggccgcacagcgcgcggaagattttgttgatcacaatccccatgtagctcgctgccaccagcgacatgccgtacatttcggtcagatagttggtggagtaactcagaatggcgtagattgtgaagacaccaaaaatcaccatgctgcaataccaggtggtgctgatacgtaaaacggcaaggatgtcgctaagctggaatgactgtttttcttcgttattggcactgcgcaggttgttgttatcgctaacaaaaaaccagcacagaatccccaacaagatgtaaaccacactgtagatgataatgactgttttcaggctggcgctgtcatccggtgcaaagcgagaaaagacccacatggtaaacaccgccagcgacattacaccgacgccgcgcagcccttccatccagcccataattttcccttgctcactatgatcgcccagcaacgaggcggctttaatcgacaccgaccacagcattaaaatcgtcgttatcgcaaaggcgacctgaatacagagcattacccacagcggtggatacgttgccattaacagacccagtaatccggtaatgatcatcgcggaagtaatcattttgcggtgtgaaaatttatcggcaataacgccgctgggggcataaagaataatagccgcaataccaaaggtactcattattaaacctatctcggtattgctgaatcccataaatttcgccatgggaatttgataaatataacgtaaataagccaggtcaaaactaacgccgccgctaaaactaattatcgcgagggttatccaacggcgatatgagttgtgttgcatatcgtattcccatttgtaatagacaaaaaaaagagaaaagtaagccgccctttcaggtggattacttttctcaggtctctagtaattgcaataagaaataacatggaaagcagaggtgttgtgtgagagtaatcacgcttctgctttttaaaactatttgacaatacgaatatcacactgtgattacgatcacattagcagttatgccgttatgctaaaaattatctccagttaccagagataatgagaaaggtaacttccctctcgcgggggaagttacctttctttttttttgccttacggaaattggagctaactatgtcaatcgaatctctcaatgcgttctcaatggattttttctcactgaaaggtaaaaccgcaattgttaccggtgggaatagcggtttaggccaggcatttgccatggcgttggccaaagctggcgcaaatatctttattcctagtttcgtcaaagataacggcgaaacaaaggaaatgattgaaaaacagggtgttgaggtggacttcatgcaggtggatatcaccgcagaaggcgcgccgcagaagattatcgctgcttgctgtgagcgtttcggtacagttgatattctggtaaacaatgccggtatttgtaagctgaataaggtgctggacttcggtcgtgccgactgggatccgatgattgatgtgaacctgaccgccgcattcgagttaagctatgaagctgcaaaaattatgatcccgcagaaaagcggcaaaattattaatatctgttcattgttctcttacttaggtggacaatggtcacctgcatattctgccactaaacatgctcttgccggattcaccaaagcttattgtgatgaactaggtcaatataatattcaggtaaatggtattgcccctggctattatgcaacagatattacgctggcgacacgcagtaatccagaaaccaatcagcgcgttcttgatcatattccggcaaaccgttggggcgatactcaggatttaatgggcgcagctgtattcctcgcaagtccggcttcaaattatgtcaatgggcatttattagtggtcgatggtggttatttagtgcgctaatccataacggtggtttctgttttctcttattaatgattattccatttttattatcaggaaggaattactatgtctttatctcgcgcagcgattgtcgaccaactaaaggaaattgttggtgcagatcgcgtaattaccgatgaaacagtattaaagaagaacagtattgaccgttttcgtaaatttccggatattcatggcatttatactttgccgattccggcagcggtcgtaaaactcggttccacagagcaagtatcccgtgtgctgaattttatgaatgcgcacaaaattaacggtgtgccgcgtaccggcgcttccgccactgaaggtgggctggaaaccgttgtggaaaactcggtggtactcgacggctccgccatgaatcaaatcattaatattgatattgagaatatgcaggcgacggcgcaatgtggcgttccgctggaggtgctggaaaatgcgttgcgtgaaaaaggttacaccacggggcattctccgcagtcaaagccgctggctcagatgggcggcctggtagcaacccgcagtatcgggcagttctccacactctacggcgcaatcgaagatatggtcgttggtctggaagcagtattggctgatggcaccgtcacacgcattaaaaacgtgccacgccgcgcggctggcccggacattcgccacatcatcatcggtaacgaaggtgcactttgctatatcactgaagtaacagtgaaaatctttaaattcaccccggaaaacaacctcttctacggctatatcctggaagacatgaaaaccggcttcaacatcctgcgtgaagtcatggtggaagggtatcgtccgtcgatcgctcgtttgtatgacgctgaagatggcacccaacacttcacccattttgcagacggaaaatgcgtgctgatctttatggctgaaggtaaccctcgcattgcgaaggcgacgggcgaagggattgcggaaatcgttgcccgctacccgcaatgccagcgcgtggacagcaagctgatcgaaacctggtttaacaacctgaactggggaccggataaagtggctgccgaacgtgtgcagatcctcaaaaccggcaacatgggctttaccactgaagtgtccggctgctggagctgcatccacgaaatctacgaaagcgttattaaccgtattcgtactgagttcccgcacgccgacgacatcaccatgctgggcggtcattcctctcatagctatcagaacggcaccaacatgtacttcgtctacgattacaacgtcgttgactgtaagccggaagaggaaatcgacaagtaccacaatccgctcaacaagatcatctgtgaagaaaccattcgcctcggcggttcgatggtgcaccaccacggtatcggtaaacatcgcgttcactggagcaaactggaacacggcagcgcgtgggcgttgctggaagggctgaaaaagcagttcgatcctaatggcattatgaatacgggtactatctatccgattgaaaaataatgtgtcaggcagcgttccgcgatgacggggcgttgccttttcggcttctcaggcgagaagccgttcttattaccggacaatgaaggggtaaagatgaacacttcaccggtgcgaatggatgatttaccgcttaaccgttttcactgccgcattgctgcgctcactttcggcgcacacctgaccgacggttatgttctcggcgtcattggttacgccattattcagcttacgcccgccatgcaactgacgccgtttatggcgggaatgatcggcggctcggcgctccttggtttgttccttggcagcctggttcttgggtggatctccgaccatattggtcggcaaaaaatcttcaccttcagctttttgctgattacgcttgcttcgtttttacaattttttgccaccacgccagagcatcttattggactgcgcattttgattggcattggtctgggaggcgattattcagtaggtcacaccttgctggctgaattttccccgcgccgccatcgcggtattttgctgggcgcattcagcgtggtgtggaccgtaggctatgtgctggcaagtattgccggacatcactttatttccgaaaacccggaggcctggcgctggctactggcatcggcagctctgcccgcgttgttgattacgttattacgctggggaacgccagaatcaccacgctggctactgcgccaggggcgttttgcagaagctcacgctatcgtgcatcgctattttggtccccatgttttactgggcgatgaagtggtaacggcgacccataaacacatcaaaaccttgttctcttcgcgttactggcggcgcacggcgtttaacagcgtcttctttgtctgcctcgtaatcccatggtttgtgatttatacctagctgccaactatcgcccagactattggtctggaagatgcgctgactgccagcctgatgcttaatgcgttgttaattgtgggcgcgctgctgggattagttctgacgcacctgctggcacatcgcaaatttttgctgggaagttttttgctgctggcggcaacgctggtagtaatggcctgtttgccttccggcagttcattaacgctgctgctttttgttctcttcagcaccaccatttcggcagtcagtaatctggtgggcattttgcctgcggaaagttttcctactgacattcgctcgctgggcgtcggttttgccaccgccatgagtcgacttggcgcggcggtaagtactggcctgctgccgtgggtgctggcgcagtggggaatgcaagtcaccttattgctcctggcgacagtgttgttggttggttttgttgtgacctggctatgggcaccagaaactaaagccctcccgctggtggcggcgggaaatgtaggaggtgcgaatgaacattctgttagcgtttaaagccgaaccggatgccggaatgctggcggaaaaagagtggcaggcggcggctcagggtaaaagcggaccggatatttcgctactgcgaagtttactcggtgctgatgaacaggccgctgccgcgctgctgttggcgcagagaaaaaacggtacgccgatgtctttaaccgcgttgagcatgggggatgaacgggcattgcactggctgcgctatctcatggctcttgggtttgaggaagctgtattgctggagacggcggcagatctgcgctttgcgccggaatttgtcgctcgccatattgccgaatggcagcatcagaatccgctggatctgataattaccggctgccaaagcagcgaagggcagaatgggcaaacgccatttttgctggcggaaatgctgggctggccctgcttcacccaggtggagcgtttcactctcgacgcgctgtttatcaccctcgaacagcgtactgaacatgggttgcgttgttgccgggttcgcttgcctgcggtgattgccgtgcgtcagtgcggtgaagtggccttgccagtaccgggaatgcgccagcgaatggctgcggggaaagcagaaattatccgtaaaactgttgctgccgaaatgccagcgatgcagtgtctgcaactggcaagagcagagcaacgacgcggagcgacgctgattgatgggcaaacggtagcagaaaaagctcaaaagctatggcgggactatttacgccaaaggatgcagccatgaatatcgcaattgtgacaataaatcaggagaatgccgcaatagcaagctggctggcggcgcaggatttcagcggttgtaccctggcgcactggcagattgaacctcagcctgtagtggcggaacaggtgctggatgcgttggtggaacagtggcagcgaacgcctgcggacgttgttctctttccgccgggaacgtttggcgatgaactgtcgacccggctggcctggcgtttacatggtgcaagcatctgccaggtgacttcgttagatattccaaccgtaagcgtgcgcaaatcccactggggaaatgcgctaacggcgacgctgcaaacagaaaaacgcccgctatgcctttccctggcgcgtcaggcgggagcagcgaaaaacgccacgttgccctctggaatgcaacaactgaacattgtcccgggtgcgcttcccgactggctggttagcacagaggatctgaaaaatgttactcgcgacccattagctgaggccagacgggtgctggtggtggggcagggcggagaggcagataaccaggaaatcgctatgctggcagaaaagctgggagccgaagtgggctacagtcgggcgcgagtgatgaacggtggcgttgatgctgaaaaagtgattggtatttccggacatctgctggcacctgaggtgtgtattgttgttggcgcttctggcgcagcagcgttaatggcgggcgtacgcaatagcaagtttgtggtggcgattaatcatgacgccagcgctgcggtattttcacaggcagatgttggcgtggttgatgactggaaagtggtgctggaggcactggtgacaaacattcacgcagattgccaataacgtgttgccggatgatcctgcctacggttctggcctggggacttgtaggcctgataagacgcgtcaagcgtcgcatcaggcgctgaatgtcggatgtggcgtgcggcctacaaatcaaaccaaattcaattggttacgattatcccgtcaaagtaattttttcgctaacgtccagaccccggtattcgtggtggaaagcgccacgacacccgcgttaatcgcattacgcgcatcttcttcatcgcacaccagcccaccggcaatcagcggttggcggattttctctgtcacccagcccagcactttgggcatacagcctggcaggatctcaatacaatccggattcgattgcgcaacttgcttatcaatgttgtgaaacgaaattgaatcaacaataaacaggcgatgaatacagaaaaaaccttccgctcttgccgctttcaacattgaggctttggtactgataatgccgtccgcctcggtcaccagtttcaaaaactgaataacgacttctttatttgacgcgccttccagcaaatcaacatgaataaaagcatatttcccggcgttcttaatctttttaacgatattactgatggtgcagatattgccgtacaacacggaaataaactggcattcagagtcgatagccagttgcaggctggcattatctttaacggcagcaatcaccggattctggcggagcaggtgtaagaggggcataaattatccttattatttatccaaagcggtaggtgatgccgaatccggaaggcggatagcgccactgttgtagtgtggattcgtcgcacagcaaacggcaggtgccacactccaggcagccgtgataatcaacgcgtaagtcaccttccggtgtgagcgaaaaaagacctgccggacaggcgttaatcaaccgttgtaccatctgacgctcaacggagtcagccggaacaatgtgcggcgcatcagcaacgcgccagagattatgggctacagacatcgcagactcctgataacatcgcccgccagatgccacaggccatgacgacgtaaatgacgccagaataactggcgcagcggtggaacaggtttatcaccctgatcccataaatcgcgggaaatatcctgcattaacgcaggccacacccgataccagccagggcgttgcaaaagcgccggaacatgctgataacgctgtagaacatcccacagcaagctgcgctctacgttgtgatgataaagcggaaacagattttgcggctcgcggtgctggcaggcgcttatcagcgtttgtgccgccgcctgtgcgccagtcagcgccatatccatgccgcgcacggaaattccggtattgacgcaactgcgtaacgcatcgcccaccagcagccagccgttaccggcgtattgcaccggcatactgtgcaagccaccttctggcaccagatgcgcaccatactccagtgattccgtgtttttgataagcgggcgcactgccggatgcgctttaaagcgagtcagcaactcgcttgccggaacacgactttgcgtaagggaagagagcgggcaaacaatccctaacgagagcgtttgttgattagtataaagaaatgcgccgccgggtaagtcatcacagattccgccgctgaacagcaacgctgcgccttcgttattctccagatgaaaacgttcttcaatagcggatgtttccagcgacagcacttctttgatccccaacgccatcgcttcgccagcaggacgagtcactaacccgtgacgttcagccaggacgctgttggcaccttctgccagcaccacataacgggcgcggagaatatcgtcaccacaaatgacaccacacaccctgccgttttcttcatacagcgcatccaccgtcgcaccggggatgcattcgacaccttctttttcggcttcggcaaccagccacggatcgaaccgtgcacgtaatacactccaggattcaccgccgggctgtaagctggaaaacgtcgttgcaccatccggcgttaacagggaaaggctttcgtgagtgatgcgtcgttcaagaggcgcggtcaggtgaaattgcgggaggagttccgcgagtgcatgggtatataaccgcccgccggaaagatttttgctgccggggatttcagcgcgttccagtaacaaaacggataaacccgctcgcgcgcagcgtaacgcgcaagcggtgcctgcaataccggcaccaataataataatgtcgcagtcgtcttccatgtcatgccccagatatccagaacacaacaccctaacatagcgttacttaagggaaattgaccgccgacacactcttatcattcgccgcgatagatacaacctgcggtacaggtttcttttaccatcaccgcacttaacagcggcacaacgggtttaacctgatcccaaatccattttgctaaaacttcgctggttgggttttccagacctggaatatcattgagataatggtgatcgaggcgctcataagttggcttaaacgccgctttcagttcagcgaaatcgataatccagcccgtatgcggatcgacttccccggtaatttccagtcgcaccataaaggaatgcccgtgcaggcgaccacatttatgcccttccgggacgtgtggtaagcggtgagcggcttcgaaggtgaaatctttaaataacgtggtggacatcataatttctctacaggacgataaaaccgccgtagagtaccggaaaggctgttttttcgcattatctaaaacgactttgttgcgcaaaatcgctgatttatcttaatgattggctaaattcatttgtttttcattaggttggttaatctattttgttgttaaagactattgctaaaacaggttagtcgatttggttattagttatcgctatcccgtctttaatccacaccgttcaccccgttaaccttaccttctcttctgttttatgggcgctgacagggcgcagaaacagctttgcttactggaacataacgacgcatgacgacacaggtcccaccttccgcgttgcttccgttgaacccggagcaactggcacgccttcaggcggccacgaccgatttaacgcctacccagcttgcctgggtttctggctatttctggggcgtactcaatcagcagcctgctgcgcttgcagcgacgccagcgccagccgcagaaatgccgggtataactattatctccgcctcgcaaaccggcaatgcgcgccgggttgctgaagcattacgcgatgatttattagcagcaaaactgaacgttaagctggtgaacgcgggcgactataaattcaaacaaatcgccagcgaaaaactgcttatcgtggtgacgtcaacgcaaggagaaggggaaccgccggaagaagccgtcgcgctgcataagttcctgttctccaaaaaagcgccgaagctggaaaacaccgcatttgccgtgtttagcctcggcgatagctcttatgaatttttctgccagtccgggaaagattttgacagcaagctggcggaactgggcggtgaacgcctgctcgaccgtgtcgatgccgatgttgaataccaggctgctgccagcgagtggcgcgcccgcgtggttgatgcgcttaaatcgcgtgcgcctgtcgcggcaccttcgcaatccgtcgctactggcgcggtaaatgaaatccactccagcccgtacagcaaagacgctccgctggtggcgagcctttcggttaaccagaaaattaccggacgtaactctgaaaaagacgttcgccatatcgaaattgacttaggtgactcgggcctgcgttaccagccgggtgacgcgctgggcgtctggtatcagaacgatccggcactggtgaaagaacttgtcgaactgctgtggctgaaaggcgatgaacctgtcaccgtcgagggcaaaacgttgcctctgaacgaagcgctacagtggcacttcgaactgaccgtcaacaccgccaacattgttgagaattacgccacgcttacccgcagcgaaacactgctgccgctggtgggcgataaagcgaagttacagcattacgccgcgacgacgccgattgtcgacatggtgcgtttctctccggcgcaactggatgccgaagcgctgattaatctgctgcgcccgctgaccccgcgcctgtattccatcgcctcctcgcaggcggaagtcgagaacgaagtacacgtcaccgttggtgtggtgcgttacgacgtggaaggccgagcccgtgccggtggtgcctccagcttcctcgcggatcgcgtggaagaagagggcgaagtccgcgtatttatcgaacataacgataactttcgcctgcccgctaacccggaaaccccggtgattatgattggcccaggcaccggtattgcgccgttccgcgcctttatgcagcaacgcgccgccgacgaagcgccaggtaaaaactggctgttctttggtaatccgcactttacggaagacttcctgtaccaggtggagtggcagcgctacgtcaaagatggcgtgctgacacgtatcgatcttgcctggtcgcgcgaccaaaaagaaaaagtttacgtacaagacaaactgcgcgaacagggcgcggagctgtggcgctggatcaatgatggtgcccacatttatgtctgcggcgacgctaatcgcatggcgaaagacgttgagcaggcacttctggaagtgattgccgaatttggtggcatggacaccgaagcggcggatgaatttttaagtgagctgcgcgtagagcgccgttatcagcgagatgtctactaatgagcgaaaaacatccagggcctttagtggtcgaaggaaaactgacagacgccgagcgcatgaagcttgaaagcaactacctgcgcggcaccattgcggaagatttaaacgacggtctgaccggcggctttaagggcgataacttcctgctgatccgcttccacggcatgtatcagcaggatgaccgcgacatccgcgccgaacgtgctgaacagaagctggagccgcgccacgcgatgctgcttcgctgtcgtctgccgggtggggtgattaccactaaacagtggcaggcgatcgacaaatttgccggtgaaaacaccatctatggcagcattcgcctgaccaaccgccagacgtttcagttccacggcattctgaaaaagaacgtcaaaccggtgcaccagatgctgcactcggtcggtcttgatgcgctggcgacagctaacgacatgaaccgtaacgtactctgcacctcgaacccttacgagtcgcagctgcacgcggaagcgtacgagtgggcgaagaagatttctgagcatctgttgcctcgtacccgcgcgtatgcggagatctggctcgaccaggaaaaagtcgccactactgatgaagaaccgatccttggtcagacctacctgccgcgtaagttcaaaaccacggtagtgatcccgccgcagaacgatatcgatctgcatgccaacgacatgaacttcgtggcaatcgccgaaaacggcaagctggtaggcttcaacctgctggtgggcggtgggctttctatcgaacacggcaacaagaaaacctacgcccgcacggcgagcgagtttggctatctgccgctggagcatacgctggcggtggccgaagccgtcgtgacaactcagcgtgactggggtaaccgaaccgatcgtaaaaatgccaaaaccaaatacacgctggagcgcgtgggggttgagacgtttaaagcggaagtggagcgtcgcgcggggatcaaatttgaaccgatccgtccatatgagttcaccggacgaggcgatcgtattggctgggttaagggcattgatgataactggcacctgacgctgtttatcgaaaatggtcgcatccttgattatccggggcgtccgctgaaaaccggcctgctggagatcgcgaagatccacaaaggcgatttccgcattacggcgaaccagaatctgatcatcgccggtgtaccggaaagcgagaaagcgaagatcgagaagatcgccaaagagagcggtttaatgaatgccgtcacgccgcagcgtgaaaactcgatggcctgcgtgtcattcccgacttgcccgctggcgatggcggaagcggagcgtttcctgccgtcttttatcgacaacatcgataatttaatggcgaaacatggtgtcagcgatgagcatatcgtgatgcgtgtaacaggctgcccgaacggttgtggtcgcgcgatgctggcggaagtgggcctggtgggtaaagcaccgggtcgctacaatctgcatcttggcggcaaccgcattgggacacgtatcccacggatgtataaagaaaacatcaccgagccggaaatcctggcgtcgcttgatgaactgatagggcgctgggcgaaagagcgcgaagcgggtgaaggcttcggcgactttacggtgcgtgcgggcatcattcgcccggtgctcgatccggcgcgcgatttgtgggattaaccatcagcccggtcttgtaggcctgataagacgtgtgagcgtcgcatcaggcaaggcaaacagtgaggaatctatgtccaaactcgatctaaacgccctgaacgaactgccgaaggtagatcgcattctggcgctggcagaaactaacgccgaactggaaaaactggacgctgaaggccgcgtcgcctgggcgctggaaaatctgcccggtgaatatgtactttcctccagctttggcattcaggcggcggtgagcctgcatctggtgaatcagattcacccggatattccggtgatcctcaccgacaccggctatctgttcccggaaacctaccgctttattgacgagttaacggacaaactcaagctcaacctgaaagtgtaccgtgctaccgaaagcgcagcctggcaggaagcacgctacggaaaactgtgggagcagggcgttgaaggcattgaaaagtacaatgacatcaacaaagtcgaaccgatgaaccgggctctgaaagaacttaacgcgcaaacctggtttgctggcctgcgccgtgaacaatccggcagtcgcgccaatttaccggtgctggcaattcagcgtggcgtatttaaagtgctgccgattatcgactgggataaccgaactatttatcagtacctgcaaaaacatggcctgaaatatcacccattatgggatgaaggatatttatcggtcggtgatacccatacaacccgtaaatgggaacctggcatgtcggaagaagaaacacgtttctttggcttaaaaagggaatgtggattgcacgaagggtaaatattgccggataaattaaacgcctctgtcagaaatgatgggggcgtttttattttgcgagcagtattcctgattttaaacgtgaacgccgctggaagaattatcaggtatagaatggcgtcgggtgcttgaggctgtctggcgttaagcattcgcgaggttccagatggacaaaagccccaggcgatatttctatcaacctgaggcttacgttcgaacccaaacaattcgaatgttagtctcttctttgcagggaggcaagacatgctgacaaaatatgcccttgtggcaatcatagtgctgtgttttacagtactgggattcacgctgatggtaggcgactcgttgtgtgagttgagtatcagagaacgtggtatggagtttaaggcagttctcgcttacgaatcgaagaagtagccaccacgcgggggtaaaaccccgcgtactgaattgtgatggtttggtctcctgcacccttttttaatttatattgtttatgtgaatattatgcctatgtttattattcatatatattacggatgaaaattatttgattattcataatgtaaatattttattgaatgatatatatcacagataatttttaatatatgcgtaaatatcctttaagtttactgaaggataaaaatattgtgactttttttgatttctggggaaaaacccgacgcggcgagaaagacgggggcgacgactatcaccttctttgctggcattcgctggatgtagccgcgatgggctatttaatggttaaaagaaattgcttcgggctggctgattattttcgtcaattagggatttctgacaaggaacaggcggctcaatttttcgcctggttgctgtgctggcacgatattggaaaatttgcccgctcttttcaacaactttacctgccccctgaactcaagattcaggaaggtgccagaaaaaattacgaaaaaatctctcattcaacgctgggctactggttgtggaatcattatttaagtgaatgtcaggagttacttccttcatcttcgctctctccgcgcaaacttaggcgagtgatagaaatgtggatgcccgtgacgacagggcatcatggtcggccccctgatcgtatggatgaattggataattttctgcctgaagacaaagctgcagcacgagattttctccttgaaatcaaaccactgtttccgctcatagagatccccgcattctgggatgatgatgagggcattgaacttataaaacacctttcctggtatatctctgcaaccgtcgtgctcgcagactggacgggttcgtcaacgcgattttttccacgcgtcgcacacccaatggatattaaaggttactggcagaaaactttaattcaggctcaaaacgccttaaccgtctttcctctaaaagcaaaagtcgcgcctttcaacggaattaatacgctgtttccttttattgagaatccgacaccgttacagcaaaaggtgctggatctggatatcagccagcaaggaccgcagttatttattctggaagatgtgactggcgcaggtaaaacagaagcggcgcttatcctggcgcacaggttgatagctgcggggaaagctcaggggctgttttttggtctgccaacaatggcaacggccaatgccatgtacgatcggctggtcaaaacctggcttgctttctattcgccagaatcccgccccagcctggtgctggcacatagtgcccgcacattaatggaccgctttaatgaatcactctggtctggtgatttagtcgggtcagaagaaccggatgaacaaacgttcagtcagggatgtgcggcctggtttgccgacagtaacaagaaggcgttgctggctgaaattggcgtcggcacgctggatcaggcgatgatggcggtgatgccgttcaaacataataatctgcggcttctggggctgagtaacaaaatcctgctggctgatgagatccacgcctgtgacgcttacatgtcgtgcattcttgaagggttgatcgagcggcaggcgcgtggcggaaacagcgttattttgctttctgccacgttatctcaacagcagcgcgacaaactcgtcgctgcctttgcgcggggtacagagggcctgcaagaagctccgttcctggaaaaggatgattacccctggctgacgcatgtcacgaaatccgatgtgaactcacaccgggtagcgacgcgcaaagacgttgagcgtagcgtcagcgtgggttggcttcatagtgaacaagagtgtattgcgcgtatcgaatcggcggtaagtcaggggaaatgcatcgcctggatccggaattctgtcgatgacgctattaaggttcatcgtcagctgcttgcccgcggcgtcattcctgcttccagcctttcactttttcatagccgctttgcttttagcgatcgccagcgaattgaaacggagacactggcacgctttggtaaatattgtagtttacagagagcgtctcaagtcattgtttgtacacaattaattgagcaaagcgtggatattgacctggacgaaatgatctccgacctggcccctgttgatttgctgattcagcgagcaggacgattacagcggcatatccgcgatattaatggtcagttaaagcgtgacggaaaggacgagcgttccccccctgaattgctgattctggctcccgtctgggacgactctcctggcgacgaatggtttggcagtgccatgcgtaacagtgcatttgtctatcccgatcatgggcgaatctggctgacgcagcgtgtgctgcgtgagcaaggtgctattcagatgccacacgcagcccggcttcttattgaatccgtctacggtgaggacgtggtaatgccggaaggatttgcccgcagcgagcaggagcaagtgggcaaatattactgcgatcgcgcaatggctaaaaagtttgtgctgaacttcaggcccggctatgccgccaatatcaacgattacctcccggaaaaactgtcgacacgtctggctgaggagtctgtttccctgtggctggctacctgtattgacggtgtggtgaagccttatgccaccggtgctcacgcatgggaaatgagcgttgtcagagtgcgccgaagctggtggaaaaaacatcgggatgagttttctttactggagggagaggcgttcaggctgtggtgcattgaacagcgacaagatccggagatggcaaacgtgattttagtcaacgatgacgaaagttgcgggtattcggctacggaaggattgattggcaaggttggttgagatgtctgcgacaggactctctgaatagttgatacaccgaaaaggatggaaagatggacaaccgacctgggatggtcttttttacgagaggatgcgtatgaactcgttttcacttctgacaaccccgtggttgcctgttcgttttaaagacggaacgacaggcaagctggcaccagtcgatctggctgatgaaaatgttgtcgatatcgctgcgccgcgggcagatctccagggtgcggcctggcagtttttgctggggctactacaaaccagcttcgcgcccaaaaatcacggtcgttgggatgatatctggcaagacggactggaggctgaaaagctacgggaagcattgctgtccttagaacacgctttccagtttggggcagattccccttcatttatgcaggatttcgaggcgctcaagggagataaagttcaggtcgcttcgctactgcctgagattcccggcgctcaaacaacgaagtttaataaagaccactttattaagcgtggcgtgactgaacacgtatgccctcattgttccgcgttagctctgttctccctacagttaaatgcgccatcaggcggcaaaggctatcgcaccggtttgcgcggcggtgggccgatgaccactctgattgaattacaggaatatcaaggcaatcaacaaacgcccttgtggcgcaaactgtggcccaatgtgatgccgcaggatgaagccgacttaccgctacccaaaaaatttgacgatctggttttcccctggcttggcccgacgcgaaccagcgaactggccggtgcggtggtaacccatgatcaggtcaataaactccaggcttactggggaatgccgcgccgtattcgtattgattttaataccacgacagtcggcaactgcgatatttgcggtgaacagagcgacgcgctcctgagcctgatgacgaccaaaaattacggtgcgaattatgccatgtggcagcatcccttaacgccttaccgtataccacttaaagagggtggcgagttttactcggtcaaaccacaaccgggcggtttaatctggcgcgactggttaggccttatcgaaacgggtaaatcagaaaacaatacggaacttcccgcgctggtggtgaaactctttaatgccagcagtctgaaacaggcaaaagtaggcctgtggggatttggctatgatttcgacaacatgaaagcgcgctgttggtacgaacaccatttcccgctgctgctcaagaaaaaagaaggccagataccgaaactgcgtctggctgcgcaaacggcttcacggattctaagtctgttacgaagtgcattgaaagaagcgtggttctccgatccaaaaggtgcacggggtgatttcagttttgtggatatcgacttctggaacaaaactcagcatcgcttcctgaggttagtgcgccaaattgaagaaggtcaggatgcggacgaattactcggcaaatggcaaaaggaaatttggttattcgcgcgtcaggattttgacgagcgtgtattcaccaatccatatgagcctgttgatttgaaacgcgttatgaccgcgcgcaagaaatatttcacaacatcggcggagaagcaaagtgctaaagccgctagggagaaaaagcaggaggctgctgaatgagtattgtaaaagaggagcacaaagccacgctgcgtaaatggcgcgaagagttgcaggctaaacgcggcaatcgtgcaagtctgcggcgtagcacaacggttaatgatgtttgcttgtcagaagggtttcgttctctgctgatgcagacccacactttgtggaaaattgaagcacaagagtggcgttttaccgcactggcgctggtcgccgcagttagcgccaatgtaaaagctattgatgaacggcagccttttgccgcgcagctggcggcggtaatgtcaaaggggcgttttactcgtctgtcggcagtaaaaacaccggatgaattactgcgccagttacgccgcgcagtcagattattaaacggttccgtcaatcttgactctctggcagagggggtcttccgttggtgccaggagagcgacgacctgctcaatcatcaccgccgccagcagcggccaaccgaatttatccgtatccgctgggcgctggaatattaccaggctggcgacgccgataacgaacaaaatcaataaaggactatctcatgacaacatttattcagcttcatttgttaaccgcttaccctgctgccaaccttaaccgtgatgataccggtgcgccaaaaactgtggtgctgggtggagcaacgcgtctgcgcgtttcctcgcaaagtctgaaacgagcgtggcgcacttctgcactttttgaacaggcactggcgggccatattggtattcgcagtgggcgtattgcgcgtgaggcggcaactatcctgattgagaaagggattgaagataaaaaagccatcgaatggtcggcaaaaattgctgattatcttgggaaagctaaaaatgacaaaaaaccaaaagatccgctcactaacgccgaaactgaacagttagtccatatcagcccggcagaatttgacgccgtaaaagcgctggcccatcagcttgcagaagaaaagcgcgcgccaaaagaggaagatctcgcgttgttacgcaaagaccgtatggcggtagatattgccatgtttggtcgtatgctggcgaataaacccgagtttaatgttgaagccgcctgccaggtagcgcacgcatttggtgtcagtgaaacgattgtcgaagatgattttttcaccgccgttgatgatttgcgccaggcttctgaagatgccggtgccgggcatcttggtgaaaccggattcggttctgcactgttctacacctatatctgcattgataaagatctgctggtcgaaaaccttggcggtgacgaagcgttagctaatcagaccatacgtgcctttacggaagccgcacttaaagtctccccaaccggcaaacagaacagctttgccagccgtgcctacgcctcctgggcgctggcagaaaaaggcaccgatcaaccgcgttctctggcggcagctttctatgaacccattaatggcacccgtcagttagaggtggcggtgcagcgtattacaactcttcgcgaaaatatgaatacggtctacgaacagaagaccgattacgcaagttttgacgtgatgaacaaacagggaagcatgaaggacgtgctggactttatctgcgcgtaaggggcggcttatgagccaatatctgatttttcagcttcatgggccgatggcatcctggggcgtcgatgcccccggcgaagtgcgtcatacccatgaactgccttcgcgctcagcattgctggggctgctggctgccggggtagggatccggcgtgatgataccgaacgcttaaacgcgtttaatcgccactattcactggtggtttgcgccagccgtaacccgcgctgggcacgggattatcacacggtccagatgccaaaagaggtgcgtaaagcacgttatttcagccgtcgcgaagagttgagcgcccctgagcttttgagcgcgattatctcccggcgcgactactacaccgatgcctggtggatggtggcggtggcaacaacccccgatgcgccttacagcctcgaacagttgcaggacggtttacgccatccggtttttccgctttatctggggcgaaaaagtcatccgctggcgttaccacttgcgccgttactactcgaaggcaacgcgtcggataccttacgtaacgcataccaacagtatcaggatcatttccgcaaactgaaagtctcactcccaaaacttcaggatgaatgctggtgggaaggggaacacgacggcctggtcgcgagcaaaatattacgccgtcgggatgttcctttaaatcgtcagcagtggttgtttggggaacgcaccgtcaatcaggggccgtggctcagcaaggaggaaccatgtacctctcaagaataaccttacataccggccagctttccccagcgcagttgctgcatctggtggatcgcggtgaatatgtgatgcatcagtggctgtgggatctcttccctggcggcaaagaaaggcaatttctttatcgtcgggaagaactccagggcgcgtttcgcttttttgtcctctcgcaggaacgcccggcggaaagtgaaactttcaccatcgaatgccgaccatttgtgtccgagctgcgtaccggacaatctctttgtttcaacctgcgggcgaatccaacaatctgtaaagcgggcaagcgccacgatctgctgatggaggcgaaacggcaggtgaaggggcaggcggaagggcgtgatatctggttgcatcaacaacaggcggcgctggactggctggcagcgcagggggaaagaagtggttttacactactggatacctcggttgatgcctaccgacaacaacaactccggcgggaaaacacccggcaactgatccagttcagtagcgtggattatacggggatgcttacggtcaccgatcctgggttatttctgcaacgtctgagccaggggtatggcaaaagccgggcgttcggctgtggtctgatgctgatcaaacccggagccgaggcgtgacgtttgtaccactgagcccgatcccattaaaagatcgcaccaccatgatcttcctccagtacggtcagatcgacgtactggacggcgctttcgtgctgatcgacaaaacagggatccgcacacatattccggtaggatcggtcgcctgcattatgctcgaaccgggaacgagagtttcccacgcggcggtgcatctggccgccacggtgggaacactgctggtctgggtcggtgaagcgggcgttcgcgtttactcatccggacaacccggaggggcgcgggcagataaattactctaccaggcaaagctggctttaacggaagatctacgcctgaaggtggtgcgcaaaatgtatgaattacgttttcgtgagccaccgccagctcgccgttcagtggagcagctacgtggaattgagggatctcgcgttcgccagacgtatgcattactggcgaaacaatatggtgtgaaatggaatggtcgcaaatacgatcctaaagactgggaaaaaggcgatgttgtgaatcgctgcatcagtgctgctacatcatgtctgtacggtatatctgaagcggcagtattagccgcgggatatgcgcccgctattgggtttatccatagtggcaaaccgctttcatttgtttatgacatagccgatatcattaaatttgattcggttgtaccaaaggcatttgaaatagcggcgaggcaacccgcagaacctgataaagaagtcagattagcctgtcgtgatattttccgtagcactaagttaacgggcaaattaataccgttaattgaggaagtccttgccgcaggtgaaattgaaccgccacaacctgcgccggatatgttaccgccagccatccccgaacctgaaacgttgggcgatagcggtcatcgaggacgcggctgatgagcatggtcgtggttgttacagaaaatgtcccgccgcgcttacgtggacggctcgcaatctgactactggaagtgcgtgccggtgtgtatgttggtgatacatcaaaacgtattcgggagatgatctggcagcaaattacccaactggcaggttgtggaaatgtggtcatggcctgggcgacaaatactgagtctggttttgagtttcagacctggggcaaaaacagacgtattccggtggatttggatgggttacgtttggtttcttttcttcctgttgataatcaataagttagacgttctttaaaaataaggaaatgtttgaatttagttggtagattgttgatgtggaataaatttgtttaaaaacagatatgtatgcttagtgtgttccccgcgccagcggggataaaccgctattggcctcactgccaccgcagttaatactgtgttccccgcgccagcggggataaaccggtggttacctagttgctatgtgttcgtgacaagtgttccccgcgccagcggggataaaccgcgccgagcgtggcgcggatataaaaaagccccgtgttccccgcgccagcggggataaaccggaatatcgggtgccagcctggacgctggccgagtgttccccgcgccagcggggataaaccgacgcgaatcggcggttttgagcgggtagcaaagtgttccccgcgccagcggggataaaccgctccgctctgtgttcgataaactcatccagcagtgttccccgcgccagcggggataaaccgaattaaaatccccgtttctgttacatgggcgagtgttccccgcgccagcggggataaaccgaattttcttcattgctcaaacaggctgcataacgtgttccccgcgccagcggggataaaccggactcaaccgcgcttcccggcctcaccactgcgtgttccccgcgccagcggggataaaccggcgaaaaaatacggctggatgcgacaaaaaaagtgttccccgcgccagcggggataaaccggagaagaagctcctgagctaaccgttgaagagcgtgttccccgcgccagcggggataaaccgccaaagaagaacaacgagccaactggtttcaggtgttccccgcgccagcggggataaaccggcaatttgttgtccgcgatccggtacgcgcgtgtgttccccgcgccagcggggataaaccgcggctatggaatttatggagaagtttggttttgtgttccccgcgccagcggggataaaccgggcgcactggatgcgatgatggatatcacttagaattccccgcccctgcggtagaactcccagctcccattttcaaacccatcaagacgccttcgccagctccttcaccaacggtagcattatccgcataacgtcacggcagcgacgttctattcttccaggaagtgccttatcaatatgctgttgattatccagtcttacgtcatgccagctatttcccgcagggaatgcggctgtttttgcgcgttgctgataaccatccttattcccaagattccagttagtcgcttccaccgaaagtacagcaatgcccgctttgtcgaatatttctgcgtcattacaacacccagtgcctttcggataatttttattcaaacccggattggtcgttgcggctattccgtgactgcgcgcaattgccagcgccctgtcgcgcgttaatttccttactgcttcaggggtttttacaccgctgttgaaatacaatttatcgccaacaattaagttatcgagattaatcaccagcagcgtatttttcttttcggtgtcactcatccgcttgagtaaattctcagcgcctaatttcccttcctcttcgccgctggtcgccacaaatcgaataccatactcggtaggcgtatttttcaggcgttctgccaattccagcatgacacctaaacctgcggcgttatcatccattccttgtaacgtcagcccgccgagattggcatcggcgtcagcatcgctcagcggggcgtaagtatccagatgcgccataatgatgatctgctgcggcgctttgccttcatgagcggcaatcaccgtacttcctgtcacgttatgccagttcttgcgattatcgcgggcggtataaatataccgactattaaatgtccgaatatcactgcgataacccatttgctgaaactgttggcgaatataatcggcagataacatttctgctggagttccggtcatgcgtcccggaaagaaagtagcaatatgtcgtgcctgggtattagcaaaatcgccaggtttaggtgacgaggcgtgtacggggagaataaagcatacgccgagcgccagggcagcggtacggtggcgcaatgcggaaaacatagtgagtccttaaataccatgcaaatttttttaccgccatagtatgaaactgccgctgcgctaaaacaatttcaaatcttcctaaacgcccgaaatccggtgccttaagcactttttgatattagctttgccaaatcgttattccgttaaggaactactcattctaattggtaatttcattcgttctcttacgctccctatagtcgaaacatctgatggcaagaaaatagcggtattgcaaaggaacggttatggatcaaaaacgacttactcacctgcggcaactggaggcggaaagcatccacattattcgcgaggtggcggcagaattctcaaatccggtgatgctctactctatcggtaaagattccagcgtcatgctgcatttggcgcgcaaggcgttttatccaggtacgctgcctttccccttgctgcatgtcgataccggctggaaattccgcgagatgtatgagttccgcgatcgtacggcgaaagcctacggctgcgagctgctggtgcataaaaacccggaaggcgtggcgatggggattaatccattcgtgcacggcagcgcgaaacataccgatattatgaagaccgaaggcctgaagcaggcgatgaataaatacggttttgatgccgccttcggtggtgcgcgccgcgacgaagagaaatcccgtgctaaagagcgtatctactctttccgtgatcgcttccatcgctgggacccgaaaaatcagcgcccggagctgtggcacaactataacgggcagattaacaaaggcgaaagcatccgcgttttcccgctctctaactggaccgagcaggatatctggcaatacatctggctggaaaatatcgacattgtgccgctgtatctcgctgcggaacgtccggttctggaacgcgacggtatgttgatgatgattgatgacaaccgtatcgacctgcaaccgggcgaagtgattaaaaaacggatggtgcgtttccgtacgctgggctgctggccgctgaccggtgcggtggagtcaaatgcacaaacactgccggagatcatcgaagagatgctggtttccaccaccagtgaacgtcagggccgcgtgattgaccgcgaccaggcggggtctatggagctgaaaaaacgtcaggggtatttttaagatgaacaccgcacttgcacaacaaatcgccaatgaaggcggcgtcgaagcctggatgattgcgcaacaacataaaagcctgctgcgttttctgacctgtggtagcgtcgatgacggcaaaagtaccctgattggtcgcctgctgcacgatacccgccaaatctacgaagatcagctctcatcgctgcataacgacagtaagcgtcacggcacccagggcgaaaaactggatctggctctgctggtggacggcctgcaagctgagcgcgaacagggcatcactattgatgtggcctaccgctatttctctaccgagaagcgtaaatttattatcgccgacacccccgggcacgagcagtatacccgcaatatggcgaccggcgcctcaacgtgtgagctggcgatcttactgatcgatgcccgtaaaggcgtgctcgatcaaacccgtcgtcacagttttatctccacgctgctggggatcaaacatctggtcgtagcgatcaacaaaatggatctggtggattacagtgaagagacattcacccgcattcgtaaagactacctgactttcgccgaacagttacctggcaatctggatattcgctttgtgccgctctctgcgctggaaggcgacaacgtggcttcgcaaagtgaaagtatgccgtggtacagcggtccgacactgctcgaagtgctggaaaccgtggagatccagcgagtggtggatgctcagccaatgcgcttcccggtgcagtacgttaatcgcccgaatctcgattttcgtggctacgccggaacgctggcatccggtcgcgtggaagtcgggcaacgtgtaaaagtgctgccttctggtgtggaatcaaacgtcgcgcggatcgtgacttttgatggtgatcgcgaagaagcctttgccggagaagcgatcaccctggtgctgacggatgagatcgacatcagccgtggcgatctgctgctggcggcagacgaagcgttaccggcggtgcagagcgcgtcggtggatgtggtatggatggcggaacagccgctttctccagggcagagttacgacatcaaaattgccggtaagaagacgcgcgcgcgtgttgatggcattcgctatcaggttgatattaataaccttacccagcgtgaagttgaaaacctgccactgaatgggatcggcctcgtggatctcacttttgacgagccgctggtgttagatcgttatcaacaaaatccggtgacgggtgggctgatttttatcgatcgcctgagcaatgtgaccgtgggtgccggtatggtgcacgagccagttagccaggcaactgctgcgccatctgaattcagtgcattcgaactggaattgaatgctctggttcgtcgccactttccgcactggggcgcgcgcgatttgctgggggataaataatggcgctgcatgacgaaaacgtcgtctggcatagccatccggtcactgtgcaacaacgcgagctacaccacggtcatcgtggtgtagtgctgtggtttaccggcctctccgggtccggtaaatcaacggtcgccggggcgctggaggaggcgttacataaactcggcgtcagtacgtatctgctggatggcgacaatgttcgccacggattatgcagcgatctcggttttagcgatgccgatcgtaaagagaatatccgtcgcgtcggtgaagtggcgaatttgatggttgaagccggactggtggtgctgaccgcatttatctcgccacaccgcgccgaacgccagatggttcgcgaacgcgtaggagaagggcgctttatcgaagtgtttgtcgatacgccgctggcgatttgcgaagcccgcgatcccaaaggcttatataagaaagcgcgtgccggtgaactgcgcaactttacgggaatagattccgtttacgaagcgcctgaatcggcagaaattcatctcaatggtgaacaattagtaacaaatttggtacagcaattattagatctgttgagacagaacgatattatcagatcctgagacaccaccgggtttccatgcccggttcgtcaaagtaacaggatcaaatatgcgtaatagccataacattacactaacaaataacgacagccttactgaggatgaagaaaccacatggtcactgcctggtgccgtggtcggttttatctcctggttatttgcgctggcgatgccgatgttgatttatggctctaacacgctgttcttctttatctacacctggcctttctttctggcgctgatgcccgtcgcggtagtggtggggattgcgctgcattcattgatggacggaaagctacgctacagtattgttttcaccctggtgacagtaggcattatgtttggcgcactgtttatgtggctactgggctaatttgtactttcttgtctcctctgttcataattcaaaccgtaactaataatgagattatgttctgcacgccctgggtatacgtaacaatggacaaatgtggtacatttgcccgcgttgtcgcggtatccccaacagaggatgtagagtcgtcttcggatgcatgggatgatgatgccgtttttcagggggcaggatgggtaaactaacgctgctgttgctggctattctggtctggctacagtattcgctgtggttcggtaagaacggtatacatgactatacccgcgtcaatgatgatgtggcggcacagcaagctacaaacgcgaaacttaaagcgcgaaacgatcaactttttgccgaaattgacgatctcaatggcggccaggaggcgctcgaagagcgtgcgcgtaatgaactcagcatgaccaggccgggcgaaactttttatcgtctggtgcctgacgcgtcgaagcgcgcacagtctgcggggcaaaacaatcgataaatcagcccgggaattaacatggcaaccactcatttggatgtttgcgccgtggttccggcggccggatttggccgtcgaatgcaaacggaatgtcctaagcaatatctctcaatcggtaatcaaaccattcttgaacactcggtgcatgcgctgctggcgcatccccgggtgaaacgtgtcgtcattgccataagtcctggcgatagccgttttgcacaacttcctctggcgaatcatccgcaaatcaccgttgtagatggcggtgatgagcgtgccgattccgtgctggcaggtttgaaagccgctggcgacgcgcagtgggtattggtgcatgacgccgctcgtccttgtctgcatcaggatgacctcgcgcgattgttggcgttgagcgaaaccagccgcacgggagggatcctagccgcaccagtgcgcgatacgatgaaacgtgccgaaccgggcaaaaatgccattgctcataccgttgatcgcaacggcttatggcacgcgctgacgccgcaatttttccctcgtgagctgttacatgactgtctgacgcgcgctctaaatgaaggcgcgactattaccgacgaagcctcggcgctggaatattgcggattccatcctcagttggtcgaaggccgtgcggataacattaaagtcacgcgcccggaagatttggcactggccgagttttacctcacccgaaccatccatcaggagaatacataatgcgaattggacacggttttgacgtacatgcctttggcggtgaaggcccaattatcattggtggcgtacgcattccttacgaaaaaggattgctggcgcattctgatggcgacgtggcgctccatgcgttgaccgatgcattgcttggcgcggcggcgctgggggatatcggcaagctgttcccggataccgatccggcatttaaaggtgccgacagccgcgagctgctacgcgaagcctggcgtcgtattcaggcgaagggttataccctgggcaacgtcgatgtcactatcatcgctcaggcaccgaagatgttgccgcacattccacaaatgcgcgtgtttattgccgaagatctcggctgccatatggatgatgttaacgtgaaagccactactacggaaaaacttggatttaccggacgtggggaagggattgcctgtgaagcggtggcgctactcattaaggcaacaaaatgattgagtttgataatctcacttacctccacggtaaaccgcaaggcaccgggctgctgaaagccaatccggaagactttgtggtggtggaagatttgggctttgagcctgatggtgaaggtgagcatattctggttagaatcctcaaaaacggctgcaatacccgttttgtggcggatgcactggcgaaattcctgaaaattcatgcccgtgaagtcagcttcgctgggcaaaaagacaaacatgctgttacggaacagtggttatgcgctcgcgtgccaggcaaggaaatgcccgatctgagcgcctttcaactggaaggctgccaggtgctggagtatgcgcggcacaagcgcaagctgcgtttaggcgcgctgaaaggtaacgcctttaccctggttctgcgcgaagtgagcaatcgcgatgacgttgaacaacgtctgatcgatatttgcgtaaaaggtgtaccgaactacttcggtgcccaacgttttgggattggcggtagcaacttgcagggggcgcagcgctgggcgcaaaccaatactccggtgcgcgatcgcaataaacggagtttttggttgtcggcagcccgcagtgcgttgtttaatcagattgttgctgagcgcctcaaaaaagcagacgttaatcaagttgttgacggcgatgcgctacaattagccggacgtggtagctggtttgtcgcaaccaccgaagaactggcggaattacagcgtcgcgtcaacgataaagagctgatgataaccgccgcattgccgggcagtggcgaatggggaactcagcgtgaagcgctggcattcgaacaagcagctgtcgccgcagaaactgaattacaagctttactggtgcgcgaaaaagttgaagccgcgcgcagagcgatgctgctgtatccgcaacaattaagctggaattggtgggatgacgtcaccgtagagatccgtttctggcttccggcgggtagttttgcaaccagcgttgtcagggaacttatcaacacaacaggtgattatgcgcatattgctgagtaatgatgacggggtacatgcacccggtatacaaacgctggcgaaagccttgcgtgagtttgctgacgttcaggtggtcgcccccgatcgtaaccgcagcggcgcttcaaattctctgacactggaatcctccctgcgcacgtttacctttgaaaatggtgatattgctgtgcaaatgggaaccccgaccgattgcgtctatcttggcgtgaatgctctgatgcgtccgcgcccggacattgttgtgtccggaattaacgccgggccgaatctgggggatgatgttatttattccggtacggtagccgccgcgatggaaggccgtcatttaggttttccggcgcttgccgtctcgcttgacgggcataaacattacgacactgccgcggcggtaacctgttcaattttgcgcgcactgtgtaaagagccgctgcgcaccgggcgtattcttaatattaacgttccggatttacccttggatcaaatcaaaggtattcgcgtgacgcgctgcggtacacgacatccggcagatcaggtgatcccgcagcaagatccgcgcggcaatacgctgtactggattggcccgccgggcggtaaatgtgatgccggtccggggaccgattttgctgcggtagatgagggctatgtctccatcacgccgctgcatgtggatttaactgcgcatagcgcgcaagatgtggtttcagactggttaaacagcgtgggagttggcacgcaatggtaagcagacgcgtacaagcacttctggatcaattacgtgcgcaaggtattcaggatgagcaggtgctgaatgcacttgccgccgtgccgcgtgaaaaattcgttgatgaagcgtttgaacaaaaagcctgggacaatatcgccttgccgataggtcaggggcagacaatttcgcagccgtatatggtggcgcgaatgaccgaattactcgagctgacgccgcagtcgcgggtgctggaaattggcactggttcgggatatcaaacggcaatcctggcgcatcttgtccagcatgtttgctcggtcgaacggattaaaggtttgcagtggcaggcgcgtcgccgcctgaaaaatcttgatttacataatgtttcaacccgtcatggcgatggatggcaaggttggcaggcacgcgcgccgtttgacgctatcattgttacggcggcaccgccggaaattccaactgcgctaatgacgcagctggacgaaggcgggattctcgtcttacccgtaggggaggagcaccagtatttgaaacgggtgcgtcgtcggggaggcgaatttattatcgataccgtggaggccgtgcgctttgtccctttagtgaagggtgagctggcttaaaacgtgaggaaatacctggatttttcctggttattttgccgcaggtcagcgtatcgtgaacatcttttccagtgttcagtagggtgccttgcacggtaattatgtcactggttattaaccaatttttcctgggggataaatgagcgcgggaagcccaaaattcaccgttcgccgcattgcggctttgtcactggtttcgctatggctggcaggctgttctgacacttcaaatccaccggcaccggtcagctccgttaatggcaatgcgcctgcaaataccaattctggtatgttgattacgccgccgtcgaaaatggggacgacgtctacagcccagcaaccgcaaattcagccggtacagcagccacaaattcaggctactcaacaaccgcaaatccagccagtgcagccagtagctcagcagccggtacagatggaaaacggacgcatcgtctataaccgtcagtatgggaacattccgaaaggcagttatagcggcagtacctataccgtgaaaaaaggcgacacacttttctatatcgcctggattactggcaacgatttccgtgaccttgctcagcgcaacaatattcaggcaccatacgcgctgaacgttggtcagaccttgcaggtgggtaatgcttccggtacgccaatcactggcggaaatgccattacccaggccgacgcagcagagcaaggagttgtgatcaagcctgcacaaaattccaccgttgctgttgcgtcgcaaccgacaattacgtattctgaatcttcgggtgaacagagtgctaacaaaatgttgccgaacaacaagccagctgcgaccacggtcacagcgcctgtaacggtaccaacagcaagcacaaccgagccaactgtcagcagtacatcaaccagtacgcctatctccacctggcgctggccgactgagggcaaagtgatcgaaacctttggcgcttctgaggggggcaacaaggggattgatatcgcaggcagcaaaggacaggcaattatcgcgaccgcagatggccgcgttgtttatgccggtaacgcgctgcgcggctacggtaatctgattatcatcaaacataatgatgattacctgagtgcctacgcccataacgacacaatgctggtccgggaacaacaagaagtgaaggcggggcaaaaaatagcaaccatgggtagcaccggaaccagttcaacacgcttgcattttgaaattcgttacaaggggaaatccgtaaacccgctgcgttatttgccgcagcgataaatcggcggaaccaggcttttgcttgaatgttccgtcaagggatcacgggtaggagccaccttatgagtcagaatacgctgaaagttcatgatttaaatgaagatgcggaatttgatgagaacggagttgaggtttttgacgaaaaggccttagtagaagaggaacccagtgataacgatttggccgaagaggaactgttatcgcagggagccacacagcgtgtgttggacgcgactcagctttaccttggtgagattggttattcaccactgttaacggccgaagaagaagtttattttgcgcgtcgcgcactgcgtggagatgtcgcctctcgccgccggatgatagagagtaacttgcgtctggtggtaaaaattgcccgccgttatggcaatcgtggtctggcgttgctggaccttatcgaagagggcaacctggggctgatccgcgcggtagagaagtttgacccggaacgtggtttccgcttctcaacatacgcaacctggtggattcgccagacgattgaacgggcgattatgaaccaaacccgtactattcgtttgccgattcacatcgtaaaggagctgaacgtttacctgcgaaccgcacgtgagttgtcccataagctggaccatgaaccaagtgcggaagagatcgcagagcaactggataagccagttgatgacgtcagccgtatgcttcgtcttaacgagcgcattacctcggtagacaccccgctgggtggtgattccgaaaaagcgttgctggacatcctggccgatgaaaaagagaacggtccggaagataccacgcaagatgacgatatgaagcagagcatcgtcaaatggctgttcgagctgaacgccaaacagcgtgaagtgctggcacgtcgattcggtttgctggggtacgaagcggcaacactggaagatgtaggtcgtgaaattggcctcacccgtgaacgtgttcgccagattcaggttgaaggcctgcgccgtttgcgcgaaatcctgcaaacgcaggggctgaatatcgaagcgctgttccgcgagtaagtaagcatctgtcagaaaggccagtctcaagcgaggctggccttttttctttcggttggtgagtcggtgtatttgtagtctggataagacgcgatagcgtcgcatccggaaatttgccccctatgcgttcatcatcttgcgcaccagctgcataaacagctcctgctcttctccactcaaacgccccaaaaattcctcatccacgctgtcaccaatgggtatcgccgcagcaagtatcttttcgccttcggcagtcaaccagacaaagcgtcgccgcttatcagcggggtcatgttcacgtctgactaagccacgattttccattcttgccaacatttctgctaacgttgctttggtgctgacagctgcttctatcagtgccacctgttcgataccaggtttatcagcaatggcgcgcatcaccgcgtactgtggtttggtcaggtcaggtaactcgtgctgccagcgagccgtgtgctgctgaaaaagctgtcgtaactgatggaacgctttatttcgtaacgccatgtaaactccgggctaattctctgtcgctatcatagcggttttttagtgacgaagaagatgttgttacttttcaatccttgccgctgtggaaatgaaggagtatgttaataataacgttcgtatacgaacaattaagaggataagcaatgaaactgatcgtcgggatgacaggggctaccggtgcgcctcttggtgtggcattactgcaagcgctgcgggatatgccgaatgtcgagactcatctggtgatgtcgaagtgggcgaaaaccaccattgaactagaaacgccttacagcgctcacgatgttgctgccctcgcagacttcagccataacccggcggatcaggcggcgatcatctcatccggttcttttcgtaccgacggcatgatcgttattccgtgcagtatgaaaacgctcgccggtatccgcgctggttacgccgatggcctggtagggcgcgcggcggacgtcgtgctcaaagaaggccgcaaactggtgctggtgccgcgtgaaatgccgcttagcaccatccatctcgaaaatatgctcgcactttcacgcatgggcgtggcgatggtgccgccgatgcctgccttttataaccatcccgaaacggtagatgacattgtccaccatgtggtagcccgcgtgctggatcaatttggcctcgaacatccccatgccaggcgctggcaaggattgccgcaggcccggaatttttctcaggagaatgaataatggcatttgatgatttacgcagctttttacaggcgcttgatgaccacggccagttactgaaaatcagcgaagaggtgaacgctgagccggatctggcagcagcagctaacgccaccgggcgtatcggcgacggcgcgcccgcgctgtggtttgataatattcgcggctttaccgatgcccgcgtggcgatgaacaccatcggttcctggcagaaccacgcgatttccctcggcctgccgccaaatgccccggttaaaaagcagattgatgagtttatccgccgctgggataacttcccgattgccccggagcgccgcgccaatccagcctgggcgcagaacaccgttgatggcgacgagatcaacctgttcgatatcctgccgctgtttcgtttaaacgatggcgatggcggtttctatctcgacaaagcgtgcgtggtttcccgcgatccgctcgacccggataacttcggcaagcagaacgtcggcatctaccgcatggaagtgaagggcaagcgtaagctcggcctgcaaccggtgccgatgcacgatatcgccctgcatctgcataaagcagaagagcgcggtgaagatctgccgattgcgatcacgctcggtaacgatccgatcatcacgctgatgggggccacgccgctgaaatatgatcagtccgagtacgaaatggcaggcgcgctgcgtgaaagcccgtacccgatcgccaccgccccgctgaccggttttgatgtgccgtggggttcagaagtgatcctcgaaggggttatcgaaagccgtaaacgcgaaatcgaagggccgttcggtgagtttaccgggcactactccggtgggcgcaacatgaccgtggtgcgcatcgataaagtctcttatcgcagcaaaccgattttcgaatcactctatctcggtatgccgtggaccgaaatcgactacctgatggggccagccacctgcgtaccgctgtatcaacaactgaaagccgagttcccggaagtgcaggcggtaaatgccatgtacacccacggcctgctggcgattatctccaccaaaaaacgctacggcggctttgcccgcgcggtgggcctgcgtgcgatgaccacgccgcacggtctgggctacgtaaagatggtgattatggtcgatgaagacgttgacccgttcaacctgccgcaggtgatgtgggcgctctcctcgaaagtaaacccggcaggggatttggtgcagttgccgaatatgtccgtgctggaactcgaccctggctcaagcccggcggggatcaccgacaagctgattatcgacgctaccacgcctgtcgccccggacaaccgtggtcactacagccagccggtggtggatttgccggaaaccaaagcctgggctgaaaaactgaccactatgctggctgcacgtaaataaggagaacaagatgatttgtccacgttgtgccgatgaacagattgaagtgatggtgaaatcgccggtgaaagatgtctggacggtatatcagtgccagcattgcctttatacctggcgcgataccgaaccgctacgccgcaccagtcgcgaacattacccggaagcgttccgcatgacgcagaaagatattgatgatgcgccaatggtgccgagcatcccgccgctgctggcggaaggtaagcgctaaataaaaaggtccgatgcccatcggacctttttattaaggtcaaattaccgcccatacgcaccaggtaattaagaatccggtaaaaccgagaatggtcgttaacactgtccaggttttcagaccgtctgctaccgacaaccccagatatttggtcacaatccagaaccctgagtcattaatatgtgacgcgccaagcccaccaaagcaggctgccagcgtcaccaatacgcactgaatcggattcaatcccatcaccgcttctgagagtaacccgccggttgtcaggattgctacggttgctgacccctgcgatgcacgcagcgccagtgaaataataaatgcggctggtaacagaggcaggtcaatcatttgtagcatgttggcaagggctttgccgacgcccgattccaccagcactttgccaaatacccctccagcaccagtaaccaaaatcactaccgccgcagtgggaagggctgagcccataatgtcgctggtgtgttgtaagctccagccgcgacgtaaagccaataaccagaatgccagcaccagcgcaatcattagagctaccattggtgagccgatcagctgtagcgtaccaagcaggggatgcgaaggcggcatcagtgttgcggaaaccgtacccgccatgataatcgcgataggaataacaattagcgaggtgaccagcgcgacgcccggtggatttattttatcgcttaattttgttgcgccttcctcactggctggagccagttgcatctgttccagtacttccaccgacatcgcatattggtgcttattgattattttcgctgcaaagtagccaacaatccctacgggaatagaaatcgcaataccgatgatggttagccagccgatgtctgcgtggagtaaccccgctgcggcgacagggcctggatgcggcggtaccgccacatgaacagttagcatgattccagcgacaggcaggccaaatttgagtggcgatattttggcaaccttggcaaaaccgtaaatgattggcgcaagaataataaagccgacatcaaagaagacgggaataccgaggaagaacgctgccagagtcagcgcagcgatagttcgtttgtcacctaacttgcgactgaaataattagccagtgactctgcaccaccagagtgttcgatcatacgccccagcatagcgcccagaccaataataatagtgacggaaccaagcacaccgcccatcccggcgatcatcactttacccacttcgcccgccggtatacccgccgcaagtgcgactaacaggctgacgaggagcagagcaacgaatggttgtacctttgccttgatgaccagcagcaacagcatgattacgccagctaacgcaatgcataacaatgtaattgtggacatgggaaaccctgtctgaaagttatagttaacctaccccatccgtagatggggggatgtatgggtacgttgtaattagggatttaacgaattagcgccaggcgtcaaaccagccaagcccttcttcggtgaggccacgaggtttatattcacaaccgatccagccctgatatcccacctcatcgaacaggcggaacagccacggatagttgatttctccatcgtccggttcatgtcgatcaggtagtccggcaatttgtacgtgcgcatatttcccagcgtagtcgcggattaaatgcgtcaggttgccatctactttttgcgcatgaaaagtatctagttgaataaacacgttatctcgcgcaacctcttcaacaatagccagtgcctgatactggctggagaagagataatgaggcttaacgtcggggctgagtgcttcaactaatattcgcttgccgtgtagcgcaaagcggtcggcagcgtagcggagattatcgataaatactgcccggtaccgttcagcgtcttcgccagcgggcacgacgcctgccatcacatggacttgttcacaattgagcgtcaatgcatattccagtgccaggtcgatgtctgcgtgtgcttcgtgctcacgtccgggaagggcggataatccccattcccccgcattaatatctccgggagcggtattgaacagcgccagtgtcagatggttttgctccagttgcttttggatttgcagggtggagtagtcatagggaaacagaaattccacagcatcgaacccggcttttcgcgctgcggcgaagcgttcaataaaaggcacttcggtgaacatcatggataaattagctgcaaaacgaggcattgcattaactccttaattccgcaatttcacctgcggtcagataacggatcgggcggtcaccgagaataaaaatcagctttgccgtttcctccagctcttccatattgttggcggcttcttgcaggctttcaccgcaaaccactgggccatgatttgccagtaaaaaagcctgattgtctgctgccagttccgccagatcctgtgcgatgcgtttatcgcccggtcggtaataaggcaccagcgggacatttcccatccgcatcaccacgtatggtgtgaacggacgaataacgttgctgctgtccagcccttgcaggcaggaaagcgccgtcgaccatgtgctgtgcaaatgcaccaccgctttacagcgcggattgttgcgatacagcgccagatgaaagagcacctctttcgagggtttgtcaccacttaaccattcgccatccgcggcgactttggaaagccgctgcggatcgagattgcccaggcatgaacctgtcggtgtcgccagtaaattcccgtcaggtaaaagcagcgacagattgccagccgaaccggttgcatagccgcgctgaaagaatgaactggcaatccgcgtcatctcctctcgcaaagactgctctacttttgcgaaatcgctcatgataaaaactctctttgggctcgtgaaaaaaaggcttcatcaccgaagttgccagatttaagggcgagtgagacaggcttatccagtgcgtttacccacggcacgccgggggaaatggttgggccaatatgaaacccttttatgcccaggctctgtgtgactacgccggaggtctcaccgcctgcgacaataaagcgtgtcacgccttccgctgctaaccgcgccgctagtttagaaaatagagtttctactgcctgactggctttttgtgcaccgtattgctgttgaattgctgccaatgcgtcagtgctggcggtggcaaaaaccagtggagcaagtacactttcctggcccagaacccactctgccagttcgtgtgcataagcggccagagtttcggttgagaggcagcgtgccacatcaacttcacgggctggtgcaatttgacggtaatgtgccacctggcggttggtcatttgagagcatgaaccggagagcactacgccgcgcccagcgagcggacgccctgcttcgcgagcctggttaccgttttcttgcgcccactgccgggccaggccaatcgccagaccagaaccacccgttaccagtggggcatcgcgcaaggcttctccctgaatttccagatggtgttcggtcagcgcatcaagcaccgcgtagcggtagccctcttgctgtaagcgagccagctcttgacgaacggcatccacaccttgttcgaaaacatgtgccgaaacgacgccgcagagccctgtggattgcgcttcaaccagacggggaagatagctgtcggtcatgggatttaccgggtgatggcgcatcccggattcggccagcagttgattcattacgaacaaatacccctgataaaccgtacgtccgttgaccggcagggccggagagaagaccgtaaacggcgtgtcgagagcatccattaatgcatcggtaaccgggccgatattacctttcgccgtactgtcgaaagtagagcagtatttgaaatagatctgtttgcaaccttgctgttgcaaccagctcagagccgccagcgattgctgtgtggcttcaaccaccggacaggagcgcgttttcaggctgatcaccagtgcgtcgattgcttccggcattttacctgttggaacaccgttaatttgtaccgttggtagaccgttttccaccagaaaactggcgatatccgtcgcgccggtaaaatcatcggcgataacgccaatcttgatcatgatttcgctcccggtagagtgatgccagagaaaatcttgataactgcgctatcgtcttctttcccgtaacctgcgttactggcgctggtgaacatattcaatgctgttgaggccaatggcagcgggaagtgcagggctttggctgtatcggcaaccagaccaagatccttaacaaaaatatcgacggctgaatgcggggtgtaatcgccatccaccacatgacgcatccggttttcgaacatccaggaatttccggcggcattggtcacgacgtcatacatcacatccagcgggatccccgcacgggctgcaagtgccatcgcttcggctccggcagcaatatgtacgcccgctaacaactggtgaataatttttacggtcgaacctagtcccggttctgcacctatgcgataaacttttccggcaacggcttccagcacgggtgccagtcgttcaaaggcaatatcgctaccggaggccatgacagtcatttcaccgttagcggcttttactgcaccaccagaaactggcgcatccagcatttccagatcgaatccagccagagcggtagcaatttcttgcgcatcagcactagcgatagtggaagaaaccattactgccgtaccgggtttcagatgttgtgcaacgcctgtttcaccaaacagcacctgtttaacctgggccgcattgaccaccagcaccagcagagcgtccagtttttcggcaaacgtcgcggcgttatcagaaaccccgcaagcacctgcctctttcaacgtagcgcaggcattgctgttcaggtctgcgccccaggtagaaagacctgcgcggacacatgacagtgctgctcccattcccattgaccctaagccaacgataccgacatgaaactcagatcccgttttcatctgctctccttgttaatttaagtgatattttgtttgatattgtgaatataagcgctggaagataacgatatggtgagctgattcacataaattaacattgtgtgttattttatgtgaactaagcgttagttgcgccgcgcacgtttcgcaggcaaatagcgtagaatgtcagcaggacaaaggaaggagcaaaagttgatacccgtagagcgtcgccaaatcatccttgagatggtagctgaaaaaggcattgtcagtattgctgaactaacggacagaatgaatgtgtcacatatgaccattcgtcgggatttacaaaaactggagcagcagggagccgttgtgctggtgtccggaggcgtccagtctccgggacgcgtggcgcatgaaccttctcatcaggtaaaaactgcgctggcaatgacgcaaaaagcggctattggcaagctggcggcaagtcttgttcagccgggaagttgtatctatctggatgcgggaacgaccacgttagcgatagcacagcatctgattcacatggagtcactgactgtggtcacaaacgatttcgttattgcgaactacttgctcgacaacagtaattgcacaattattcacactggcggtgcagtgtgtcgggaaaaccgttcctgtgtcggggaagccgctgcgaccatgctgcgcagcctgatgattgatcaggcttttatttctgcatcgtcatggagtgtgcgggggatttctacgccagcggaagataaagtcacggtgaaacgggcgattgccagtgccagccgccagcgagttttggtctgtgatgcgacgaaatatggtcaggtggcgacatggctggcgttaccattaagcgagtttgatcagattattacagacgacggtttgccggagagtgccagtcgcgcgctggcgaagcaggatctctctttgctggtagcgaaaaatgaataatggcctgcaataacatctggttactcatgcttcacagaagaagcatgagactaccttattttataaaatgacagccgcccacttttcggcgatccggtatcaatataaatctggttagcgaacgtctgaatgttatcaaacatcatatgtccaaatataaaataatcagcgccgtttatttgttgtaactcgccattaagcgatttctgcacacgatcaacaggccagagtaattcgctctccgctatttctttaccaaagagatattcactccccggataatctgcatgtgcgatgacatattttatgttgtcgttagtgatttcaataatatgtggaaggtgatggaatttcagcaacagatctgtagcttctttttgctctgaatcatttaaatcgaaaaaccagtcaccaccgctggcaagccacatattgccatcgccggtcgcgaacgcatccagcgccattgcttcgtggttgcctttaacggagataaaccagggctggtttagcaggcgcaggacgtcaagactctccggcccacgatcaatattatcgcctgtggaaataagtaagtcggtttcggggaaaaaagagagttgatgtaagcgggattgtaataactgatattcaccatgaatatcaccaacgacccatatatggcgatagtgatgggcattgattttttgatagcgtgtagatggcatggttttaccctgtaaaataagctttcctattatacagggtatttttatttgattcgtcagttgtcgttaatattcccgatagcaaaagactatcgggaatttttattacaccagactcttcaagcgataaatccactccagcgcctgacgcggagtcagtgaatccgggtccaggttttccagtgcctcgaccgcaggcgaaatttcttctggtacggacagcaaagacatttgcgtaccatccacttgcgtagcggcggcgttcggcgaaatgctttccagctcacgcagcttttgccgtgcgcgcttaataacctcttttggcacgccggccagagctgcaaccgccaggccgtagcttttgctcgccgcgccatcctgcacgctgtgcataaaggcaatggtgtcgccgtgctccagtgcatcgagatgcacgttggcgacgccttccattttctccggtaactgtgtcagctcgaaatagtgggtggcaaacagcgtcaatgccttaatcttattcgccagattttccgcgcacgcccacgccagcgacagaccatcgtaagtggacgttccacgcccgatctcatccatcaataccagactatattcggtggcattatgtaaaatattggcggtttcggtcatctccaccataaaggtcgaacgcccggaagccaggtcatctgccgcgcctacgcgggtaaagatacggtcaatcgggccaatctcgactttttgcgccggtacgtagctgccgatataggccattagcgcaatcaacgcggtctggcgcatataggtacttttaccgcccatgttcggaccggtgatgatcaacatgcgacgctgcggcgacagattcagcgggttggcgataaacggctcattcagcacctgttcaaccaccggatggcggccttcggtaatgcgaatgcccggtttatcaataaaggtcgggcaggtgtagttcagggtataggcccgttccgccaggttcaccagcacgtcgagttccgccagcgcgctcgcgctctgttgcaacgcttccagatgcggcaacagcaggtcgaacagttcttcataaagctgtttttccagagccagtgctttgccttttgaggtgagaactttatcttcgtactcttttagctctggaatgatgtagcgctcggcgtttttcagcgtctggcgacgcatgtagttgatgggtgccagatggctttgcccacggctgatttgaatgtagtagccgtgcaccgcattaaagccaacttttagcgtgtccaggccggtacgttcacgctcgcggacttccagacgctccagataatcggtcgcgccgtcagccagcgcgcgccactcatccagctcttcgttatagcccgatgcgataacaccaccgtcgcgtaccagcactggcggtgtgtcgatgattgctcgctccagcagatcgcgcagctcggcaaactcgcccatcttctcacgtagcgcctgtaccggtgcactatcgacagtttctaactgtgcacgcagctccggcagttgctggaaagcgtggcgcatacgggccagatcgcgtgggcgagcagttcgtaaagccagacgtgccagaatacgttccaggtcgccgacctgacgcagtaccggctgcaactcggcggtgaaatcctgcaatgcgccgatagtttgctggcgctcaagcaacacgcgggtatcgcgcactggcatatgcagccagcgtttcagcatacggctgcccatcggcgtgacggtgcagtcgagcacagaagccagcgtattttccgcaccacccgccaggttctgggtgatttccagattacgacgcgtcgcggcatccataatgatgctgtcctgctcacgttccatggtgatggaacgaatatgcggcagagtcgtacgttgggtatctttcgcatactgcaacagacaaccggcagcacaaagtccgcgcggcgcgttctcgacgccaaaaccgaccagatcgcgagtgccaaattgcagattcaactgctggcgcgcggtgtcgatttcaaactcccacagcgggcgacggcgcaggccgcgacggccttcaattaacgacatttcagcaaaatcttctgcatacagcagttccgcaggattagtgcgttgcagttctgccgccatcgtttcccggtcagccggttcgctcaggcgaaaacgcccggagctgatatccagcgtcgcgtagccgaaacctttgctgtcctgccagatagccgccagcaggttgtcctgacgctcctgtaacagggcttcatcgctgatggtgcctggcgtaacgatacgcacaactttgcgctcaaccggacctttgctggtcgccggatcgccaatttgttcgcagatggcaacggactcgccctgattcaccagtttggcgaggtagttttccaccgcatggtaggggatccctgccatcgggatcggctctcccgccgaagcaccgcgtttggtcagtgaaatatccagcagttgcgacgcgcgttttgcgtcgtcataaaacagttcataaaaatcacccatccggtaaaacagcaggatctcgggatgctgggctttcagcttgagatactgctgcatcattggcgtatggctggagaagtccttgtcaatgttttcattcatattgattttactcatttttttattctttcaggtgctcatgtggccccaggtaaatcccctttaaacccacataaacccataaatttgtagctcacttgtagcctagaatgtgataggttaccttctaatcattcttgggctacaaatagtggtgatactttgaaaacaactctcagtcaggcttttattatcaacaagttaagcattggtgtgaagcccacccttaaccatgcgggaaaagtcgttttcgaagcaaacccagagcataaaccttacatagtttttgatgaccaccgcgactcaccagttggctttggtgtgaaggtcagtttgacgaaaaaaacgtatgtaatccagagaagagtgtcctccggtgatcgtagtgtgagtgaaggtaagaaacctagttctgtgctcaaagtaaaagttggcaatgtttctgattttccgaatatcgatcaagctcgtgaagtagcccgacagttggttcagaccatgatcgcaacaaagaggaatcccaatagaatcaagcgagaaacagaggcttctgaactcactatcagcgaagtctttgctcaatacagaaatcatttgatgggtagatctaaaccagcgaaacccaacactttggctgtattggataaagcagaaaacagactttccgagtgggctggtttgcgagttaaagaccttactggtaatgaaattcttcggaagtttgatgagattgcttcaagagccagaacagcagcggaacagacctttaggtggattaatgttgctgtcagacatgcaatcgaaattgaagctggtaatgctcaaacacagcaacgacaaccatcactgtcatacaatccattctctatcctgaaagtgcagaaaaaattcaggactcgatcagaactggaagacagctacaaagcgaaaggtgttcgaaacccactttccccaaaagacacattaggtaggtttctgactgcattacataacaaaagaagtttcaatcgcttgggttgtgattatctgctactgacggttctgttaggtgcgaggaaagaagaaactgcttcgctatgctggcgtgaggttctgactgaagaagaagcaagaacgaccagttatgttgatcttgaaaaccgaatgattcgattcttcgacaccaaaaaccgtaatgaccatgaactgccaatctgcgatgcgacaaagcgtattctggaagaccgaagagatatcgtcaacgataacgaaaagcgagcagataaacgcaaatgggtttttccagctcgttcatcacgaagcaagattggacactattcagatagtaaaagtttacgcgaaaacctgtgccaagaggcagggatagtgaagttaggtatgcatgatcttcgaagaacttttggtcgtgtagctgaagaactcacctcttatgcagttgttaaaaaattgcttaaccaccgaaacacgactgaccctacagagcgatacgcaaacccagatcaagatcgtgtttatgaagcactacaacgtatagagttaaatatgttgttgacttcacctgagttatataattcattattagcgtcatccaagtatccaccaattctcaaggggaaagtatgaaggggcagagttttgataaatattcattatcaagagcaataaaaaaaagtgatttctataaatatgatcagctcagtgatgatgcgtacttagaaaaagaagttttggatgcttatgatgttgcccataaattattacctccggcaattagtgaaacaatttctaatggtaagaccgtttattatgtaaacgacttaccttggaaattagtgttaaggcggttgcattcaaatgtttgtaataacattgaggttgaaaaatgtcatcgaacagaaattgtgcgaaatcttatttcctatgtgcaggaaggtgttaaaagcaaaatatttttaattgatattaaatctttttatgaatcaattgatatagatgtgcttttgaaaagaataaatcacgatcattcactttcctgtcattcaaaaaaccttattagacttattttaaatgagcatattcaaaatggaaatagtggattgccaagaggcattgaattaagttcaattttatcagatatctacatgcaagaattcgacataataataaaagaaatgaatgaggtttttttatataagaggtttgtggacgatatattaattattacagatcataaaatagatgaagttagtatgttaaataaagttaaagatagttttcccgctggattgactgctaatgatgttaagactcaagtaattaagataaacaaaaggactcattctccacaagatataaatggttctattgcagccaagtttgattatctggggtataaaattacggtcatcgatacgcacattcccccgaattcagatggatcatcatcggctggtaaggcaaactctatataccgaaaaataaaaattgatataagtgataaaaaaataaaaaggataaagacaaggatttgtaaatcattctataactttattaagaatggcgattttgatattctatttgatagaataacctttttatctactaataggtcgttaataaataaagataaaaataggaaaataccaacaggtattttttataactacgctttggttaacaacaatgactcgttaaaatgcatagataattacctaagaggacttctacttggttctggaggtagactatcaaaggctctgagattaacaaatgagcaaaaaaaaatcttattaggaataagttttgaaagaggctttaatgcaaaaatacacaaaaaatatagtttaaacagaatgaaaactataacgaggatctggaagtgaaaataaaaactataaaattagataagaaggattatcggagagcactgttaactgatacatctccttcggatactcccataatattcacaaatgatggtttatatattaacgcccatataagcgatcaaaacacatctcaattcaatcccgtagatatattcttcaaaaaactagtttcacctaaagatgatgaaagattatctaacgatgctgaaagagcaaagaaacaaatagaacaaacctatccattaaaatataaaatatttaaagatgaaaccaagctaagaacattatcattaatccatcctcgttcacaatataattatattgagttttacaatcaatttggcagtgttattactgccctttgccaaaaaagtcagttttcaattagagcaccagtgaagattgctaattcattttatttaaagaatgaaacttataaagatgtgagttataaaagtgtaaatattgaaactcttgaaaaggaaatttggagtaaacatgcgtcttcctatttcgcctataaaggatatgacagaatatttaaactttttgaaagtgaggattatatagctttagaaaagaagtttaacacaatgtggtcattagatatcgctaactgttttgatagcatctacacacatacaataagctgggcaataaaaaataaagagttcgtcaaaactaacttgaataaaggtaagcagttttcagaagaattagataaggtaattcaaaggagtaataacaatgaaacaaatgggatacctatcggagctgaatttagcagagtatttgcagagttgatattccaaagcattgatagaaatataataataaaacttaagaatgtgtacgggtgtacatgtaaaatccattatgaagttttaaggtatgtggatgattatttcatatttgctgtaaatcaagatatagctcagcatgtatatggtgtcattagtgatgagcttgctaaatataatttatacttaggcgataaaaaacttagcaaaatagaaagaccatttttaaccagtaaatctgaaatggttattgaagctaaaaaaatactgaaatttttcgacgaaaaaatttttgctgatagatcacaaaattgtaatggagacgaagtaaaatcaaatgttaattatatttatagacccgaaaagttaattaaaagtatacttgacctgattaagtcaagatgcagcgaaagtaatgatggctataaaaatgttgcaccatatttgatttctgcatttgctaaaaggataagaagactggttgagatatataaagcagaagatgacaaagagtctttaagcgaattttatgaagcaatcattataataatgaaaattatgtttttcttccataacattaaaccaagcgtttcatcgtcaaacagattagctacatcaatagctattgtgcagaaattctttatcaaagagtcagagatatttcttgataaatttaaagatatggtaatgacagagttgagaaatatgaggttttctaagaataatgtagagctaagagaaggctttacatcgatcgagaagatgaatgttatacttgccacaagtgattttggtgaaaactatctgatggatgaaatgcaaataaaagaagctttgagcaatgtaaataattataactatttcttcattataagtttgctgtattattataaggatcacaacgtatatgaagaaaataggaaaacagttgaatgtataattgatgagaagtttgatgcttcatttgatctggagaaagactccgagctggttcacttatttttggactgcatgagctgtaagtatatttccctgcattttagagagaaatggtataaaaaatttttaagtaagttttctcttcaacgacagcaggatgagattgaaagtgatttatcttaccttttaactaagtattggtttgttaaatgggagcagaataacatgctcaatttacttgaaagaaaagagttgagaactgcttattgaggtgttattattgttgtgctttaagggttgacaatattactcttgccaagcctgtcttggcaaaccactattcgtagtggaattcgctagtttttatgtgaagtgcgcaacactacacctaaatattagttgaggtactttagtgctacacacctgatgttgagtcattctcttttagtgcatagccagctttcgagctggctttttgctatacaaaattctaaagtaggaataattagtgaaaggagcttctgtaggagttgctatgcattacatagaggtgttgcgagatctaagtgaagtttggcgactgtttagtgatatgcctgaggaggctgctcttaatgctgagctggcagccctttatcttggtgtcagtgtaaaaactctggcacgatataggcaaaatgatcctacccacgtaatatggacacaggcctaagcgaggttctggttttcaaattgttccggactgaggccgccacaccaactgtgccgccgccaccgattgtaatcacattcgatataattaaacaccgttgcccgcattatttcccggctgataaagtgttctccatgg

SEQ ID NO: 45 - DNA, 56291 bp, Escherichia coli
  source 1..56291: mol_type = genomic DNA
caggtgacgttaaccagttaacaattaacgccggatacagagaatccacccataacactgtttttggttttaactgttccgcgtgcgcttagccgcattcaccgcatcacaaaattcactttaaaaagggcggcagagcagtcacggagtaaaactgataccgccaaacgtcaccagaaaattgataacagagggcgttgcagcggggttgtcacttaagcgtatggtcaacctgacaacccggtgtcctcaacggggaaggaataaccccgccatacttaccgccgcgccatttcgcgggttgccacaaccggaagcgcacggtcgacgaaaatttaacgacaggctatctatgaaccagctacctcgccgtgcgctttcgcgttatggtctgacttttcagggaaatatcctttcagtaaactgtcagtgccggatgttcacccgtgtccggcgcacgcactccacctcacccgtggagaactccttaattaccaaccctcaggagggtgaatgttaaaatcaactcttattgctaaatgcctttatcaaaatcgcatggtaagcagcatttcaataggcgagtctgcagttaaaagtattttcgaagagtacttccccgggcatgattttaataaatggaataccaaattaccgccagcagtttcaacgcgtattctgaaagcaactgaaagagcaagtacaattcgcgttaactatttcattaaagatttgtgggatctttgatatccacagagcctaaagtatgtgcatatggatgtgctattgtgcgccctcgcagatttgcatcattttctaaattcactgaacgaaacagggcatcaacaaggctctgtacaatgcaaaggcaatcgaagactgtcgctgtttctgttttgattgatgaaagaacatggccattcacgcaaacagaaattacccgttcattaacatcgctttcctgcttttgattatcagaaccatatagcccagaaaaagcattgcgcacattacgaaccatattatcgatggtttcttttttggtgtatgccgggtcaattttcaccagactatcaccgagagtcgttgcagcaattgtctggatttcttttggtaaatctttaaattccattattagcctcgttggttagctattaacgtgggtatgtaatcattctggcaatgcttaatgccgctgctttttccagattggtgatatcctgctccagagagaacagattttcagcctgcttagccctggcttcattagcccatttcagatcctgcgctgcattaattttctggcgcatccactcataaagttcatcatcggtatagtctggcgcgatgatgacaggttctcgtttctgcatgtcagctccttgtggttcgcattgcctgcttttaaccacgtcaggcgaggtggtatcctctgaggggtctgttactcgagaggaaattggttatgaatacaatcaagttttcttgcccagaatgtggtggcgaagtctttgacacatcctttaagccgcagggctctgacagtttcgcgggagccatctgcaaaaattgtggtcaccttgtaactgaagatgagtcctcgcagttcgatgacgaaatcgttgacaatatcttcggtgcactcaccagagactttctgaaataaagacgcataccgcttagttaccgctctgataactcttacctgtccggcaatggcgctgatgtcaatataaagcgccattgctgcttctttgccgatcccgtgatgccttccattctgatgtttgacttcgcccactgagaaatcctctgtttccccttaacgccggggtagcggaacaaaaacctgctgcatagttattaaagttgaaccctgccgtcatgttcttacgcctcgggctggctacttaacccctgaccactgcctggtaactcgaagtattgccctgcattctgtggggcggggtgggttggtatgctgttaaggtaacaagagttacctttcgagtcaatacgatgttgcaaaaggtacatttgagagcgtgaaaaacccgcaatgaatgcgggttctgactcagtctaagtattgatgtatttgtgaaactttacctttaatggtgtaaccaccattcagttcgatgggtttgtaaagcggattcagtgacaacagatagatgtttggtccgtcaatcgcaactttttttagtgttacgtttggcgttccttccaattggattaagattatttttcccaccagttctctaatgttacttgagcatggtgtgatcagcacggtagatccgtcggggatggttgggaggccgttagagtttgtcatcgcatctccctcaacatgcaataaaaaagagttttcagcggtttttgtcatgacatcaacccaattcttaataccaggaatctcggttactggacaactcatatcccaataaccagcctgttcccacgttaaaacgggcaaccgggcgatgttgtcactaatgtaaggatactgattcagacgcagatcatcggttttatcgtgaccgtcctttccataaagaatccattcaggagatttggaaagcaattttgacagtagatgcaaattctcaccgtcaggttttgaagagccattttcccattttgttacggatacacgagatatgccgattgctttcgcaacctgctgttgggttaatccaacgtcttttcgacgattccgaatacgttcgctgatagtgtttttcatgtaaccaatgttactaccaagtgatgttgctatggttgacattgttatgtaactattgttaccctcctgctcgaaataacaggagagttttatgttcaaagatgatgttctgcgctatttcaaaaaaaagcgactagcagctgaggctcttggaatttcacatgtggctgttgtgcggtggaaagcagttattcccaaacttcgcgcaatggaactggatgaaattactaacggtgaattgaaatacaacccagaactttacaagaagcaggatagcacctcgaacgaaggaaagaatgattcatgaaaatcaagcatgaacacatccgcatggcgatgaatgcctgggcgcatccggacggcgaaaaagtaccggctgcgaaaattaccaaagcgtatttcgagctgggaatgacgttcccggaactgtatgacgacagccatccggaagccctggctcgcaatacccagaaaattttccgctgggtagagaaagacacccctgatgcagttgaaaaaattcaggcgttgttaccagcgatcgaaaaggcaatgccacctttgctggtggccagaatgcgtagccacagttcagcttattttcgggagctggtggagacgcgggagcgactggtgagagacgccgatgattttgtcgcagtggcaatcgccggtttcaatcagatgaaccgtggtggcccggcaggaaatgctgtggcagtgcattgagtgataatagccatatcgaatcgcttccggcaactcgtgagtaaaaagattcggtatcagaagaggtgagtatggctaacgcctggctcagattatggcatgacatgccaaatgaccctaagtggcgaacaattgccagggtgtcagggcagccaattgcaacagtgatggcagtgtatatccacctcctggtgagcgcgtcacgaaatgtcacgcgaggtcacattgatgtcacgacagaagatttggcaagtgcgctcgacgtgacagaagaggtaattgattcaattttgcagacgatgcaggggcgggtacttgatggtgatttaatcactggatgggaaaaacgccaggtgcttaaagaggacaacggcaatatttcgcaaaccgcaaaatctcctgcagagcgcaagagggcgcagcgagagagggaaagaaagcgggaacaaaatggcgattgtcacggcgcgtcacgaaatgtcacgcacatgtcacgacgagtcacgacagataaagatacagataaagatacagatcaagaagatcaaaacactatggtccatggcgtaaaaaacgccacgaaccaggcaggggatgttcagaccgtcaatcttggtcagccagcaggcacgacaccggaagccgattcagcgtatgcgctgaaagccgattcgggcgctgtgcagcaggtgatgaccgcaaggccggagcaatcacaccaactgcagcagcctgaagccgattccgccattcagcgggaagccgatcgggtagtcccggaaaacaccgggcagcctgtgggacgagtagattatccggatgtgttcgaacaggtctggcgggaatacccgttgcgtgctggggcaaacccgaagaaatccgctttcagtgcctggaaggccagattacgcgagggggtgccaccagaggccatgctggatggtgtgaggcgttacgcaagatacctggcggctaccgggaaaacgggaacggaatttgttcagcgagcgacgacgttttttggaccggaccggaattttgaaaacccctggttgctcccggtaagcggtacgaacaaccagcgttgtgtgaatcatatttctgaaccggataccgaaattccaccgggcttcagggggtaagtgtgtatttctggtcatgaggtaattttcaggaggacttgtggtaaaagtttttacacaggaagagcgggaaaaaattaaagggcaggtggtcgaacttgtgcgccagagtgggcgcgagacgttacgacaactggaagctaaaacaggtgcgacaagatatctgatcagcgttctcgccagagagctggttgccagtggcgatatatacaactctggttacgggttattcccgtctgaacaggcgcgtaaggactggcaaaacgcccgcaaaaaactctcaagggcaaatctgaagaaaccatctgtggttgatccggaccttatctggctattaccagacggagaaatacgccgctacgacaggcgtcagaacataatctgtcgcgagtgccggaagagcgaagttatgcagcgcatattgtcgttttatcaggggaaatttcaggaggtggtgctgtgagtgaaattaacaatcaggcttcaattgccgctggcattcgcatcaaaggagaggagcatggaaataaaaccagaagatgagttaagtaatattgttttatttccggcaaaagaggatgacccacgtaatcaagttaattttctttatgagccatcggaaagaccatactgccatcacgcttctgtccgggttgacgaaaaagagcgtcaggtccgctgtaaaatctgcggtgcagttgtggagccgtttgactggatgctctcagtggcgaaaagagaaaccagactggcagatgatgtaaggctattgcgccaggaggaacaggaaagacggaaaaatatagaaaagttaattcagattgagcgtaacgcgaaagcgcggatacgcagggcgacaaaatccagaactgaataaataaatttagcgctgtaaataaaatttaatccttaaccggagggatttctgccccctcagaacatcgggagaccgtctgaaatggcggtaatgaaaaatgactgaattaaccaaagagcaattaatcgaagaagctaaattaaaaaatagcaattgtgaaatgccacccaaattcagggatggcacaggtagatggtgagttattcaaaattgcactggcatcgctggaagcagagccggtggcctggaaggcaaccttcacgcaaattgaccatgaatataatacgttcaccgctatgtattctgacaaagcagaagccgaacagtgggtgcggctgcatgaaataggtgactttcgggcagaaataacaccactttacgcagcgccatcagcgccggtaattccggatggttggataagctgtagtgagcggatgccagtggacggtcagcacgtaattattttatgtgatggcgcattcgttctttatgcgcaatatcgagacggtgagtttttcgatattgtccgcaatggtgatgaattttttgaaacacagagccgcaatgtaacagactggatgccgctaccggaaccgccgcaggaggtgagctgatgaaaaatgaagtcgacaatgttatcactctggtacagccaaaatcagaggaggaaggactcctcaacgttgtgatagccgacagaaaaaagcggcgagcaaaaatgctgtcagcatatccgtacaacaatttcagaagtgaatcgtacgattacctgtaaccgatgcggattggctttagatccgttcgagcttgttctcgaccgtgcgagaaacggtgaaaacatagtgtctgagattaaatcactctatgcaaagcgggatgctcttcgtgaagctgtggcaaaacttgaacgtgaagagaaaaacgccaaagcccggttacgagcagccagaacagcaatactgtatgcggaaaatgaccttaaaaatattgagcaggaggtgaatcgatgacctggcctgaggcattcaccacggtaggaattgcgatggcggtggcgctggtggtgtattcgatttgccgctggggataaatcgccgaaaaaaagatcccgacacaaacatgagccgggatctttgatttatatagcctacgaatccgccagtaagagaggaggcggacggtttattctaacaccggaatgatgtgggtaaaagtttataagaaatcggtttcataactttgcccaccatgatagataccgacaataaagacttttctgccatcaacggcaaaagcaataatcgttctgtggcggaaatgagttacccgcatcccctggcgaatatcatcgcgtttattgccccgatgcgggaatgtagaaaacccatcaagataatcaagaagcgcattggcataattgtcagcaatgacgttccctgctttctccgttatatatctgtgcaggttgattatttgttgttcggcctcaggagtaatgatgacttcatatgtcatgcagattacttcccggatcgaatcgcggcgcgaacctgtgaaatggagcgtccgttgtttggattttcgcggatagaatcaagagagggagcggctgaatgcgttaaccacgcttcgattgctttatcgcgctcattcagtgcgcgaagtccttcacgaatgacctcgctttctgaagcataggcaccggaagccacacgggcgcgcaccatgtcagccatttcgttagttaatgtaatgctgaattgttgggttgtacgcatggtaaacctcacggagtaggatagaacaccattcgatgatagcacgttgcctgttgacgacaacagaaatcagagacaatattgctgcacgccagcctgaacaactggcacctgctgcgccagcagagaaaacagatggcgcacaagaccaaattacacaattctgataccgttcgtgccagcaggcacgggcggcgttcgcacgcattcaaatatgactggtatcagcacgatccctgcactgaagaacaggccgaatggctgattcagaactaccgcagacgtgggtatgagtttaggaaagccctcaccctcgattatcgtcactggataatctacgtcagactcccttattccgaacgcccaccgcgtccgtcccgcatattccagcaacgcatctggaggtaacgtgcgggtattacttcgacctgttctgataccggaactcgggctggtgctccttaaaccaggtcgtgaatccatgcaggtattccataaccctcgagtgctggtggagccggaaccgaaaagcatgcgcggtctgccgtccggcatcgttcctgccgttcgccagcagctggtggaagacaaaacattgctaccgtttttcagtaacgcacgggtgattcgtgctgctggtggtgccggtgcattgtctgactggctgttgcgccatattaaatcctgccagtggccacacggcgattatcatcacagcgaaaccgtcattcaccgttatggtaccggcgcaatggtgttgtgctggcactgcgacaaccagctgcgtgaccagacatccgaatcactcgagcaacttgctcatcaaaacctgtcagcatggatgattgacgtcatcggtcacgcaatgaatggcacacaggagcgggaattatcgctggctgaattatcctggtgggcggtctgcaatcaggtggcagacgcgctaccggaggcagtactacgtcgttctctggggttacgtgcggaaaaaatccactcggtgtaccgcgaaagcgacatcgtaccgggagagcagaccaccaccagcatactgaaacagcgcacaaaaaatcttgcgccgctgcctcacgcccaccagcaaaacccgccacaggaaaagacggtggtcagcattgccgttgatccggagtcaccggctcagtatctccagcgccagaaaccacaacgggaagagatgcctgtatacacgcgctgggtaaaaacgcagaaatgcatgacgtgcggtaatcaggcagatgatccgcatcacatcattggtcatggactgggagggatgggaacaaaggctgatgatttgtttgttattccgctgtgccgtaaatgtcataacgaactgcacgccggggtaaaagattttgaagaaaaacacggcagccagctgttgttgctgattcgttttttaatgcacgcgagaaattcgggtgttctgaagtggaaagcatgaatgactgaacgcatagaatttgttttgccttacccgccgacggtgaatacctactggcgacgtcatggcaatacgtatttcatctcggaagccggaaagcgttatcgccgtgatgtggcgctaattgttcgccagcagcggctgaaattaagcctgtccggaaggctggcgataaagattattgcagagccaccggataagcgccgccgcgacctggacaatatcctgaaggcaccactggatgcgctgacgcatgccggactacttatagacgacgagcagtttgatgaaatcaatattgtgcgcggtcagctcgttcctggtgggcggctggggataaaaatcacagaactggagtgcgcatgaataaccagtatttacagtttgtgcgtgagcagctcattatcgccaccgctgatttgagtggggcaacaaaaggtcagcttgaagcctggcaagagaatgccatgttcgatacagggcgttacaggcgaaaaaaaatccggtaccgcgatgaagtgactggaaaaatgataacgcgggataatccaccaattccgggaaagcaatcgctggcgaaggggacgtcaattcctctggtcagtccggttgagttttcgacatcatcgtggcggcgggctgttctgtctcttgaagaacatcataaagcctggttgttgtggtgttacagcgggagtatttgttgggaatatcagatcgcgataacacagtgggcgtggaatgaatttaatactcaatccggtaccagaaaaattgcagggaaaacgcaggaacgcctgaaaaaattaatctggctggcggcgcaggcagtaaaagcagaactttttggtggggaaggttatgaataccaggagctggcattactggcgggagtgacaactaaaaactggtccaaaacatttactcgtcactgggttgcaatgaaacacattttttaccgactggatagtggggctttattgtttgtaatgagaacgcgttcaaaacaaaaggcggcattttcaaagcaaagtgttgcaaaagtagattgaaaggcatatatttcatgcaaatctgatattttgccgattttgtacgtgatggcaaaagcaaacaaaacccgccgaaatgcgggttttttgtgccacttatctcggatagacatggtgaatgcgctggtggaggaagtaagggggatttttaatcaggtgatttttgaatgcttgcaacattgattttgtaacgttattatcctgcgcccggccctttagctcagtggtgagagcgagcgactcataatcgccaggtcgctggttcaaatccagcaagggccaccaaccgccactagctcatcaggaaagagcgtcaaccctttaagttgagtgtgcgaggttcgagtccccggtggcggtccagtgccgacttagctcagtaggtagagcaactgacttgtaatcagtaggtcaccagttcgattccggtagtcggcaccatatgcgggcatcgtataatggctattacttcagccttccaagctgatgatgcgggttcgattcccgctgcccgctccagcaaaacaaatgaggtacaggtttttcagcactggcgttttttttctcgcgggaaaaggtctcgtatatcccttatcgcgctcccgaattataacggagaccagttatgatttcggtgctgtgttttttgacgctatcggaatagtgcattattggtgggatttttgatatttcctggcaggggctgattatgcactatcccgatgttgttaacatcacaaaatgaggtgaactccatgtgcggggtggtttaagtagtttagccgggaaactacagtatctgatggaatgtcaggtatttcgggaggcacccgacacctcacttgtattataataatactcttcagcacttactgatttgaccaccgccttagcaggcggttttttttggtaatttgcagaattgcatgctgaataagcactgcatcgttaaaattataactaattccgaatatgctgtgcttgcttattgttagtttgcttacatttctgtatcttgctgcaccgcaggattcccctgtaacgacgattgtatgatgaatcatttaaactctgtcatttgccagccagtctctggtggctggctttttttgcaaggtgttccagtaattctgtcgtcaggctggattcccacagaacaaaaaaccgtcactaactcatcgggtaagagtgcataacacgtattgttgttttgtggtgcggggttcgagtccccggtgacggtccatttgtaacggtaaatatacttttaacaggctcgcttcggcgagctttttgtatgagttcaacccggtttatattggcgaaaaaagggcgcggctgtcggattaaagccgcgggacaaagtccatgaagaagaataagcatctctctcctccagagagacgtatttatattactaagcattaaaaatggtttaaatcctcagattaaccttaatttcaggtaattcttatttcatttctttgcgtcacgcccggcgcacatcaaaaaccacagagcctttcaggggtgagcttacgggatggtcagtgtgactttctctgtgggctggtcaccccagggcggaggctcacccactaaaaggaaacgtcacgatgtttggtattttcaaaaagaaaacccgcaaggccattaccgaagtgaagaagatggagaaccgcgacgcagtggaggcaaccgtctggggtgcgtattccattgcatacgctgacggcacctgtgacgcgaaagaaattgcggtactggaaaaaaccattgcagcacttcctgcctttgcgccgttctccggtgagattgcacaaatgagtgcaaatatccgcgcccgttatgaagcgtcacctcgtagtgcgaatgctcaggctttgcgtgaactggctgatgtggcaggaaccgccgaagcggttgatgtgctgtgcctgtgtctggatatcgctgaccaggacggcattggtccggatgaagaagcacagctcaagaaaattgcgcaggcgctgcagttgccgctggagcagtatctgtgaaaagtgcgcgccctgtactggctgccatcctgctgtttctggtagtggtggtggatttcaccggacgactgatgtcggtgctggcagatggtgtgctggtggcgatggcgctggtcgtgctccggcctttactgcgtaaatctgaataacaccacacaaaaggcatctgcgggtgcctttgacggggtgttttttatgggtcgctggtggcccttttttatttacaggagaaaaagtatgtctgaacccttatccggttccggcacggctgcggcgctcggtggagcgacggtattcgggctgtttaccggaacggatttcgggattgtgtttggtgcgttcgccggggcgttatttgtggcaacgatgccgcaggcgctttcagcttggcgtgtggcggcgcattttctggtgtcgttcattatcggcgtgctgggcgcagaggttctggcatcctggctggtaaagcatacagagtttgacggtgcacctgtcgacgcattgtgtgcagtactggtgtcagtggtgtcggtgaagattctctcgttcatccaccagcaggatattacatcgctggtgtccggcctgttctcccgcctgcggggtggaggaggcggcaatgttaagtaaccttcccggattgctgaatgtggcgttatgcacggttatcgtgctgacgctctttttttatcgtcgccgtgattccagacataaaccgctgatgtcatggctggcctggctgttgatgctgctgtatgcctttgcgcccctcagctatctgtgtggtcgcccgttagcaacgggctggcctgaagtgttttttaatctgctgttctgcgtgctggtgatacgtgcacgcgggaacgtcacaagaatctttccattgttgaggtgagtatgccggggaaattcagattcagttgtcgtagcgaaagaaatctggagggcgttaaaccacagctggttgctgtcgttcgccgtgcgctggagctgacggaggttgatttcggtattacggaaggcctgcgcacgaaagaacgccagaaacagctggttgcagaaggcaagagccagaccatgaacagtcgtcacctgaccggtgatgcggtggatgttgtggcttacgttggcagccaggtgtcatgggactgggctctgtacgagaaaatcgcgcaggcatttaagcaggctgccgcagagctgggaactgccatcgaatggggcggggactggaaaacactgaaagacgggcctcactttcagttgaaacgctgataaccaggtgtgttatgagcagaaaacactggacacacagaatgccacgagtggcggcgaaatgggcactggtagcgatactggtgccttttttcttggcgggatgcgtcagcctggataaggcgcgtcagcttttcgatacagcttctcaggtctgcgaaattgttgatagtgtccggcagtgtctgcagaactgaccgacggtgagagcagaatattttttagcggagcgaaattctatgccatcacaaatcccccgcgcctgccgtaagcgtggatgtgcaggtacaaccacagacagttctggttactgcgataaacatcgtggcgaaggatgggtacagcatcagcgcggactgagccgccaccagcgtggctatggctcgaaatgggatgccatacgtgcgcgcatactgaagcgtgataatcatctgtgtcagaactgcatgcgcaatgggagagccgttgaagccagaactgtggaccacatcattccgaaagctcatggtggcacggatgcagacagtaacctgcagagtctgtgctggtcctgtcataaagcaaaaacagcgcgcgaacgcatcaattgataatagttcccatctgtaggggaggggcgggtcaaatctctgcaaccctggctgctcagtaccgccgcctgacctttcctcgcatcgccgcaggttcgaaaacttttttttgggaatgtgattaaatgattgataggtaaaaccgattatgtcaggacctccgaaaaccccgccacgcctgcatttgatacgaggcaatccctcaaagcgccccgttaaagaccccaaaaaaaccgctaaaaaggatgaaaaaggtcttcctaaaattccgcagcatttaggggctcaggggaagtactggttcaggcgaatggcggaagagctgaatgcggaagggatcatttctcagcttgatgcgcgtgcgctcgagttgctggtggaagcctacaccgaatatcggcatcactgcgaaacactcgatgttgaggggtatacctaccgcacggaaacgcagagcggtgatgtactgattaaggcgcaccccgcggcggcaatgaaagcggatgcctggaagcggatccgggcaatgcttgcagagtttggtatgtcaccggcaagccgggcgaaagtaaatatcgccggaccggatgatgttgatccgctggcagagcttttaaaagcgagagactgatggcaaaagtggctgacgggatccgctacgccgaacgtgttgttgcaggagaaattgttgctggggaatttgtccgtctggcctgccagcgttttcttgatgatctgaagtacggcgaagagcgggggatttatttcagtgaaccccgtgcgcagcacatcctgaatttctacaaatttgtgcctcatgtaaaaggggcgctggcaggccagcccattgagttgatggactggcatgtatttatcctcattaatatttttggttttgtcattccgctggtgaatgaagagaccggggaagttgtcatgcgcagcgatggcagcggacgtccggtgatggtgcgccggttccggacggcgtacaacgaagtcgcccgtaaaaacgcaaaatcaactctgtcatcgggtatcggcctgtatatgacgggggcagatggtgaaggtggagctgaggtgtattcagccgcaaccacgcgtgaccaggccagaatcgtgtttgaagacgccaaaaatatggtcagaaaagcccggtcgacactcgggcggttatttgatttcaacaagctggcgatctaccaggagcagagcgcatcaaaatttgaaccgctttcctcggatgcaaacaacctggacggtctgaacatccactgcgccattattgatgagctgcatgcacataaaacccgtgacgtgtgggacgttctggaaacggcaaccggtgcccgtctgcagtcccttttatttggtatcaccacggcagggtttaacaaggaagggatttgttacgagcagcgtgattacgccattaaggtattgcgtggctataacagtgacgtggagggcgcggtaaaagacgactcttactttgcgatcatttacacgctcgatgagggagatgatccgtttgatgaaacggtctggcagaaagcgaatcccggcctgggcatctgtaaacgctgggatgatctgcgtcgtctggcgaaaaaggcgaaggagcaggtctcggcgcgggtgaattttttcacaaaacacatgaatgtgtgggtaacagcagagtctgcctggatggacatgattaagtgggagaagtgcgaatacattgccccacgacatgagctgaaaacgtatcccatgtgggtcggcgttgaccttgctcataagattgatatctgtgcggcggcaaaactctggcgaacggataacgggcatgttcatgccgattttaaattctggcttccggaaggacggctggaacgatgctcgcggcagcaggcagaactttaccggaagtgggcggagatggataagctgattctgacggatggtgatgttatcgatcatgctcagataaaaagtgacttactggaatggattggtggtgaaaacctcagggagctgggatttgacccgtggagcgcgatgcagttcagcctggcactggctgaagaagggataccgctggtggaggttccgcagacggttcgcaatctgtcagaggccatgaaggaaacggaatcactggtctatgccgggcgtttccatcacagcaatcatccggtcatgaactggatgatgtctaacgttacggtaaaaccggacaaaaacgacaatatcttcccgaataaatccacgctggaagccaaaatcgacggccctgttgcgatgtttacagcaatgagccggatgctggtcaatggtggtgaaccggagccggatctgtctgaacatctggtcagcgtgggcatccgctcgctttaaccgaggtcattatgtttctgataattctcgcaccactggtgggcgtgctgggtgcgcttttgctggcgtatggtgcctggctgatttatcccccggcgggttttgttgttgccggggggctgtgcctgttctggtcgtggctggtggcgcgatatctcgaccgtacacagccgtctgtcggcggaggtaaatagtgttcttttcgggattatttcaacgaaaaagtgacgcgccggtgaccacgccagcagagctggcagatgctatcgggctgtcatacgacacctataccggaaagcagatcagcagccagcgggccatgcgactgacggcggttttttcctgcgtcagggtgctggcagagtcggtcgggatgttgccctgcaatctgtatcacctgaacggcagcctgaaacagagagccaccggcgaacgtctgcataagctgatctccacgcatcccaatggatatatgacgccgcaggagttctgggagctggtggtcacctgtctgtgcctgagggggaacttttacgcctacaaagtgaaagcatttggcgaagtggctgaactgctgcccgtcgatcctggctgtgtggtaccgaagcttaacagtagctgggagccggtctatcaggtcacattcccggacggctccacggatgtgctgacccaggaggatatctggcatgtgcgcacgctgacgctggacggcctggtgggactgaatcccatcgcctatgcccgcgaggcaatatcgctggcggcagcgaccgaagagcacggggccagactgttcagcaatggcgcggtgacgtcgggtgtattgcgtacagagcagacgctgtcggatcaggcttatgagcgcctgaagaaagattttgaggagcgccacaccgggcttggcaatgctcaccgcccgatgatccttgagatggggctggactggaagtcgatggcgctgaacgccgaggacagccagttcctggaaacccgcaagtttcagcttgaagaaatctgtcgtttgttccgggtgccgttgcacatggtacagaacaccgatcgcgccaccttcaacaatatcgaagaactggggctcggatttatcaactattcactggtgccgtatctgacccgcatcgaacagcggatcaacaccggactggtacgaaaaagtaagcagggcgtttattacgccaaatttaacgccggggcgttactgcgcggggatatgaagtcccgttttgaagcctacgccaccgggattaactggggaatttactctcccaatgactgccgtgacctggaagatatgaatccgcgtcccggtggtgatgtctatctcacaccgatgaacatgaccacgaaaccctccgatggcagtaaagccggtaagcagaaggataacgccaatgcagacgaaacaacgtcttgatgtaccgctgagtctgaaatctgtcagtgactccggtgagtttgaaggatatggctccgtctttggtgtaaaggacagtcacgatgatgtggtgatgtccggggcatttgctgcttccctgcgggcgtggagtgacagaaaagcgttgcctgcgctgctctggcagcaccgcatggatgagcccatcggtgtttacaccgaaatgaaggaagacgatgtcgggctttacgtcagggggcggttgctcattgatgatgatcccctggcaaaacgcgcacatgcacacatgaaggccggttcgttaaccggcctttctattgggtacgtcctgaaggactgggaatacgaccggacgaaagaagcctttctgctgaaagaaatcgacctctgggaagtcagtctggtgacgtttccgtctaacgacgaggcgcggatcagcgacgtcaagaacgcgctggcccgcggggaaatccccgaacagaaaaaaatcgaaagagtcctgcgtgatgtcggactctcccgtacccaggccaaagcattcatggccgggggctatggcgcactgtccctgcgcgacgctgaggatgtgggctctgcactgaatgcactgaaaaatctgaacttctaatcaggagaaatacgatggcggttgatattaaagatgtcgaacaggtcgcgcaggagctgcagcagaagtttgacgacttcaaagcaaagaacgacaagcgcgtggatgcgattgagcaggaaaaaggcaaacttgccgggcaggtggaaaccctgaacgggaaactcagcgagctggaaaacctcaaaagcgatcttgaaaaagagctgcttgagctgaaacgtccggcaggtggtgcgcaaaataaactggccaccgagcataaagaagcgtttgtgggcttcctgcgtaaaggccgtgaagatggtctgcgcgatctggagcgcaaggcattacaggtgggcaccgatgaagacggcggctatgccgtgccggaagcactggatcgcaacattctcaccctgctgaaagatgaagtggtgatgcgccaggaagccacggtgatcaccgttggtggttccgactacaaaaaactggtgaatctgggtggcacggcttccggatgggttggcgagactgacgcgcgctcccagactgccacctcaaaactgggcctgattgaacctttcatgggggaaatctacggtaacccgcaggccacccagaaaatgctggatgatgcctttttcaacgtggaggcctggatcaacagcgagctggcaaccgaatttgccgaacaggaagaaattgcctttaccaccggcgatggtaccaagaagccgaaagggttcctggcgtatgaatccactgatgaaaccgataaggtccgggcgttcggcaaacttcagcatattgtatccggcgaagcgacggcggtgaccgcagacgccattatcaaactgatttacacgctgcgtaaggcacaccgcactggcgcgaagttcatgatgaacaacaacagcctgtttgccatccgtctgcttaaagacagcgagggtaactatctgtggcgtccggggctggaactggggcagccgtcctctctggcgggttacggtatcgctgaaaacgaacagatgccggatatcgccgctgatgcgaaagccattgcatttggtaacttcaaacggggttacaccatcgttgaccgtatcggcacccgcattctgcgtgacccgtacaccaataaaccgtttgtcggtttttataccaccaagcgcaccggcgggatgctggtcgattcgcaggccatcaaactgctgaagattgcagcggcgtaatcactcaggggcgcggaaccgcgcccctgttctgacgggtgaagaatcatgatcctgaaacaagatctgaaatggtcaccggacggtatgagtgttgagatcattcgggccggtgagtatgaagataaagaattacccgaacgggtacgcgaaattgccactgcagctgggattgtctctgataagagaacacctgttgcgcggggggctgataagtctaaaaaacagcattcatagaggttgcccaaatgatgcccactctggaagagcttcgtgttcagtgccggattgatgatgacaatgaacaggagaattctcttcttatgatgtatctggatgctgccagggaagaggctgaaaagtttttaaaccgaacgctttacgatgaaactgtttctgagcaggatacgaccgggcttgtaataacacctctgataaaactgcgtcttatgcaactggttggctactggtacgagaacagggaaatgcaggatgcagtgcctgattttttctataccggactgcggatgtatcggcttcatcccggaacataggaggattcatgcaggcaggaagattacgtgatcgtgtggttattctgaatgccaccaccgttcggtctccgtcagggcaccctgtggaaacaatgacggagggggcaaccatatgggcagaagttaagggaatcagtggcagggagagaatatccggaggtgcagaaactgctcaggctacagtgaaggtctggatgagattccggcgagatgtgacagcaacttcatgtctgaaagtgctgactggtgcattcaaaggcgcgattctgagtatagacggtccgccgataccggatgcccgtgccacacggcttgagatactctgttctcagaaggggaatgtgtgatggatttcagtcttgatttttcaggtctggcggatattgcacgggatctggagacgctcagcagggcagaaaacaataaggtactgcgcgatgccacccgtgccggtgctgaagttatgcgggatgcagttgttgaacgtgcgccggagcgaaccgggaaactgaagaaaaatgtggttgttctcactcagcgttcaaagcgtcggggggaaattatctcgggtgtccacattcgtggacggaacctgcgaaccggaaacagtgataacagcatgaaagccagtgatccccgaaatgcgttttactggcgctttgtggagctgggaacggtaaacatgcccgcgcatccgttcattcgcccggctttcgatacgacagaggaactggcagcacagattgccatacagcgaatgaatcaggctattgatgaggtcttaagtaaatgagagagaccacactgtattccctgctgtctcaactggccggaggacaggtttatccttatgtggtcccgctgacggagggaaagcctgcggtatctccgccatggctggtattttctgtggtgtctgacactgcgtctgatgtgcttgatggtcaggctgaatccagaattaccgtgcagatcgatgtctgggcaacagtacctgatgacgcagatgatatccgtgagcaggcgcttgatgcggtaagaaaactggcaccctccgttatttctaaaacgcagggttatgatcctgactcccgtctgagcagagccacgcttgaattccaggtaatagcctgaggtcattaatgattttacccacccgccgctggcgggtttttttattttcaggagacgagtatgtcctctaattttgagcgttcgcaactgacgaaaattatgatttcgtctgcaccggtaacagcagaaaccctggattctgccagctatcttggcctgagctgtacaatcaaagaggtgcagtttaccgcaggacaaaagcaggatattgatgtcaccacgctgtgttctgttgagcaggaaaatattaacggtcttggtgccgcgtcagagatttccatgtcaggcaacttttacctcaatgctgcccagaacgcgttgcgcagtgcctatgacaatgacaccacgtatggctttaaagttatttttccgtcaggcaacggatttacctttatggcagaggtgcgtcagcatacctggtctgcaggaaccaatggtgttgtggctgcaacgttttccctgcgtctgaaaggtaaacctgtgctgacgacagttccgctgaaagtgaaggttgatttaaacagcacgctgcaggttgcttccggttcgaaactcgaaatggtggttgaggctgccggtggtgtgccgccttattcttatgtctggaagaaaggtggttctcctgtttccggacagacggcggcaacgttcagtaaggcatcagcagcatccggtgatgccggtgcgtatacctgcgagatttctgattcagcaagcccggttaacaaggtgacctccacttcctgcactgttaccgtcagttaatgaggatagatgtgatgactaaaaatatccgtaatctggcactggcaacgatgtcggggtttcgccataaaactgttgatgtgcctgaatgggaaggggcaacggttgtattacgggaaccttctgcagaagcctggttgcgctggcaggagatcgttaaagcaaaagatgatgagacaccgttatccgttgctgagcgcgcccgccgaaatctggaggcagatgttgaactgttcattgatgttctgtgtgataccggactgcaacctgtattttcagaggatgatcgtgaacaggtgattgccgtgtatggcccggtgcatgcgcggcttcttcggcagtctctggaactgatcagtgatgccggcgaggttaaaaaaaagtagcgcttccggggatgcgttttctgatgatgctggcgctcaggatggggcgcacattgtcagagttacgcagggaaatgtccgcatcagaaatcatgatgtgggcagaatttgacaggttcagcccgctgggtgacgagcgggctgatatccgggctgcccagatagtttctgcggtttacggtgcacagggtgtcaaagtaccactgaatgatgcgcttcttcagtggggacaagagcagacagaaggcgtatcagatccatttgccggactggaaaacgcgcttttaatagtgtctcagtgagtcaatataaccgcttcggcggtttttttcgtccggagaatgagtgtggcgacactacgtgaactgattattaaaatctcggcaaattcccggtcattccagtcagagatctcccgggcttcgcgtatggggcaggattactaccgtaccatgcagaacgggggccggcagtccgctgctgcatcccgtgaaatgcggcgtgcactggcagaagtgacggatcagataaatacagctaaatcttcggcactgaatatggcgggggcatttgccggggcttttgctaccggtcatcttatttctctcgccgatgagtggaattcagtaaatgcccgtctgaagcaggcctcacagtccagtgatgattttcaggcatcacagcgtgaattaatggcgatcagccagagaacggggacggcgttttctgataacgccagcctttttgcccgttctgcagcttccatgcgggagtatggttacagttctgaggaggtactgaaagtcaccgaggcgatctccacgggcctgaaattatccggtgccagtacagcagaagccagttcggtgatcacgcagttcagtcaggcactggcgcagggagtgctgcgcggtgaagagtttaactcggtgaatgagaacggcgatcgtgttattcgtgcgctggctgcgggaatgggggttgcccgtaaggatctgaaggccatggcggataacggaaagttgaccgccgataaggttgttcctgcactgattagtcagcttggggcattacgtgatgaatatgcggcaatgcctgatacggtttcatcctctgcaaccaaagttgaaaacgcctttatggcctgggtcggtggtgcgaacgaggcaagcggagtgacgaagacgctctccggtgtgctgaatggtattgcaggcaatattgacaccgtggcaaccgctgccggtgctctggttgccgtcggggtagcccgatattttggcaatatggcgtcgtctgctggatctgcaactgctggattaattactgcagccagaaacgaagtggctcttgctgaagtgcaacttcgggggacacagatagcaaccgccagggcgcgtgcggcggtttatcgtgcgcaacaggcggttgttgctgctcgcggtaccgaaaggcaggccgcagcagaagcgaagctgacagctgcccaggcgtcacttacccgtaatattgcggccagaacagcggcacagacaacgctgaataatgttacgtcagtggggagtcgtttattaagtggcgcgctggggctggttggtggtgtgccgggactcgtcatgctgggggctgcggcctggtacacgatgtatcagaatcaggagcaggccagagaatctgcacgccagtatgccgcaacaatcgacgaaattcgccagaaaacgtcggcaatgtcgcttcctgaagcgtcagataatgaggaaaagacgcgacaggcactgaaggagcagaacaggttaattgacgagcagaaaagtaagattaaatccttacaggaaaaaattgctggctatcagtatgtgctggcaaatccgggctggacaaccgataacggttttatgattaaccacatgacgtcggtaaaaactgtcacagaagggcttgcagaagcaacaaatcaactggcagttgaacagtctcgcctcactcaaatgcagggtaaagcgcaatccattcaggatgtgcttgccgggctggaggagcgacgggtggcgttgatccgtcaacaggcggcggaacaaaacaaagcgtatcagtccctgttgatcatgaatgggcagcataccgagtttaatcgccttcttgggcttggtaatgaattacttcaacagcgacaggggctggtgaatgtaccgttacggctaccacaggcaaccctggatgataaacagcagaccgcactgaataacagcaagcgcgaactggctctgtcccgccttaagggggaagcgcgtgagcgtgcccgactgggctatgctgcggatgatctcggctttgtgggagaggcgtatcagacagccagacagaattatatcaataactcactggatgcctggcgaaataaccaggcaaataaacccaaagcgcataaaaagaccgaagcggaaaaaacagaagatatttataaacggctgattaaacagcaaaaagaacagatagcactggcagggcagaatactgaactggctaagatgaaatatcaggtcagtcagggcgaattatcaaccctgtcagaagcgcagaaaaaaacgcttttgcagaatgcagcactcatcgaccagagaaagattcgtgagcagcttgctgcgtatgagagcagtctggcggacagtaatgccagtgcccgggcatctgacgacgcgcagttgctgggatatggtgaaggctcacggatgcgtgaacgactccaggaaatgtggagtatccggcagacgtttgagcagaaaaataacgagctgctgagacagtatcaggccggagaaattgaagaagccctgtggaaacaggagaaagaactgaataaaaaatatctggaagagcgtctcagcgatcagcaggattattatgcaaaggccgatgctttacgtaataactggaatgccggactccaggagggactgaccaactgggcagacagtgccaccgattatgcttcacaggcggcagatgctgtcgtttccacgatggacgggctggtatcaaatatttccgatgcactggccgggaatgttgtggagtggaggaactgggggtgttcagttctccgggaagtttcaaaaattcttatgaatgcggccattgttaacggactgaagtcactctccggtgccggagggtggcttggtacggtcggcggatggatttcgggggcggtggcaaacgcaaaaggtggtgtttacacatcggcaaatctgagtgcttacagtaacactattgtggatacaccgacgtattttgcttttgcgaaaggtgccgggctgatgggcgaggccgggcctgaagcaatcatgccactgacacgggcagcggacggctctcttggggtcagagccattggcaatgtgaatggtggcggtggatttgtttattctcccgtgtatcacatcagtattcagaatcaagggagcaatggcgagatagatgcgcgatcagccagggggctggtggatctgatcgacagcagggttgtgtcaattatgcagtcatcgcgtcgggatggaggattatacagtgcctgagcctgaagtttttaactggatcccccgtgaggggatggagacgacacgaaagccatcagttattacggtaaagtttggtgacggatatgaacagcgacgggctggtggtctgaatgcggatctgaaaacgtttaaaccggtatttcgtgtcacagatgaatattcccgtgccgcgctggacagttttttatcccgtcatgcagggattcgtgcttttttgtggcgtctgccaaaacacaacaggactgtccgggttgtctgcagggagtggagcatttcggataatgccatgtataccgattttaactgcacctttgaagaggtcactcactgatgcaggatatacagcaggaaacactcaatgagtgcactaaaacggagcaatccgcgctggtcgtgctctgggaaattgatttgacagaggtcggcggagatcgttatttcttctgtaatgagcagaacgaaaaaggtgagccggtcacatggcaggggcgacagtatcaggcgtaccctattcaggggagcggctttgagatgaacggcaagggagccagtgcaaggccaacgctgaaagtctctaatctgcacggcatggtaaccgggatggccgaagatctgcagagtctggtcggcggaacggtggtccggcgtaaggtttacgcccgttttctggatgcggtgaacttcgtcaacggaaacagtgacgccgatccggagcaggaggtgatcagccgctggcgcatcgagcagtgcagcgaactgagcgcggtcagtgcttcctttgtactgtccacgccgacggaaacggatggcgctgtttttccgggacgtatcatgctggccaacacctgcacctggacctatcgcggcgatgagtgcggttatcacggtccggcggtcgcggatgaatatgaccagccaacgtccgatatcacgaaggataaatgcagcaaatgcctgagcggttgtaagtttcgcaataacctcggcaactttggcggcttcctttccattaacaaactttcgcagtaaatccatgacagaaactgaatcagcgattctggcgcacgcccggcgatgtgcgccagcggagtcgtgcggcttcgtggtgagaacgccggagggggaaagatattttccctgcgtgaatatctccggtgagccggaggcgtatttccggatgtcgccggaggactggctgagtgcagaaatgcagggtgagattgtggcgctggttcacagtcaccccggtggtcttccctggctgagtgaggccgacaggcggctgcaggtgcagagtgattttccgtggtggctggtctgccgggggacgattcataagttccgcggtgtgccgcatctcaccgggcggcgctttgagcacggggtgacggactgttacacgctgttccgggatgcttatcatctggcggggattgagatgccggattttcatcgcggggatgactggtggcgtcacggtcagaatctctatctggataatctggaggccacagggctgtatcaggtgccgttgtcagcggcgcagccgggcgatgtgctgctgtgctgttttggttcatcggtgccgaatcatgccgccatttactgtggtgacggcgagctgctgcaccatattcctgaacaactgagcaaacgagagaggtataccgacaaatggcagcgacgcacacactccctctggcgtcaccgggcatggcacgcatctgcctttacggggatttacaacgatttggccgccgcatcgaccttcgtgtgaaaacgggggctgaagccatccgggcgctggccacgcagcttccgtcgtttcgccagaaactgaatgaaggctggtatcaggtacgcattgccggacgtgatgcaggtgaaacagaattatcagcccgtcttaatgaaccgctggcgaatggtgccgtgatccacatcgtgccgcgtctggctggggctaaaagtggcggagtgtttcaggctgtgctgggcgctgctgttatggcggttgctatatggatgccgggggtaggaattatggcgagcaatctgctgttttctctcggtgccagtatgacgcttggcggtgttgcacagatgctggcccctaaacccagaaccccccgtacacagacaacggataacggcaaacagaatacgtatttctcctcactggataacatggttgcccagggcaatgttctgcccgttctgtacggtgaaatgcgcgtggggtcgcgggtggtttctcaggagatcagcacggcagacgaaggggatggtggtcaggttgtggtgattggtcgctgatacaacatgttttatgtgaaaccgcctgcgggcggttttgtcgtttatggagcatgacgaatgggtaaaggcagcagtaaggggcataccccgcgagaagcgaaggacaatctgaaatccacgcagttgctgagtgtgattgatgccatcagcgaagggccgatagaaggtccggtggagggattaaaaagcgtgctgctgaacagtacgccggtgctggacagtgaggggaataccaacatctccggtgtcacggtggtgttccgggccggtgagcaggagcagacaccgccggagggttttgaatcctccggatccgagacggtgctgggtacggaagtgaaatatgacacgccgatcacccggaccatcacgtcggcaaacattgaccgtctgcgttttactttcggcgtgcaggcactggtggaaaccacctcaaagggggaccggaatccgtcggaagtccgcctgctggttcagatacagcgtaacggtggctgggtgacggaaaaagatatcaccattaagggcaaaacaacttcacagtatctggcctcggtggtggtggataacctgccgccgcgcccgtttaatatccggatgcgcagaatgacgccggacagcaccacagaccagctgcagaacaaaacgctctggtcgtcatacaccgaaatcatcgatgtgaaacagtgctacccgaacacggcactggtcggcgtacaggtggattcggagcagttcggcagccagcaggtgagccgtaattatcatctgcgcgggcgtattctgcaggtgccgtcgaactataacccgcagacgcggcaatacagcggtatctgggacggaacgtttaagccagcatacagcaacaacatggcctggtgtctgtgggatatgctgacccatccacgctacggcatggggaaacgtcttggtgcggcggatgtggacaaatgggcgctgtatatcatcggccagtactgcgaccagtcggtgccggacggctttggcggcacggagccgcgcatcgcctgtaatgcgtacctgaccacacagcgcaaggcctgggatgtgctcagtgatttctgctcggcgatgcgctgtatgccggtatggaacgggcagacgctgacgttcgtgcaggaccgaccgtcggataaggtgtggacctataaccgcagtaatgtggtgatgccggatgatggcgcaccattccgctacagcttcagcgccctgaaggaccgccataatgccgttgaggtgaactggattgacccggataacggccaggagacggcgacagagcttgtggaggacacgcaggccattgcccgttacggtcgtaatgtcacgaagatggatgcctttggctgtaccagccgggggcaggcacaccgagccgggctgtggctgattaaaacggagctgctggaaacgcagaccgtggacttcagcgtgggtgctgaagggcttcgccatgtaccgggcgatgtcattgaaatctgcgatgatgactatgccggtatcagcaccggcgggcgcgtgctggcggtaaacagccagacccggacgctgacgctcgaccgtgaaatcacgctgccatcctccggtaccacgctgataagcctggttgacggaagtggcaatccggtcagcgtggaggtccagtccgtcaccgacggcgtgaaggtaaaagtgaaccgggttcctgacggcgttgcagaatacagcgtgtgggggctgaagctgccgacgctgcgccagcgactgttccgctgcgtgagtatccgtgagaacgacgacggcacgtatgccatcaccgccgtgcagcatgtgccggaaaaagaggccatcgtggataacggggcgcactttgacggcgaccagagcggcacggtgaagggtgtcacgccgccagcggtgcagcacctgactgccgaagtcaccgcagacagcgggggatatcaggtgctggcgcgctgggacacgccgaaggtggtgaagggggtgagctttatgcttcgcctgaccgtggcagcggacgacggcagtgagcggctggtcagcacggcccggacgacagaaaccacataccgcttcacgcaactggcgctggggaactacaggctgacagtccgggcagtaaatgcccgggggcagcagggagacccggcatcggtatcgttcaggattgccgcaccggcagcgccgtcactgattgagctgacgccgggctattttcagataaccgccacgccgcatcttgcggtttatgatccgacggtacagtttgagttctggttctcggaaacgcggattaccgatatcaggcaggttgaaaccacagcacgctatcttggtacagcgctgtactggatagccgccagtatcaatatcaggccgggccatgattattacttttatatccgcagcgtgaataccgttggcaaatcggcattcgtggaggctgttggtcagccgagtgatgacgcagccggttatctggattttttcaaaggcgagatagggaaaacccatctggctcaggagctgtggacgcagattgataacggtcagcttgcgcctgacctggctgaaatcaggacgtccattacggatgtcagcaatgaaatcacacagaccgtcaataagaaactggaagaccagagtgcagcaattcagcagatacagcaggttcaggttgatacaagtaataacctgaacagcatgtgggctgtgaagctgcagcagatgcaggacggacgcctttatatcgcgggtatcggtgccggtattgagaacacccccgacggcatgcagagtcaggtgctgctggcggcagacaggattgcgatgattaatcctgcaaatggcaacacaaagccgatgtttgttggtcagggtgatcagatattcatgaatgaagtgttcctgaaatatctgacggctcccaccattaccagcggtggatatccaccggcattttccctgacacctgacggtcggctgacggcgagaaatgcggatatcagcggtaacgtgaacgcgaacgccggaacgctcaacaacgtcacggtaaatgagaactgtacgataaagggcatgctggaggcgaaccaggtcaggggggacttcgttaaagcggtatccagaccattcccgaaaagggctggtacgtgggggaacacggaaacacccgacgggacggttaccgtcaccatcagcgatgatcataactttgaccgtcaaatcattattccgcccattatttttaacggtgtggcgtatgacaatccggggagcggtaataacccgggaggtacaaggtacacgggttatggttttgaagttcgcaaaaacggtgtcttaatcgcatccagagaaaccagaggggcagttcccgggagttacagcgcggttattgatatgccgagtggtggtgggaacgtcaccctggagttcaggattttccagaaaggcaatcagggtgcaggtaacatcacagactgtacggtgatagtgaccaaaaaagcggcttccggtatcagtatccgttgaaatatttataacccagataagggcaccagaaatggtgccttttttattgcagaaaagcgagaggtaattatgcgtaaactttatgccgccattttgtccgcagccatttgtctggccgtatccggtgcgcctgcatgggcgtctgaacatcagtccatgctgagcgcggggtatcttcatgcctcgacgaacgttcccggcagcgatgatctgaacgggattaacgtgaaataccgttatgagtttacggacatactggggatggtgacgtctttcagctatgcaggagacaagaatcgccatctgacccattacagcgatacccgctggcatgaagattccgtgcgtaaccgctggttcagcgtgatggcggggccgtctgtgcgcgtgaatgaatggttaagcgcgtatgcgatggcgggtgtggcttacagccgtgtgtcgactttttccggggattatctccgcgtaactgataacaaggggaaaacgcacgacgtgctgaccggaagtgatgacggtcgccacagcaacacgtctctggcgtggggagctggcgtgcagtttaacccgaccgaatccgtggccattgatattgcttatgaaggctccggcagtggcgactggcgcactgacggtttcatcgtgggtgtcggttataagttctgattagccaggtaacacagtgttatggcagcccgccggttcaggcgggcttttttgtggggtgaatatggcagtaaagatttcaggtgtactgaaagacggcacaggaaaaccggtacagaactgcacaatccagctgaaagcaaaacgtaacagcaccacggtggtggtgaacacggtggcctcagaaaatccggatgaagccgggcgttacagcatggacgttgagtacggtcagtacagcgttattctgttggtggaaggcttcccgccatcgcatgccgggaccatcaccgtgtatgaagactcacaaccgggtacgctgaatgattttctcggtgccatgacggaggatgatgcccgtccggaggcactgcgccgttttgaactgatggtggaagaggtggcgcgtaacgcgtccgtggtggcacagaacacggcagccgcgaagaagtcagccagtgatgccagcacatctgcccgtgaggcggcaacccatgcgactgatgctgcagattcagcacgtgccgccagcacgtcagccggacaggccgcttcgtcggctcagtcagcgtcttccagcgcaggaacggcatcaacaaaggccactgaagcctcaaaaagtgctgccgctgcagagtcctcaaaaagcgtggcagccaccagtgccggtgcggcgaaaacgtcagaaacgaatgctgcagcgtcacaacaatcagcagccacttctgcatccaccgcgaccacgaaagcgtcagaagcagcctcctcagcccgggatgcgtcggcttcaaaagaggcggcaaaatcatcagaaacgagcgcagcctcgagcgccagtagttccgcttcctcggcaacggcggcaggcaattccgcgaaagcggcaaaaacgtccgagacgaacgctaagtcttctgaaacggcagcggaacagagtgcctccgcagcagcagactcaaaaacagcggctgcatcatctgccagcgccgcgtcaacaagtgccgggcaggcctcagccagtgccaccgctgccggaaagttggcagaaagtgccgcatcgtctgcttcaagagccacaacgaaggctggcgaagccactgaacaggccagcgcagcagcgagttctgcttccgcagcgaagacatccgaaacgaacgcgaaagcgtcggaaaccagcgcagaatcctcaaaaacggctgccgcatcgtcagccagttcggcggcgtcatcggcatcatctgcgtctgcttcaaaagatgaggcggtaagacaggcgtcagcagcgaagagcagcgccacgacggcatccacgaaggcgacagaggcagctggtagtgcgacggcggcagctcagagcaaaagtacggcagaatctgcggcaacgcgcgccgagacagcagcaaaacgggcagaggatattgcatccgccgtggcgcttgaggatgcgagcacgacgagaaaggggatggtacagctcagcagcgccacggacagtgacagtgaatcgctggcggcaacaccaaaggcggtgaaagcggtgaatgataatgcaaatagccgcgttccatctgaacgtaaggtgaatggtaaggcattgaaatcagacatcagactgtccgctgcagatgtctctgcttttgctcttggatcgtccggtgtgcacgcagagtcagagggaggcgttccgtggaatgccaaatctggtgcatacaatgtcacccggacaggcagcagctatattgttgcaaacttctatacagggggtggaagttgccggacgttgcaaatcagggccaattataaaaatggtgggctgttttatcgttcctcacgggatgagtatgggtttgagtcggactgggcgcagatttatacagtaaaagatttgatcccgggggtgaatgcggcaggcaatcaggatacaacgggtaacgcagccagtgccacgaaattgcagactgcaagggaaattgctggtgtgaagtttgatggcactgcggatataacgttgactgcggctaacgttaatgcttatacgaaaacagaagtcataaatcttctgagctcttatgtgaagagtagtgctctgccaagtatttcggtacgtacatcagccataactggcggcgaaatgggcatgagtatgtccacatttattaaccacctgaggtcaaatggtgcgttcagcaaaaagtactggattggttttggcgatatgatgggattcaatgcgggcagcatcaacaatataacggggtttggagcggttgaattagcagggactgtaattgaagtttttaacctgcccgatggtgattatacaattcgcttaaccacatcacataaagctgactatggtggagtaacaaatgcaatccttgtttatcactaccgcggtaacagaagtccatcaggacaatggctcaaatttgcgggtatggttggtgcaacagacaactgatacagacagtttgtgataaacacaaattgccggatgatggtgaggttgggaaaagatcacctcaccgtacgcaaatcacaggacatattaatgaacgaatgtgagcctggtaataacctgcaagaaatatcgggtgttgctgaaccgtgttgatacatcaactgcacctgatattgagtggccgacttcacctgcagagtaatcaacggcgcagggatgatattttgtgcttgaagtgcctccccgaccattcagatagtcggggaggggtattgggattatacgcaatcagttttagttaaagaccgaagctctcgaaaaatctttctccaaaaccagaatggaattgattgattttgataggatctataacgtcgttaccttaaacggcaaaaccactcaaaaacaaacttaatgcattgaatataaaggattaatcatctaattcgctcaccttcttattcagcagacgagaagcgcgccagtaaaccagcaacatcaggcccattacgatagtcagcgtaatgctggtggctgcaccaaacggccagtcacgaatattgaggaactggaccttgatgacgttaccgatcagcaggtttttcgcaccgcccatcaggtcggatacatagaacaggcccatcgctggcagcatcaccagcagacatccggcaataattcccggcatcgtcagtggaataatgatacggataaaagtctgtaacttgctggcaccgagatcgcgcgccgcctcaagcaacggcttatccagtttttcgatactggagtacagcggcatcaccataaacggtagcagaatgtaaaccagaccgataatcaccgcactgggcgtgaacatgatacgaattggtgtgtcgataacgcccagccagagcaaaaactcgttgagatagcctttggtgctgaggaaaattttcagcccgtagatacgaatcaatgagttggtccagaagggaacaatcagcagaaacagcagcagcggacgcaccttgtgtggcagcttcgccagaaaccaggcaaacgggtagcccagcaccaggcaggcgagggtggcgatcagcgccatattcagcgagtgcaatagcacttcaaaatagagcggatcgagcagacgcgtgtagttatccagcgtaaagaccattttgacgaaactggcgtcgtcgcgggtcaaaaagctggtgccaatgatcatcaggttgggcagaaagacaaacaacacaagccaaccgacaatagtgacaatcactacattctggaacttacttgtgttcttcatcagccagtacgacctcccagctttctacccaattaatggccattttttggtcgagagagtggtcaaagtcagggtcgtcttcattgaagaattcgctgaccatcaccatcttgccattttcaagttcaacaaccgactccagcgtcatgcctttgtagttacgctcgcgaacgtaaccaatcagcccttcagcgtggttgtcgtcgttaatctcttcaacacgtaagtcttccgggcgcagcagaacatgcagtttttgccccggttcaacggcgaagttaacgtagatattacattcgcggccttcaacgttggcgcgtacgcgctgctcgtcgagacgttcgatgaccgtggcgttaaacatattgatttcgccaatgaagccggcaacaaacaggtttttcggctcttcgtagatttcacgcggcgtgccgtcttgctcaatgcgaccatcgcgcatcaccacaatcctgtccgacatggtgagtgcttcttcctggtcgtgagtcacgaagacgaatgtaatgccaagcttacgctgtaacgctttcagctcgttctgcatttgcttacgcagtttgtaatccagcgctgagagcgactcatccagcaacaacagacgaggcttgttaaccaccgcgcgggcaatggcgacgcgttgctgttgaccaccagagagctgatgcggtttgcgttgagcgaaggtttccagctgcaccatccgcagggcttccatcacgcggggcgtaatttcagcagcgggggttttttgcatgcgcaacccaaaggccacattttcgaacacggtcatgtgggggaaaagtgcgtagctttggaaaacagtgttcacatagcggttttccgccggaacgtgggtgatgtcctcgttatccagcatgatgcgtccggaatcaacagtttccagacctgcaatcaggcgaagaacggttgttttaccgcagccagaagggccaagcagcgtgaggaactcgccattgttgatagtcagatccagctggggaatgacctctttaccatcaaagcatttgcgaattcccgccaattgcaccagcggtgaaagcgaactcggttgtttattcaattttttactctgtcccatgtaaacgcaacggatggcttaccgatgcggggtttgtggttaaccaccttggtgactcttaatgagggcggtaattctacggcaaaccgcttgaatcgccaatctttgttgtgaattactggcttagctttatattcattaaggtaatgctgataaatattcccgcttgcaggggtaaaagtgacctgacgcaatatttgtcttttcttgcttcttaataatgttgtcacaaaaagtgagggtgactacatggataaactacttgagcgatttttgaactacgtgtctctggatacccaatcaaaagcaggggtgagacaggttcccagcacggaaggccaatggaagttattgcatctgctgaaagagcagctcgatgagatggggcttatcaatgtgaccttaagtgagaagggcactttgatggcgacgttaccggctaacgtccctggcgatatcccggcgattggctttatttctcatgtggatacctcaccggattgcagcggcaaaaatgtgaatccgcaaattgttgaaaactatcgcggtggcgatattgcgctgggtatcggcgatgaagttttatcaccggttatgttcccggtgctgcatcagctactgggtcagacgttgattaccaccgatggtaaaaccttgttaggtgccgatgacaaagcaggtattgcagaaatcatgaccgcgctggcggtattgcaacagaaaaacattccgcatggtgatattcgcgtcgcctttaccccggatgaagaagtgggcaaaggggcgaaacattttgatgttgatgccttcgatgcccgctgggcttacactgttgacggtggtggcgtaggcgaactggagtttgaaaacttcaacgccgcatcggtcaatatcaaaattgtcggtaacaatgttcatccgggcacggcgaaaggagtgatggtaaatgcgctgtcgctggcggcacgtattcatgcggaagttccggcggatgaaagcccggaaatgacagaaggctatgaaggtttctatcacctggcgagcatgaaaggcaccgttgaccgagccgatatgcactacatcatccgtgatttcgaccgtaaacagtttgaagcgcgtaaacgtaaaatgatggagatcgccaaaaaagtgggcaaagggttacatcctgattgctacattgaactggtgattgaagacagttactacaatatgcgcgagaaagtggttgagcatccgcatattatcgatatcgcccagcaggcgatgcgtgactgcgatattgaaccggaactgaaaccgatccgcggcggtaccgacggcgcgcagttgtcgtttatgggattaccgtgcccgaacctgttcactggcggttacaactatcatggtaagcatgagtttgtgactctggaaggtatggaaaaagcggtgcaggtgattgtccgtattgccgagttaacggcgcaacggaagtcgtgattgcccgatgcgtatgtggactgccaattaccgggatgaaaccgttatattgatactggtccacatacttatcgtgcctacaggcgttcagtgcatgtaggcacgataaggcgcaatcagcgccgcatccggcttaaatccaaacttacccttcgaagaaccaatacccgctattgaccagcgccgcgagcatcgcgaggaatgacggatcttccagcgcatcgccaaaattctccgcagtcagcgcaatgttgctggcgagtgcatccagtgccggacggtgcggggaatcgatcttctcaccattggcatacacgtcgtcgccaatgcgcaatacgcgcagaccacccaggcgcaccagcacttcaccttgtttcagcgcatcgtagatttcatctggctgataaggcggttccggcggcgcgatatccagttcatgacgtgactgggatataaactcgccaaaccattgcttaaagtgttccggctggttgatcaattcgagcatcatctcacgcagtttatccatctcttgcggcagaacgtccgcaggatgagcgcgaggtggaacatccggatcgctgtagtagttgccgcccagttcacgttgcagcacataatcggcaaatccgctaattaattcccgcgtatttggcgcgcgaaaacccacggaatagttcatcgcattttccagcgcgtagccttcatgcgggaatcctggcggaatataaagaatatcgccaggctccagctcttcatcgatgatggcttcgaacggatcgacctgtaacagatccgggtgcggacagtgctgtttcatttgcagcttttcgcccactcgccagcgacgacgaccggtaccctgaatgataaacacgtcgtactgatcgagatgcgggccgacgccgccgcccggtacagaaaaagagatcatcagatcatcaatacgccagtccggtagttcacggaacggtcgcatcagcgcggcggtcggctcatgccagtggttcactgcctgtaccagtaatgaccagttggtttcaccgagatgatcgtagctttcgaacgggccgtggctgacctgccatttgccatcctggtgactgaccagtcgactgtcaacttcgctttccatcgccagacccgccaactcgtctggagagatcgggtcaataaaattattaaagccgcgttttaacaccaccgggcgtttctgccagtgacgttcaagaaaatcaggccagttaagagtgagttggtattccatgttaagcatccacaggctggtatctgcaaccgattataacggatgcttaacgtaatgcgtgaagtatggacatatttattcatctttcggcgcagaatgctggcgaccaaaaatcacctccatccgcgcaccgcccagcatgctctctccggcgacgattttaccctcatattgctcggtgatttcgcgggctaccgccagccctacaccttgcccagggcgtaaagtatcaacccgttgaccacggtcgaaaatgacctctcgcttgcttaatggaataccggggccatcatcctcgaccacaatatagagatgctcgtcggtttgccttgcagaaatttcgacaaactcgaggcaatatttacaggcattatccagcacgttgcccatcacctcgacaaaatcgttctgctcaccgacaaagctgatctctggcgaaatatcgagagagatattgacccctttgcgttgatacactttgttcagcgctgaggtgagattgtccagcagtggggcgaccggatgcagctcgcggctgagcaatgtcccgccgcgcatactggcacgatgcaggtagtagccaatttgctgtgaaatgcggctgatttgctccagcattaccggctcagcatcactgacgctcatcttttcactacgcagagaacgcagcgtactttgcagcaccgccagtggcgttttcagactatgggtcaggtcggtgagcgtcgtacggtatttgtcgtaacgttcgcgttcactttttaacaatcggttcaggtttcgtaccagactggtcagttctcgcgttgtggctggattgagcaattcgcggttatgttcttccagttcgcggacttcttttgccagggcttcgatggggcgtaaactccaccaggcggcgacccacagcagcgggatcactaacagcagattggctgagagcacatagataaaccagctccagaccatataggaactttttagctccaccggaatggtatccaccaccacaatggttaattttggcatccgcgatgttgccgggtagacgtttactgccaccgagtgggtcatctccgcgtcgtcatcatcttcccgcacttcctgcaactgttgctgtatcgaatgatctccactcagcaagaggctggtatcgttaacatccgcttcaatttcatgaaaaccattcgatttcagccagtcaggctggatcatcttcatcagccagggcacgtcacgttgcgcccataaaagctgcccgttctcatcataaattagcgtcatggtggggctttgcttgtcgatattttcgggtaactcgacatgcaacttattgttttcccacttcgcaagggtatagaacagattgctctcgccacgtaacagccgaaacgtagttttatcgaaactgacgctataaccgatcagcgcgaccattccgtaggcaagcgaaagcaccagtactaccgcagccgttgccaacagaaaacgtacccgcagtgagagcgggaaaaaaagacgcagtaattttttcatcagcgcaattcgaacaaatagccctggccgcgaacggtagtaatcacttcttgcggatattgtgcctgaatttttttgcgcagacgtcccatcagtacatcaatggtatggctttcccgcagctccgcatccggatagagttggagcattaacgaatctttgctcaccactttgccattattgcgtatcaacgtttccataatggtgtattcgaacgcggtcagtttgatcacttcgtcattaatagataattcacggcgagagagatcaacctgaaacgggggtagcgaaatgacctgtgaagccaggccgctattacgccgcattaatgcctgcattcgcgccatcacctcttcaatatgaaacggtttagtcacgtaatcatcagcaccggcacttaatacttcgactttgtcctgccagctttcacgggcggttaataccagaatcggcagtgaaacatcattgctacgccagcggcgaatcagtgacagaccgtcctcgtcaggcaatccgagatcgacaatcgcaatatccggtaaatgttcattgagataataatcggcttctttggcatcttctgcgtcatcgacctgatgaccagcatcctgaatctgaactttaaggtggtgacgtaacaacgcattgtcttcaacaaccagtacgcgcatttttatttctccctgtcttaattattaaaatagtgtaacgcgattatgtgtttatgggggtaaacattaaataaaccagcggggaggggaggtaaagtgaaaaaagaaaaagtggataattttaataaacaggccggacagcatcgccatccggcactgatacgagtttatttcagctcatcaaccatggtgatagctcgaccaatatagttagccggcgtcatcgctttcaggcgggctttctcttcttctggcaacgccagaccatcgataaactgcttcatgccttcggcgtcaacgcgcttaccgcgagtcagctctttcagcttctcgtacggtttttcgatgccatagcgacgcataactgtctggattggctcagccagcacttcccagttgtgatccagctcatccagcagatggtcacggtttacttccagtttgctcacgcctttcagggtggattgatacgcaatcagcgcataaccgatacccacgccgaggttacgcagcacggtggagtcggtcaggtcacgctgccagcgggaaaccggcagtttgcttgccagatgctgcaataccgcgttggaaaggcccagattcccttcggagttttcgaagtcaatcgggttaactttatgcggcatggtggaagaaccaatctcaccagcaatggttttctgtttgaagtggttaagggcgatataaccccagacgtcacggtcaaagtcgatcagaatggtgttgaagcgcgcaacgcaatcaaacaattcggcaatgtagtcgtgcggttcgatctgggtggtgtacgggttccactgaatacccagcgaggtgacgaactcttcgctgaactgatgccagtcaacttccgggtaagcggcgatatgggcgttatagttaccgaccgcgccgttgattttgccgaggatctccacctgattaagctggcggtactggcgctccatacggtaggcgacgtttgccatctctttaccgatggttgacggcgtggctggctgaccgtgggtacgagacagcagcgggatatcgcggtactgaacggcgagatctttaatgccatcaatcagttgacgccagtacggcaggatcacttcatcacgcgcggttttcagcattaatgcgtgggagaggttattgatatcttccgaagtacaggcaaagtggatgaattcagaaaccgcgtgcagttccgggatctccgccactttttctttcaggaaatactcaaccgctttaacgtcgtggttagtggtacgctcgatggttttgatgcgtgcggcatcttcttcgctgaaattggcgacaattgcatcaaggtaaccgattgcgtcggcagcaaaagcaggaacttccttgatcgctgcgtgcgcggccagtttttgcagccaacgtacttcaacttgtacacggaatttcagcaaaccatattcgctgaaaatcccgcgcagcgcgctgactttatcgccgtagcgtccatcgacaggggaaacggcggtcagtgaggataattccatagatcacaactccggggttaaatgagcaagaatttgttttgcctgagtggtcaggcgattacgagaaaacatcagttgcagacgtccgccgccgacctggtgccagagcacggcggcgcgaatgcctgccagcagggttgcgcgaactttcgcctgcacttgtgggctttgcagtacagcaggggaaccggtgacctgaatgcgcgggccaagcgggctgatcacatcaacatagatagcagccatcgcgctcatcagcgtttcggactgtaaatcgaagtgttcgagctggcgttgcaggccgttgatccggttgcccagagtgtcgagcgcgcctttcgctgaggagagtttgcgctcaagcaccatcaagctgagtgtgtagcgggttaattcggcgtttaagccctggcgactgctggcattgagcacgccgagcagggtttccagcccgacgcgcaggttggcttcgctaccgccaaaaaccgccagcgtcgagctggggttcatatcaataatactgttgagtgagacgtgtagcgcatcggcatcacaatgcccctggtgagcgagttgttgcaccaggcgtgccgactgacaaataccggccagggcgagggtgatgtcatagtaattctttgccacgttcactgcttccttgttttaagtaaagataataatcagaccggcagcggcagacgctgctcaataataccgccaccgaggcacacttcaccgttatagaagacggcagactggcccggcgtcacggcggcaaccggttcatcgaaaatcacttcaatgcgatcatcgtccagcgccttgacggtgcaagggatatcggtctggcgatagcgggtttttaccgtgcaacgcatagtgccggtgaatggttcgcgatcgacccagtgcaactgctgggcaatcaacccgacagacatcagccgcgggtgttcatggccctgagcgacaaccagaatgttgttttcgacgtctttgtccaccacataccacggttcttcggtaccttctttggtgccaccgatacccagacctttacgctgaccgagagtgtgatacatcagcccctggtgctcaccaatttcatcgccatcgacggtaatgattttgcccggttgcgccgggagataacggcccaggaactcgcggaatttacgttcgccaatgaagcaaatgccggtagagtcttttttcttcgcggtgaccagaccaagatcttcagcaatcttacgcacctgcggtttttccagttcgccgaccgggaacaggctttgcgcaatctgctcatggctgagcgtataaaggaagtagctctggtctttattgctgtccagaccacgcagcaggcggctcttgccatcgacatcggcccgacgtacgtaatgaccggtagcgatataatcggcacctaaatcttcggcggcaaattcgaggaaggctttaaatttgatctctttgttgcacagaatatccggattcggcgtgcgaccggctttatattcggcaaggaacagttcgaagacgttgtcccagtactcggcagcaaagttaacggtgtgcagttcaatgccgagcttgtcgcagacagcctgggcatcagccagatccgctgccgctgtgcaatattcctcaccgtcgtcttcttcccagttcttcataaacaggccttcaacctgatatccctgttgttgcaacagccaggcagaaacggaggaatcgacaccgccggacatgccgacgattactttttttgcggtttcagacattggatcactcacgacattgaacttcaaggcggcgtattctatcacgcagccttttagatgacaccctttgtaaaaggccagttaaaatcgccaatcatctccagcggatagcgttgcccgctttgataacaacggatactttccgccaccagcggcgaacgaagatttgacgcctgtaaaatttcttcggcgctgacccaacgacagcagtcgatatcgctgtcatgaggctgggtcgggcatatttgctcaagctcaatggcaaagaggaaacgcaaaaacggcgttttatctggcgcaatccactgatgcatacgaataaagtgttgcggctgcgcgctgatgccggtttcttcccacagttcacgggcggcggcttccactaaggtttcatcggcttccagatgcccggcaggttggttccataacgctttaccattaatcgtctcttcaacgactaaaaatttgccttctgcgtgcaccacgcaagcaacggtaacgtgcggtttaaacattttgcatccttaatctgtcacttctcgccattcgccattggcaagattatccaaagagtaatctcccatcgcatagcgaatcagtcgcagcgtggggaaaccaacatgggcggtcatgcggcgcacctggcgattacgtccttcatataaggtgatcttcagccagctggtgggaatacttttgcgttcacgaattggtggattccgcggccataaccacgcgggttcgtcaaccagctccgcgcctgcgggcagggtagggccatcatttaaggttacgccattgcgcaaggcttcaagtgcgtcttgtgtgggaataccttccacctgcacataatagatttttccggtgcgtttacccggctgggttaaacgcgcctgcaacgcgccgttattggtcagcaccagcaacccttcgctatcgcggtcaaggcgacctgctgcataaacgccctgaaccgggatgaattcttttaatgttttgcgtccggcttcatcggtgaactgcggaagaacatcgtagggtttattgaacaggatcacacgcgtgggctggttttcaggtttacgcctggtagaacgttgcgagctgaatcgcttaacctggtgatttctaaaagaagttttttgcatggtattttcagagattatgaattgccgcattatagcctaataacgcgcatctttcatgacggcaaacaatagggtagtattgacaagccaattacaaatcattaacaaaaaattgctctaaagcatccgtatcgcaggacgcaaacgcatatgcaacgtggtggcagacgagcaaaccagtagcgctcgaaggagaggtgaatggaaagtaaagtagttgttccggcacaaggcaagaagatcaccctgcaaaacggcaaactcaacgttcctgaaaatccgattatcccttacattgaaggtgatggaatcggtgtagatgtaaccccagccatgctgaaagtggtcgacgctgcagtcgagaaagcctataaaggcgagcgtaaaatctcctggatggaaatttacaccggtgaaaaatccacacaggtttatggtcaggatgtctggctgcctgctgaaacccttgatctgattcgtgaatatcgcgttgccattaaaggcccgctgaccactccggttggtggcggtattcgctctctgaacgttgccctgcgccaggaactggatctctacatctgcctgcgtccggtacgttactatcagggcactccaagcccggttaaacaccctgaactgaccgatatggttatcttccgtgaaaactcggaagacatttatgcgggtatcgaatggaaagctgactctgccgacgccgggaaagtgattaaattcctgcgtgaagagatgggtgtgaagaaaattcgcttcccggaacattgcggtatcggtattaagccgtgttcggaagaaggcaccaaacgtctggttcgtgcagcgatcgaatacgcaattgctaatgatcgtgactctgtgactctggtgcacaaaggcaacatcatgaagttcaccgaaggcgcgtttaaagactggggctaccagctggcgcgtgaagagtttggcggtgaactgatcgacggcggcccgtggctgaaagttaaaaacccgaacaccggcaaagagatcgtcattaaagacgtgattgctgatgcattcctgcaacagatcctgctgcgtccggctgaatatgatgttatcgcctgtatgaacctgaacggtgactacatttctgacgctctggcagcgcaggttggcggtatcggtatcgcccctggagcaaacatcggtgacgaatgcgccctgtttgaagccacccacggtactgcgccgaaatacgccggtcaggacaaagtaaaccctggctctattattctctccgctgagatgatgttacgccatatgggttggactgaagcggctgacctgattgttaaaggtatggaaggcgcaatcaatgcgaagaccgtaacctatgacttcgagcgtctgatggaaggcgctaaactgctgaaatgttcagaatttggtgatgcgatcatcaagaacatgtaatcactacatgtgtttaatattgcaacgggcgtataacacgcccgttgttttatttatgtaggtattattaatagcatatcgagcatatttatataaaaccctttacttgagcccatatgggcatatttttataatgcaactattatgcaaacatttatttgttatttttctttctcctggaggacactcttgactgcttttgagtagactccataaatccttgttgaatggtgcgatgttataaatagtaataggatattctttatctttaaggataattccagatttaaccggtgtaaatatactgccaggagggagaaatatagtagattgataccagatgatcattttcatattaccccatatggctgaaaaagatatgccgcatgaaggttgaattatcgtgtcaattactatccacttcatttgttatgtcttatcccacggtatttaatatagttcatttggatgttcatttctttattttgcatatgagtatattaccccttcaaaaaataaattaattaaaacgattgcttatataaaacaaaatttaaagcaaggaatctcaatggatgttaaacaaaatgagatttagtgaaaacaataaattattcacttcgttttagatttgtttagctataatgttatacattcaaatgactgaacatcctgtaattaaaacatagcctttatgctactttgtgccaatttgctaaacattatggttgcctttttatataacgataataatgaatataagcatgacatgagaataaggtttcaatttttgagttatataggaaaggtttaacctgttcctggctaaaatacatataactggatgatgactaaaccaaaacacatgtgcgttaagtattgaaacgggcgtatggcacacccgttgtttttataaatatattaaccgttataaaataacgtatagaaagtcaagtgatcacatttcaaatatcaatttgatagtattggcatggtgattatttatgggtagcaataaaaggacagtatttatcatccatagggatagtctctgtacttttattcccattatgctaatgccttactgaattatgaagcatttcttaagcatccaactttagctagattaatggtttattattttctacatcttcaatatataaaagcgtattatcaatggcgtagtaactgcgtttgttatgattaacatcagtaacccaccggaaaacgcccgcgcctgctagtgttgaacagtattcccgaaatgtagattttccgcaaatatgaagcaatgcggcctcttttattttagcagggttcttggtcgtactaacttttaacaggttcctggttcctcttaataacaaaaccgtgtcatcgtgagtaataattctgatgttatccgtagccagataataaatgtaatgtgcaatacggtgatgttttaattctgaataaaaccaggagaagttttgctcttttctcacttgctcaaacatcttttgaaaaacaacgacctgatccatcaggataataacctcttgttagttgtgagactgcgtagtgtgcacgatcggttttaccacttcaatctggtctgtcctttggctgtgatatgtacagagtgtgatagagggaatatctgaattctcccggtgagcattttgcaacggaccagctccggtacaaacgctgttgtgggttcagattataacattctgtctaaggggcgggataaaggtgaaattagggggcatgaaagatgactttataaccttgctcaccccagtgttgtaaaagttcgttttgccttctcgttggtgccatgcctgtccagacaatcaatgtttgcgtcgggaacagttccgggcgcggcgattcaatgggatcagcaagaacagaaatgtgccatcctgacaatgataaacgccatgcttccagccacaatcgtgctctctcttcaacattccacgccatcagaatggcttctttaccgggcttacggcgcatttcgaaaagcgaggttgctgcgtattcaattaatgcgccgtcaaacatactgctcataatgcgggaggtgttgtgatcaagcacgagacgctggcgaacaggaaggtaaacatgattaatcaattgatctactgggtactctcgacccagtgaaataattctcgcgcgtagtttggcaggattagccatgcgaagaattgacatcatctcttcttgcaggcggctccagtcatcttccgtatcctggctggtggtttccagtaatgctttaactttgcctacagggacgccattacttatccaacgcttgatctcttcgatgcgttgtatgtcttcttcatcaaagagtcgttgtccgccttcactgcgctgtggttttaacaaaccgtagcggcgttgccaggcccggagagtgacaggattaatcccgcaacgttcagcaacatcaccaatgctgtaataagccacaattcctccttgcggtcacaaatctccgtcgcctgtacacgacccaataatactttgtacaatatacgctaaaattgtacaaagtataaataagatttcagctaaattggatgaaacattatttttaatgtggattaaatttaaacgtaacgtattcattttcacgatgatttactgaaatcatgtgaaagaatgtgctgaaaattattttttctctggccacgctatggaagggataccattcaatttagctttagcaaacagatctccctgaaacatctcaattcctgcggattcaagccacatccactcttctggtgttgccacgcccatagcactgacttgaatttcaagtgatgtacagcattttatgatcgcctgaataattgcctgccgtggcccacttttatgaacattggtaatcaattcctgactgattttaattctgtcaggctggaagcgtgacaggagtaacaaaccagcaaaacctgcgccaaaatgatcaattgctacactgataccagcagcctttagcgatttaatcgcttcggcaaactcatcaaaccgagatatgacttcactttcagtaaattcaacgatgatttgttcaggcaccagagcattggcctttatttcattaagtaaaaaagagactgcgtcaggttcgttaaccagggtcataggtaatagattgattgaaatcattttatcaccgagctcaagtgcgtgtgccatcgtgaatgcaagcgccttacttttgagatccgctgtgtagatttccccgtctttacgctgcccaaccgctatggctgatgggctatcttcatttttttgcacaatggcttcaaaagcgattatccgccgcgataagggatcgacaataggatgaaaggcaaagtggtcgtttatagttggtgaaagggcacaggaatcaagttctttatcagatccgtcagcgataaaaagccagcagtcttcggcagggatctcgaaataggttgattgttcggttgcaaggacaaaagtacgaaaaaattgtagcgctctgtcatcataagttagctgaaattttgatgtgcctttgtcgaatacggcctgtaaaacgtcatctcgctcgtgcaggcgcaaatcaaataattccattcccgctttgccaaaacggcgagcaggcgcgtaatcgcacagcagctcaacaatattatagtgccgtggatcctggcatatagcccgatatatcattttaacctgttcttccggaccttccagaagctggaaaaaatgagaaccattaaacagtaagatccctgttacgtcagactgcatgttcctgcgatttgctatcgaaaccatttcttcgatttttttgacaggttcgtcgtcacgtatatggctacgataaataagggtggtaagcattaacaatccagggtaatgggtgaggcgagagtaagacggtaacagacatatcttcttgtgtctttcttttaataccaaaacataaccgtttctttacattgataaaaaatggaaaaagttgaacactagttggcgaaaaatcttgtatagattgtcagttaaatgatgcaatatgttttatcataacacattgttttatatgcattagcactaattgcaaaaaattaatttatcattctgtacacatatttcgtacaagtttgctattgttacctcacttaacattgattaacatttttaacagaggcgtagcatgcatcaaaattcagtgactttagattctgcgggagcaatcactcgttactttgcaaaagctaacttgcctactcagcaggaaactctcggggaaattgtgactgagattttgaaagatggacgtaatctgagtcgaaagtcgctttgtgccaaacttctttgccgactggaacacgcgactggggaagaggaacagaaacattataatgcactaattgggttgctttttgaataatgcaacagcctgattatttaacaggttagctatgaagtcgttatgaagacatctgataatgaacgtataaaatatgaaattactggccaggcggtgatccagatactgcgcatgaagataaatttttcattgcagactcttattaagcaattactcgtaatgaaatcggctgaggaagatgctttccgacgcgatttaattgacagcataattcgtgattttagcaatagtgattcaggagggccaaaccgaagaacagcgacagctgacaataaaagtatgttcaatggtaagaaaataaacagaatacattaaaatttcataagtaagatgagaggttaccatgcttgaagatactacaattcataatgcaataactgataaagcgttagcaagttactttcgcagttcgggtaatttgttagaagaagagtcagcagtgttagggcaggctgtcaccaatttaatgctttcaggcgataatgttaataataaaaatattatcttaagtctgatacactccctggaaacaacaagtgatattctcaaagctgatgtgattagaaaaacactggaaatcgtgttgcgatacacagctgatgatatgtaacttctaattattaagtataagtttatagaaaactcattcatcttatttttgtctgtcgctttagactatacacagcataattttattgggttaatatttctacgaggctgacatgaataattcaatcccagagagatttatttttcaatgtgctttgtttaaaaatctcgagagggaggtgttcatgacgcatgggtatgttgatagtcatattattgatcaggctttacgcttgcgtttaaaagatgaaaccagtgtgattctttctgatctctatctgcaaatattgcagtacattgaaatgcataagactacactaacggatatcattattaatgacagggaatccgtgctctcttagaacttgagtaaggttttagaataaacatcagctgtatcaccatgctgatgcaaagtgagcatttcaggcgttatgctttcttattatgtccgcaatatcaggtgtcaagaatggagagttctcgctctccattcttgacgcctgatatcccgcctaacttattttgtactgcctacattatgctcaataattaatgggttagatcaagatggagaaaattttatcttcggcgtggatatttcttatgctctctaccatgctctctgtagatgccagcgcgagcgaatgaatggcattttcatgtattaaaccctttggccgggacaagcaaatgcgcaatacactcatacccatcctcgttgcgatatgcttgtttattaccggtgtcgctattttgaacatccagctctggtattccgcaaaagcagagtacctggcgggagcgagatatgccgccaacaatatcaatcatatacttgaagaagcgtcacaagcgactcaaacagcggttaacattgccgggaaggaatgcaacctcgaggagcaatatcagcttggcactgaagcagctctgaaacctcacctgcgcacaatcatcattctcaaacagggaatagtctggtgtacatccctgcctgggaatcgggtcctgttgtctcgtattcctgttttcccggacagtaatttactgttggctccagcaatcgacaccgttaatagattacctatcctgctctatcagaaccaatttgcagatacgcgcattttggttacgataagtgatcaacatattcgcggggcgcttaatgtacccttgaaaggggtaaggtatgtattacgcgtggcggatgacattattggaccaacgggtgatgtgatgacgcttaatggacattatccctataccgagaaggttcactccacaaaatatcatttcactattatctttaacccgccgccactctttagcttctacagacttatcgataaaggctttggaattttaatatttattctgttaatcgcctgcgccgctgccttcctgcttgatagatatttcaataaaagcgcaacgcctgaagagatcctgcgacgggcaataaataatggggagatcgtccctttttaccaacctgtggtaaatggtcgggaagggacattgcggggagttgaggtgttagcccgctggaaacaacctcacggtggatatatatcacccgcggcatttattccacttgctgaaaaatccggattaatcgttccgcttacgcaaagcctgatgaatcaggttgccagacagatgaacgctatcgcgagtaaattgccggaaggttttcatattggaattaattttagcgcttcgcatattatttcgccgacgtttgtcgacgagtgtttaaatttccgtgacagttttacccgccgcgatttaaaccttgttctggaagtcaccgagcgtgagccattgaatgttgatgaaagtctggttcagcggttgaacattctgcatgaaaatggttttgtcatcgcgctggatgatttcggtactggctactcagggctttcttatcttcatgacctgcatattgattatatcaaaattgatcacagtttcgttggccgcgtaaacgcagacccagaatcaacccgaattctggattgtgtattggatctggcgcgtaaactttcgatcagtatcgtcgctgaaggtgtcgaaacgaaagaacaacttgactatctgaaccaaaataatatcacatttcagcagggttattatttctataaacctgttacatacatcgacctggtcaaaattatcctttctaaaccgaaggtgaaggttgtggttgagtgaaaattgatcagtaaggccatagtgcggtgtaattatagacagctaattagctcgttgcctcttgttactattgttcattattttgtttgctataattgtttgaaagttttgacaggattgccattagtagcatgaacaatagtaataatctggattatttcactctctatatcatcttttccattgcatttatgctgatcaccctcctggtcatccttattgcaaaacccagtaccgggctgggagaagtgcttgtgacgataaatttgcttaatgcccttgtttggctggcgatcaatctggttaatcgattaagagaaagactcgtcaaccacagggatcagcaataatctttcagtttctcactgtcagtatgcggctgaatgggttgctggcagtgaacgcctggatcattgaaggaaaggcattattgcgcaaatagttgtcaaccctggtgttatcacggttgtttttatatatcaccgaaataatcctcatcgcaactattaacaattttgatgtcgaagagttatttgttaaacaaaatcgtcaccctaaagtgatcaatgtcatgaaaataaggtgaaaaatgataatgccgacttatttatcatttatatattgtcgctgtttatctatttaaattttttgtgcttttgtttttgtctttaccctccgttttggtaatctgaacgcataggttatttgaccaggaatgtttgttaatccaatgaatggatggttaatctatgaaactgaaaaaactctccgggtttagtttgggacttattgctctggcggtgggggtgatgctgccaacttactgatttagtgtatgatggtgtttttgaggtgctccagtggcttctgtttctatcagctgtccctcctgttcagctactgacggggtggtgcgtaacggcaaaagcacc

SEQ ID NO: 46 - DNA, 55251 bp, Escherichia coli
  source 1..55251: mol_type = genomic DNA
atcgagttcgcacatcttgttgtctgattattgatttttcgcgaaaccatttgatcatatgacaagatgtgtatccaccttaacttaatgatttttaccaaaatcattaggggattcatcagtgcagggtggggaattggggcttaatgatatcctcgccacggatattgtgctgactattcgtcagcgactttttgccgaggcagaggccaaagaattagcagttcgcgattttgcctgcacgtttctgggattgatttcatcggctaatggcaccttgattatgcagattggcgatggcggcgtggtggtggattttggtcacggtctgcaattgccgcttacgccgatggtgggtgaatatgccaatatgacgcacttcattaccgatgaagatgccgtttccagactggaaactttcaccagcactgagcgtgtgcataaagttgcagcatttacggatggtatccagcgactggcgttaaatatgctggataattctcctcatgtacctttctttaccccgtttttcaatggactggcgtcagcaacgcaggaacaactcgatttattacctgaattgttaaagcagtttttgtccagcccggcggtaaacgagcgtacggatgatgataaaacgttggcactggcgctgtggttaccatgaaacccactttatatactgctactggtgagtgcgttacgccaggccgtgaactgggcaaaggcggtgaaggcgcggtttatgatatcaatgagtttgtcgatagcgtcgccaagatttatcacacgccgccacccgccttaaaacaggacaaacttgcctttatggctgcgacagctgacgcgcaattgttgaattatgtcgcctggccgcaggcaacgcttcacggtggacgaggcggaaaagttatcggttttatgatgccaaaagtttctggtaaagaaccgattcatatgatctatagcccggcacatcgtcgccagagttaccctcattgtgcgtgggattttctactctatgttgcgcgcaatattgcttcatcttttgctacggttcacgagcacgggcacgtcgtgggtgacgtaaaccagaacagttttatggtaggtcgcgacagcaaagtggtactgattgatagcgactcctttcagattaacgccaatggcacactgcatttatgcgaagtcggcgtgtcgcattttacgccgccagagctacaaaccttgtcgtcatttgtcggctttgaacgcacagaaaatcacgataattttggccttgcgttgctgatttttcacgtcttgtttggtggccggcatccttattctggtgtgccgcttatctctgatgcgggtaatgcgctggagacggatattacccatttccgttatgcctacgcgtcagataatcagcgacgtggtttaaaaccgccgccacgatcgattccgctatcgatgttaccgagtgatgttgaagccatgtttcagcaggcattcacggaaagtggcgtggcaaccgggcgtccgacggctaaagcgtgggtagcggcacttgattctctgcgccaacagttaaagaaatgtcccgtttcggcaatgcatgtttatcccgctcatttgaccgactgcccgtggtgtacgctggataatcaaggcgttatctattttattgatctcggcgaagaggtcattaccaccggcggggattttgtgctggcaaaagtctgggcgatggtgatggcgtcagtagcaccgccagcattgcaactgccattacccgatcatttccaaccgactggcaggccgcttcctttaggcctgttacggcgcgaatacatcattctgcttgagatcgcactgtcagcattatcgctgctgctttgcggccttcaggcagaaccgcgttatattattttggttcctgtgctggcggctatctggattattggcagtctgacaagcaaagcttataaagcagaaatccagcaacgccgtgaggcatttaatcgcgcgaaaatggactatgaccatttagtcagccagagccaacagttgggcgggctggaaggttttatcgccaaacgggcgatgctcgaaaaaatgaaggacgaaattctcgggttaccggaagaagagaaacgcgctctggcagcacttcatgacactgcaagggaacggcagaagcagaagtttctggagggattttttattgatgttgcctctattcccggcgttggccctgcgcgtaaagcggcgttacggtcttttggtattgaaacagccgcagatgttacccgtcgtggcgttaagcaagtgaaagggtttggcgaccatctgacccaggcggttatcgactggaaagcgagctgtgaacgccgttttgtgttcaggccgaatgaagcgataacgccagcagacagacaagcggtaatggcgaaaatgaccgccaaacgacatcggctggaatcggcgttgacagtcggcgcgacagagttgcagcgattccgccttcatgctccagcacggaccatgccgttgatggaaccgttacgtcaggcagcagaaaaactggctcaggcgcaggcagatttaagccgctgctgagccatttttcaattaacgaaacaccacttccgcccagcgtgccagcccggcggtgacggagccaaagtcatcgccgcctgcaatcggaatgcccggcaactgttctgccagcgcttttttaatcagcggagaacgggcgctaccgccggtcaggtagataacgtccggtttttcctgggcgttatccagggccagttgcacctgttccagaatccgcgccagtggctggctgagggcgctttccagcccttgctggctaatcagcgtagccagttcatcgctgataaacggcagtgaggcgcgggtttccgctacgcttgaaagagcaattttgcactcttctgcgctacgcaccaggcgatagcttaaacgctgacgccagactttctgtagcagggccactttttccggttcgcgggcatcgcgtaccagatcgttaagcagacgaccgttggcactactgtagaaatcactctgcgcaggtacgtcgttgatggcaaccgcattccaccacggcagaatcggcagggcgatgcctttttcggtttcgccacccatgcccagtaacggcatcaggtttttaaacgccagtgcgatgtccagatcgttaccgccaatacggcaaccactgtgacccagcaggctggcttcacgatcgagacgcgaacgccactgcggccccatcagcagcaatgaacagtcagtcgtaccaccgccgatatccaccaccagcacccgtttttcttcctgcaaggtggcttcgtaatccagcccagccgcgaccggctcgtactggaataccacgtccctgaatccggcacgcttcgccgcgcgttccagaatcccttgcgcctgggtgtttgcttcatcgccgcccagcccctggaagttgatcgggcgaccaatcaccgcctgagtaatcgcttctggcagctgcgcctgcgcctgctggcgaatgtgcaacatcattgcgcagaccagatcctcaaacagcgctacctgctgcggttttaagccgctggcaccgaggaacgattttggtgatttcacaaaccacacttcttctggatcatcaatgtactgtgccagtgaggaaagaccgaactgcacgcttttcgccgtaacatcgatatcttcttcgcggttataacgaatcgcccgacgtaacagcgcctgcgtttcatcgtcgtctgccggaacatcatgatggcggtacagccattcgcttaccgattcacgcgttggcgcgcaaagcattgaaggcagcagcgtgctgtcgttttccattttcagtaattgcggtttaccgtcacgcatgaccgccactgaacagtttgctgtaccgtaatcaaaaccaataaacacgatttaatccccatgccggtgaagaaggggcgtgactttagcgaaatgttgctgtcgcgacaaccggaatatgaaagcaaagcgtagcgtctgaataacgtttatgctgaaagcggatgaataaggagatgcgatgtataccctgaactggcagccgccgtatgactggtcgtggatgttgggatttctcgccgcccgtgcagtgagtggtgtggaaacggtcgctgaggattattatgcccgtagtctggcggtgggcgaatatcgcggcgtggtgactgctattccggatatagcccgccatactctgcacataaatttaagtgcaggtttagaacccgttgccgctgagtgtctggcgaaaatgagccgcctgtttgatctgcaatgtaacccgcagattgttaacggtgcgttgggcaagttaggcgcggcgcggcccggattgcgtttacccggctgtattgatgcttttgagcagggtgtgcgggcgattttaggccaactggtgagcgtggcgatggcggcaaaattgactgccaaagttgtacagctttatggcgaacggctggatgattttccggagtatatctgcttccccacgcctcagcggctggcagcagccgacccgcaggcattaaaagcgttaggcatgccgttgaaacgggcagaggcactgattcatctggcaaatgcggcgctggagggcagcttaccaatgacaattccgggcgatgtggagcaggcgatgaaaacgctgcaaacttttccgggtatcgggcgctggacggcgaattatttcgctttgcgtggctggcaggcgaaagatgtttttctgccggatgattatctgattaaacagcgatttccggggatgacaccggcacaaatccgccgttatgccgagcgctggaagccctggcgttcttatgcgctgttgcatatctggtatacggaaggctggcaaccagacggaacggacgaattgtaggcctgatgcgtcgcatcagacaatgggcaaacgctccctcagttaatcgcgaaataactgctattcaccagcaaatccagcggttgggcatcggcaatcacatcaccataaatcagatcgacgccgatgccagaaagcgtatccatcactaagggtaaaacgactggcccggcgatggttttcatcccgagtcgctgagcgtgcccctgaataatcgtaatcagcatctcatccatcaaattaccctgcacgttggcgcataactcaccatcaagtagcaggtaatctgccatattcgctttcagcgagttgaagatttgcagatcgcggcccacctggctgagcactatccgacatcccgccagccgcagtttttgcacgctttctgcgtgatctaaaatcgcgtctgccggaataatcagatgtaataaccgtggtggtagagggctattttccagctgctcaagcagatcattcaccagcgtggcgctactcaaaccggcaacggaaagggggagggcgatgcttatgcctttactggcaaccgcttttgcggccagctggaaaaattcgtggaatacccgtcggtcaagagcatggctaagtgccggatcgctgaagctacgacgaaatttttgttcatcaataatctcgccttcgcaactccagagtttaagcgaaatcagccacaaattacgcgcttccgggatccgcggcgaagcgacaccgtgggccatcatcatcaactgattctctttaatcatccgccactgttcatcaagcgacatcgccgcccgttcgctatgtgcggcagcttgctgtggttcgtaaaccgtcacccggccccgtccaccatttttggaggcataacaggcgatatcagcctgcgacatcacttctgccgcctgatgattgttgtcatcaatcaaggtaatcccggcactggcacctacccgatgcacacggccttcccatataaagtgatagtcattcacggcactgataatgcgtgtagcgataaaacgcgcgctttcaacattacagtctggtagcagcagaccaaattcatccccaccgagtcgcgccagcacgtcgctggaacgcagcatactcagcatcaacgacgccagttcgcgcagcaaagcgtcgcccgccgcatgcccggcgctgtcattcaccgctttaaagcgatcaagatcgataaacaccagggcatgtcgctgatgtgtactgtttaccgtttgcagcagcatacgcagttgcttctcaaaactggcgcgattggcgagatgcgtcagtgcatcatgggaggcgctgtagctcagctggcgcagcattttgcgtgattcggtaacgtcctgaatcaccagaaccgaaccaatattgctgccgtccagagtacttaacggcgtaatactgtaatgcacgtcgtagctgccgccgctccggcagtgcaacaccacatcttgttcaatcgcggaacgtgaggtgtcggcactgtaaatgttctccatcaggggaccattgtcgccaaaggtaatatgcaacaccgtcaggagcggaacacctaatgcttcttcctgcgtccagccgctcatcttctccgccactggattcataaaggtaattttcattgccatatcaatacagaccacggcttcgccgatggagtccagcgttatgtgcaggcgctctttttcctgaaacaatgcctcgttaagctgtttaacctcagtcatatccatattaatgccgagcaggcgttcgacttcgccttctttattcagtacccggttggcgagggcgcggatatggcgaataccgtcttttacggtaatgcgaaattccagtttaaagggcgagcgtgattgcaacgaatcacgaatcactttttcggcatgctggcgatcttccggcagcacgcactcgtaccacacctgccagttcggtttgatatgtggaggaatttcatacagctcgaacatccgcttatcccagctaaaaatattcggcttcaactcccactcccagatgccaatcccgcccgcttcgttagccagcgtgatgcgctccatcagttgctgattcacctgttcggtgcgttttagctcgttaatgtcttcaatctgagcgataaaatagagcggcgtgccatccgtgtggcgcaccagtgagacggcaagcaacgcccagacaacatcgccattgcggttgtagtagcgtttttccattgaataggtgtttatttcaccgcttatcagcttttcaacctgttggagatctttattgagatcctccggccaggtcagttgctgaaaggtgagtccgcgcagctcttcctgactgtacccgagaaactggcagagcgctttgttggtttgcagccattgtccctcggtgcccactaacgccataccgatagcggaatattccatggcgttccgaaaacgggtttcgctttcggaaatgtgtttgcgttccgcacgaaaggcatacatcaccatcgtcatgatgttggcgggcagcaggatcagcaaaaacggtagccacggcatatggctcatcaggtatgtacgcggcgtagcaagcagggagggatccgcggccatcatcagcgacaccatcatcaccgtggtaaggaagatcaaaaaggcttccattcgtggcaggcgcacggcgctccacatcaacagcacaataatgaaagtaaaaggccacggcagatacagcatcgaaagccagcttaacgtcagtgtgatggctaacgtgagcagcgactcaaaaagcaaccgtgggttgcgatggcgcagcagatagtgtggtttaaataacaatcccagcggcaccagtgccagagcgccgatggattctgacagtacccatatcaaaaatgccctgagaggatcgtctccgggcgtcagcaggacaaccagaacaccccctagcagaggcggaacaatggcgctgccgaatgccagacgcagccagtcagccagattttgcaaggggttataccacggcagcaatttacgtagcagcactgccccgaccacggcttcaacaatattgatggtcgtccaggtcatgttcagcgagctggtggaaaaaagcaggatggatgcggcgatatttcccagcgagcagctcagcgcaattcccggccacatgcgcccggcatggcgataaaacgccaccatcatgatggacgtcgggaaccacagtggggcgagttgggtgccaaactgcgaaagctcaagcgagaaaagggtaaagataaacgagactaaacctaaactgaccaggtgaagcagcgggtggggcagggcaattaatacatgctgtgattgtttgctcattaccgctttatccgcaagaccaggtcgccagtattcgtttctgtgtttatgctagtacaaaagttttacattttatatgcgaattgctcataaagtgacgtaaaggcggataatttgcgcaactgcgtataacattttttaccttacataaaactgatcaacgtaatttgccaccgggaattctttgtcaacaattaactctgagcgcgcggcaacgctattcgactggtatcagacggatgaaatccctataattgccgcgtttggcgcttcgtcgcccccttcctaacatccaggttaatcaggtcgctaaatatatgactgatcagtctcatcagtgcgtcattatcggtatcgctggcgcatcggcttccggcaagagtcttattgccagtaccctttatcgtgaattacgtgagcaagtcggtgatgaacacatcggcgtaattcccgaagactgctattacaaagatcaaagccatctgtcgatggaagaacgcgttaagaccaactacgaccatcccagcgcgatggatcacagcctgttgcttgagcatttacaagcgttgaaacgcggctcggcaattgacctgccggtttacagctatgttgaacatacgcgtatgaaagaaacggtgacggttgagccgaagaaggtcatcattctcgaaggcattttgttgctgacggatgcgcgtttgcgtgacgaacttaacttctccattttcgttgataccccgctggatatctgcctgatgcgccgcatcaagcgtgacgttaacgagcgtgggcgttcaatggattccgtgatggcgcaatatcaaaaaaccgtgcgcccgatgttcctgcaattcattgagccttctaaacaatatgcggacattatcgtgccgcgcggcgggaaaaaccgcatcgcgatcgatatattgaaagcgaaaataagtcagttctttgaataagcttgataaattgtgtaccgttcagtgataacctggtatgcccttgacgtaattggcgttaagggagtgatgcgcgaaaggagaaaatgccatgcgtctgtgtgaccgagatattgaagcctggcttgatgaaggccgtttgtcgatcaacccacgtccgccagtggagcgtattaacggcgcgacggtggatgtacgcctgggcaataaatttcgtaccttccgtggtcacacggcagcgtttatcgatctgagcggtcccaaagatgaagtgagcgccgcgcttgaccgcgtgatgagcgatgagatcgttctcgacgagggcgaggcgttctatcttcacccaggagagctggcgctggcggtgacgctggagtcggtgacgctgccagccgatctggtgggctggctggacgggcgttcctctttggcgcgtctggggctgatggtgcacgtcaccgcgcaccgtatcgatccgggctggtctggttgcattgtgctggagttctacaactccggtaagctgccgctggcgctgcgtccgggcatgttaattggtgcgctgagctttgagccgctttccggcccggcggcgcgaccttacaaccgccgtgaagatgcgaaatatcgcaaccagcagggcgcggtagccagccgaatcgataaagactaattcaggcccattgaggataccatgagacgatttctgacgacgctgatgatactcctggtcgtgctggtggccgggttatctgcgttagtgttgctggtgaatccgaatgatttccgcgactatatggtcaagcaagttgctgcacgtagcggttatcaattgcagctcgacgggccactgcgttggcacgtctggccgcagcttagtatcctctccgggcgaatgtctctcaccgcccagggcgcaagccagccactggttcgcgccgacaacatgcgtctggacgtggcgcttttaccactactgagtcatcaactgagcgttaagcaggtgatgctaaaaggggcagtgatccaactgacgccgcagacggaagcggtgcgcagtgaagacgctccggttgcaccgcgcgacaataccttgccggatctgtcagacgatcgcggatggtcgtttgatatatccagtcttaaggtggcggacagcgtgctggtgttccagcatgaagatgacgagcaggtgacaatccgcaatatccgcctgcaaatggaacaagatccccaacatcgtggctcatttgagttctccgggcgggttaatcgcgatcagcgcgatctcacgatatcccttaacggtacggtagatgcttctgattatccgcatgatttaacggcggctattgaacaaattaactggcagttgcagggtgcagatttaccaaaacaaggtattcaggggcaggggagtttccaggcccagtggcaggagtcacataaacgcctttcatttaaccaaatcagcttgaccgccaatgacagcacgctgagcgggcaagcacaggtcacgctgacagagaaacctgaatggcagctgagactgcaattcccgcaactgaatcttgacaacctcatcccgcttaatgaaacagcgaatggtgaaaacggtgccgcgcagcaggggcagagccaatcaacattgccgcgcccggtcatttcttcgcgtattgatgaaccggcatatcagggactgcaaggctttacggctgatattttgttgcaggccagtaacgtgcgctggcgcggaatgaattttacagatgttgccacgcaaatgaccaacaagtcgggtttgctggaaattactcaactgcagggcaagcttaacggtggacaggtttcactgccgggcacgctggacgcgacatcaataaatccgcggataaacttccagccacggctggaaaacgttgagattggtaccattctgaaggcgtttaactatccgatttcgttgaccggaaaaatgtcactggctggtgatttctccggtgctgacatagatgccgacgcattccgccacaactggcaaggacaggcacatgtcgaaatgaccgacacgcgcatggaagggatgaacttccagcagatgattcagcaagcggtagagcgtaatggcggtgatgtgaaggccgctgaaaactttgataacgtgacgcggcttgaccgctttaccaccgatttgacgttgaaggatggcgtcgtgacgttaaacgacatgcaaggtcaatcgcctgtgctggcgctgacaggggaaggcatgttgaatctggcagatcaaacctgcgacacccagtttgatattcgggtcgtgggtggctggaacggggaaagcaaactgattgatttcctcaaagaaacgccagtaccgctgcgggtttatggcaactggcagcaactcaattacagtctgcaagtggatcagttactgcgcaaacatctacaggacgaagcgaaacgtcgcctgaatgactgggccgagcggaataaagattcccgcaatggcaaagatgtgaagaagttgctggagaagatgtaggttaccaggtgacctgtcctgtaggcctgataagacgcgtaaagcgtcgcatcaggcgttcgcggcggcatcattatattctgaatatgtaagatcgaaggctgttccgttcacttgatgttcctcgctactatggaacgctcaagccggtgaacgtgccagggtggctcaatctccaccaccctggcaacccgggctcccggcggtaaatcgccgctggcgcggttccctcatcttattcctttcggctattgggtaaaatgaccgataccatcacacctcgtactccaactcgccatccttatgcagcggaataatctgcaccttctgcacgcgatggctttccacctgcaacgttttaagcaaataatcccccacctgaacttcttcgccaggttttggaatacgctgtaaatattccatcaacagcccggcaatggtgtgatattcacgtttttcatccagcggcagcggcacatattgcaccagatcttccagcggcatatgaccattcgccgtccaggaaccgtccgcattcttctgaatatcatggcgggcgtcgatctcttccacttcgttcggtaagttaccggcaatggtttcagtgacgtcacttaatgtcacaatcccttccaccgagccaaactcatccaccacaaaagcaaagtgcgtgcgggcattacggaactgctccagggcaggtaacaacggcaaggtttccgggaacaccagcggctggcgaatcaacacccgcaggttgagcggttcgccgcgcagtgactgttgtagcaggtcgataacgtgaacaacaccgagcaaatcttctgcgtcatcaccgtcggtaaccaccagccgcgtatgctgatttcgctccagtaactggcggatctcgtcttccggcgcgttgagatcgatatgctcaatatcgtggcgcgacgtcataatgctgctgacggtacgctggttaagatttagtacccgctcaatcatccgccgttcctgcggattaaagatctgctggttaccatgatccaccagcatggacgcggtttcggcgtccagttccgcatcttctttttgcccgctaagcaggcgcattaccgcttcggtagtccgctggcgcagcgtctggttagcggaaagaaaacgtcgccggttaaagatagccaactgattgagcgcctcgatcatcaccgagaaaccaatggcagcgtacaggtagcctttcggaatgacgaagccgaaaccttctgccaccaggctaaagccaatcatcaacaggaagcttaagcagagaataacgatcgtcgggtgactgttaacaaattgcgttaacggcttgctggccatcaacatcaggctgatagcgataaccacggcggccatcatgaccagtaaatggtcgaccatcccgacggcggtaatcactgagtcgagtgagaaaatggcgtccagtaccacaatttgcgtcaccacgccccagaacttcgcacctttgcgttgtgtgggattattgctgtctttcccttccagccgttcgttcagctccatcgtggctttgaacaacaggaagaaaccaccaaacagcatgattaagtcgcgggcgctaaaggtaaacgagcggaagctgaacagcggttgagtcagggtgaccagccaggagattgacgccagcagtaacaggcgcattaacatcgccagcagcagcccggtaacccgtgcgcggtcgcgctgcttcggcggtagtttttcggcgaggatggcaataaagaccaggttatcaatgccgaggaccagttcgatcacaatcagcgtgattaacccggcccagatagacggatcggcaatccattccatagtaagtacaaaacctattcgttgtatgacaaatgtcacaattcgatcatggataaatcggggcaaaaatgcaatgttgcagcactatttatctcatattatttgagggtaataacctcacattatccctgaattaaaagtggtaataataaaacattatttaagaaatatcgcatgtggaggcgcaatattgaatattgtcaacctaaagaaactcctaaaaaccatattgaatgacacttaatataattcttaaaaatagccaattgccgaattgttaccttgcctgctattccgttagctgtaacacttcctcctgcattattggagagccaatattcaattaccataatgtcaccttatattcggaagttaatttccgcaataaccctttctcatcaacgattgtatgcagagagggtttgaaaaattaagctaaatcagtgtattggtagctaaaaagccaggggcggtagcgtgtctggatgcctgaaagaccagtctgaattattctgtcaatagcctgcggatgaaatcaatttttttaggactgatgccagttaaatttgtattcaattaactgcaaggtaaatgtgcatggcgacattgctattaatagtgcacaggataattactctgccaaagtgataaataaacaatgatgaaatccaaaatgaaattgatgccattattggtgtcagtaaccttgataagcagttgcacagtacttccgggcagcaatatgtcgacgatgggcaaagacgtcatcaaacagcaggacgctgatttcgatctcgacaaaatggtgaatgtttatccgctgaccccgcgcctgattgaccaattacgcccacgcccgaatgtagcgcgccccaatatgacgctggaaagcgagatcgcgaattatcagtatcgcgtcgggccgggggacgttcttaatgtcaccgtctgggatcacccggaactcaccacgccagccggtcagtaccgcagctccagcgacaccggcaactgggtacagcctgacggcactatgttttatccgtatatcggcaaggttcacgtagtggggaaaacgctcgctgaaatccgcagtgatattaccgggcgcttagcaacgtacatcgctgacccgcaggtggacgttaatatcgccgccttccgctcacaaaaggcctatatctcaggtcaggtgaataaatccggtcaacaggcgatcaccaacgtaccactgaccattctcgatgccatcaacgccgcaggtggcctgaccgacaccgctgactggcgcaacgtggtgctaacacacaatggtcgtgaagaacgcatttctttgcaggcgctgatgcaaaacggcgacctcaatcagaaccgactgctttaccccggcgatattctctacgtgccgcgtaatgatgatctgaaagtgtttgtgatgggtgaagtgaagaaacagagcaccctgaaaatggactttagcggcatgaccctgaccgaagccctgggcaatgctgaaggcatcgacatgaccacctccaacgccagcggcatctttgtcattcgtccgctgaaaggcgagggcgggcgtaacggcaagattgccaatatctaccagctggatatgtccgatgccacgtcgctggtgatggcgacagaattccgcctgcaaccttatgacgtggtgtatgtcaccaccgccccggtttcccgctggaaccgtctgatcaatcagttgctgccaactattagcggtgtccgttacatgacggatacagccagcgacattcataactggtaatcgtcatgtttaacaacatcttagttgtctgtgtcggcaatatttgccgctccccgacggcggaacgcttactgcaacgttatcacccggagctgaaagtggagtccgctggactcggcgcgctggtcggtaagggcgctgaccctactgctatcagcgtcgccgcagaacatcaactgtctctggaaggccactgtgcacgacaaatcagccgccgtctgtgtcgcaactacgacctgattttgaccatggaaaagcgccatatcgaacgcttatgcgagatggcacccgagatgcgcggcaaagtgatgctgtttggtcactgggataacgaatgtgaaatccccgatccgtatcgcaaaagccgggaaacgtttgcagcggtgtacacattacttgaacggtctgcccgccagtgggcgcaggcattgaacgcagagcaggtataagaatgacagaaaaagtaaaacaacatgccgctccggtaacgggcagtgatgaaatcgatattggtcgcctggtcggcaccgtcattgaagcgcgctggtgggtgattggcatcaccgccgtatttgccgtctgtgccgtggtttacaccttcttcgccacgccgatttatagtgccgacgcactggtacaaatcgagcaaaacagcggcaattcgttagtgcaggacattggttcggcattagccaacaaaccgcctgcatcggacgccgagatccagttgattcgttcgcgtctggtgcttggtaaaacggtggacgatctcgacctcgatattgcggtgagcaaaaacacgttcccgattttcggtgcgggctgggatcgtttgatgggacgtcagaacgagacggtgaaagtgaccacctttaaccgcccgaaagagatggcggatcaggtgtttacgcttaatgtgctggacgataaaaactacaccctgagcagtgatggcggctttagcgcccgtggacaagcgggccagatgctgaaaaaagaaggcgtcacgctgatggttgaagccattcacgcccgcccgggcagtgagtttaccgtcaccaaatactccacgctggggatgatcaatcaactgcaaaacagcctgacggtaacggagaacggcaaagacgcaggcgtactgagcctgacttataccggtgaagatcgcgaacagatccgcgacattcttaacagcatcgcccgtaactatcaggaacaaaatattgagcgcaaatcggcggaagcgtcgaaaagcctcgctttcctcgcgcaacagttaccggaagtacgtagccgccttgatgttgccgaaaacaaactgaatgccttccgtcaggataaagattctgttgatctgccgctggaagcgaaagcggtgctcgattcgatggtgaacatcgacgcccagttgaacgaactgacctttaaagaggcggaaatctccaagctgtacaccaaagttcacccggcgtaccgcacgctgctggagaaacgtcaggcgctggaagacgaaaaagccaaacttaacggtcgcgtaacggcgatgccgaaaacccagcaggagattgtccgtctgacccgcgatgtcgagtctggtcagcaggtctatatgcaactgctgaataaagagcaggagctgaaaatcaccgaagccagcaccgtcggcgatgtgcgcattgttgacccggcaatcactcagcctggtgtgctaaaaccgaagaaagggctgattatccttggggcgattattcttggcctgatgctctctatcgtgggtgtgctgctgcgctcgttgtttaatcgcggcatcgaaagcccgcaggtgctggaagaacacggtatcagcgtctatgccagcatcccgttgtcggaatggcagaaagcgcgcgatagcgtcaaaaccatcaaagggattaaacgctataaacagagccagctactggcggtggggaatccaaccgatctggcgattgaagccatccgcagtctgcgtaccagtctgcacttcgcgatgatgcaggcgcagaacaatgtgttgatgatgaccggggttagcccgtcaatcggtaaaacctttgtctgcgccaacctggcggcggtgatcagccagaccaataaacgcgtgttgttgatcgactgcgatatgcgcaaaggctacacccacgagctgttgggcaccaataacgtcaatggcctgtcggaaattctgattggtcagggcgatattactaccgcagctaaaccgacctctattgccaaatttgacctgatcccgcgcggtcaggtgccgccaaatccttctgaactgttgatgagcgaacgctttgccgaactggtgaactgggcgagtaaaaactatgacctggtgttgattgatacgccgccgattctggcagtgaccgatgcggcaattgttggtcgtcatgtcggaaccacattaatggtggcgcgttatgcggtcaacacattgaaagaagtggaaaccagtctgagccgctttgagcaaaacggtattccggtgaaaggggtgattctgaactccatcttccgccgcgccagcgcgtatcaggattatggctattacgaatacgaatataagtcggatgcgaaataacgacatccgctgtcggatgcgatgctgacgcatcttatccgacctaccttcacgccgcatccggcaagcaaaccagctccgtaggccggataaggcgctcacgccgcatccggcaacagaacccgtaaacaagcttataaaccggcagaacatctcgatactccgggagaacaacctatgaaagacaatccgctgatttcaatctatatgccgacctggaaccgccaacaactggcgattcgggcgataaaatcggtcctgcgccaggactacagcaactgggagatgatcatcgtggatgattgctccacctcctgggaacaactgcaacagtacgtcactgccctcaacgatccgcgtatcacctacattcacaacgacattaacagcggggcgtgcgcggtacgtaaccaggcgattatgctggcgcaaggggaatacattaccgggatcgatgacgatgatgaatggacgcccaaccgcctgagcgtcttcctcgcccataaacagcaactggtcactcacgcctttttgtacgctaacgactacgtttgccagggcgaagtctattcccaaccagcaagtttgccgctgtatcccaaatcgccgtattcacgccgcctgttctataaacgcaatatcattggcaatcaggtttttacctgggcgtggcgtttcaaagagtgcttgttcgataccgaactgaaagcagcacaggattacgacatcttcctgcggatggtggtggagtatggcgaaccgtggaaagtggaagaggcgacgcagatcctgcatatcaatcacggtgaaatgcagatcacctcgtcaccgaaaaaattctccgggtacttccacttttaccgaaagcacaaagataaatttgaccgcgccagcaaaaaatatcagctgtttaccctctaccagatccgcaataaacgcatgacctggcgcactttgctgacgctgctgtcggtgcgtaacggcaaacgtctggctgatggtattcgggggcgctaaagatgctggaagatctgcgcgccaacagctggagtttacgcccgtgctgcatggttcttgcctatcgcgttgctcatttttgttcggtgtggcgcaaaaagaacgtcctcaacaatctgtgggcggccccgctgctggtgctgtatcgcattatcaccgaatgctttttcggttatgaaatccaggccgccgcaaccattggccgccgctttactatccatcacggttacgccgtagtgatcaataaaaacgtagtagcgggggatgattttaccattcgccacggcgtcactatcggcaatcgtggtgccgaaaacatggcatgtccacacattggcaacggcgtcgaactcggtgccaacgttattattcttggtgatatcacgattggtaacaacgtcaccgtgggcgcgggcagcgtggtgcttgactctgtcccggacaacgcgctggtggtgggagaaaaagcgcgagtgaaggtaatcaaatgaatattctgcaatttaatgtgcgactggcggaaggcggggcagcaggtgtggcgttagatctccaccagcgtgcgctgcaacaggggctggcgtcacattttgtctacggctacggcaaaggcggcaaagagagcgtcagccatcagaactatccgcaggtcatcaaacatacgccgcggatgaccgcgatggcgaacattgccctgtttcgtctgtttaatcgcgatctgtttggcaatttcaatgagttatatcgcaccattactcgtacaccgggtccggtggtcctgcattttcatgtgctgcacagctactggctaaatcttaagagcgtggtgcgcttttgcgaaaaggtgaaaaaccacaaaccggatgtcactctggtctggacgctgcacgaccactggagcgttaccgggcgctgcgcctttaccgacggttgtgaaggctggaaaacgggctgccagaaatgcccgaccttaattaattatccgccggtgaagattgatcgcgcacaccagctggtggcgggcaaacgccagttattccgtgagatgctggcgctgggctgtcagtttatttcccccagccagcatgtggctgacgctttcaatagcctgtacggtccagggcgttgccggattatcaataatggcattgatatggcaaccgaagcgattctggcggacttgcctccggtgcgcgaaacccaaggtaagccgaaaatcgcggtggtggcgcatgacctgcgttacgacggcaaaactaaccagcaactggtgcgcgagatgatggcgctgggcgacaaaatcgaactgcatacctttggtaagttctcgccgttcaccgctggcaacgtggttaatcacggctttgaaactgacaagcgcaagttgatgagcgcgctcaatcagatggatgcgctggtgttcagttctcgcgtcgataactacccgctgattttgtgtgaggcgctattgattggcgtgccggtgattgccacccatagcgatgcggcgcgggaagtgttgcaaaaatccggcggtaaaaccgtcagcgaagaagaggtgctgcaactggtgcagttaagcaaaccggaaatcgcgcaggcgatatttggtaccacgctggctgagttcagccaacgcagccgcgccgcctacagtggacaacagatgctggaggagtatgtcaacttctatcagaatctgtagctacctgctgctgccgctgatctacctgctggttaacgtcaaaatcgcccagcttggcgaaagtttccccatcaccatcgtcacttttttacctgtcttgttactgctgtttttagaacgcatcagcgttaaaaaattgatgattgccttagggattggtgcgggactcacggcgtttaactatctgtttggtcagtcgctggatgccagtaaatacgtcacttcaaccatgctgtttgtctatattgtgatcattattggcatggtgtggagtattcgttttaaaacgatttcgccacacaaccatcgcaagatattacgtttcttttatctggtggtcgggctggtggtggcgctggcggcagtggagatggcgcaaattatcctcaccggtggcagcagtattatggagtcgatttcgaaatatctgatttacagcaacagctatgtgctgaatttcattaaattcggcggcaagcgcacgacagcactttatttcgaaccggcatttttcgctctggcattaatctcaatttggctcagcatcaaacagtttggtatcaaaacgcctaaaaccgatgctatgattctcgcagggataatattatccggatcgttttcaggggttatgacctttatcctgttttatttgctggagtgggcatttcaatatctgaataaagaggcgattaagaaaaagttaccgttggcattgatttctctggctgtattcctggttggtgtggtaatcgcgtttccttatatttccacccgtctgggcgatttaggtacggaaggatcgtcatcgtattatcgtattgtcggtccgctggtgatggtcggttattctttgacccatattgacggtgtagtcagatttggctcactttatgaatatgtcgcatcattcggaatatttaacggtgcggatgtcggaaaaaccatagacaatggtttgtatctgctgattatttatttttcctggttcgcagtgtttttatcgctgtggtacatggggaaagtgataaaaatgatgatcaacgcttttggtgataaccgcaattttcgcgtgcaattatatctttttactccagtgtcgctgttttttaccggttcgatatttagcccggaatatgcatttttaatcgtctgtccgtttattttgcgaaaagcgttaaatattacgaggtaagaataagaacatgttgcttagcataatcactgtcgcgtttcgtaacctcgaagggatagtcaaaacacatgcctcgctggcgcatctggcgcaggcggaagatatcagcttcgaatggattgttgtcgatggcggttccaatgacggcacccgtgagtatctggaaaatctcaatggtatctataacctacgctttgtcagcgagccagataacggtatctacgacgccatgaacaaaggcattacgatggcacaaggcaagttcgcgttgtttctcaattcgggcgatatttttcatcaggatgccgcaaattttgtccgtaagttaaaaatgcaaaaagataacatgatgatcaccggcgatgcgctgctggattttggcgacgggcataaaattaaacgtagcgccaaaccgggctggtatatttatcacagcctgcccgccagtcatcaggcgatatttttccctgtatccggcttgaaaaaatggcgttatgacctggaatataaagtttcttccgactacgcgctggcagccaaaatgtataaagccggttatgcatttaaaaaactcaatggcctggtgtctgaattttccatgggtggggtatctaccaccaataatatggaattgtgtgctgacgccaaaaaagtccaacggcaaatattacatgtgcctggcttctgggcagaattatcctggcatttacgccaacgtactacctcaaagacgaaagccttatataacaaaagctgaatataagggaaaacgatgcaagatttaagcggtttctcggtaccgaaagggttccggggcggcaacgctattaaagtgcaattgtggtgggcagtacaggcaacattatttgcctggtcgccacaagtattgtatcgctggcgggcatttttattacgttcattcggcgcaaaaataggaaaaaacgtagttattcgtccgtcagtaaaaattacctatccgtggaaattaaccttaggtgattacgcgtgggtcggcgatgaggtcaatttatataccctcggtgaaataaccattggcgcacattcggtgatatcgcaaaaaagttatttatgcaccggtagccacgaccatgcaagtcaacatttcaccattaacgccacgcctattgtgattggcgagaaatgctggctggcgacagatgtttttgttgcccctggcgtcacgatcggtgacggcaccgtcgtgggggcgcgaagcagtgtttttaaatcgcttccggcaaatgtggtttgccgggggaatcccgcagtggtgatacgcgaacgcgttgaaactgaataaattcaaaaaatacagaggaataagacatgtcaaaagtcgctctcatcaccggtgtaaccggacaagacggttcttacctggcagagtttctgctggaaaaaggttacgaggtacatggtattaagcgtcgtgcatcgtcattcaacaccgagcgcgtggatcacatttatcaggatccgcacacctgcaacccgaaattccatctgcattatggcgacctgagtgatacctccaacctgacgcgcattttgcgtgaagtgcagccggatgaagtgtacaacctgggcgcaatgagccacgttgcggtttcttttgagtcaccggaatataccgcagacgtcgatgcgatgggtacgctacgcctgctcgaggcgatccgcttcctcggtctggaaaagaaaacccgtttctatcaggcttccacctctgaactgtacggtctggtgcaggaaattccgcagaaagaaaccacgccgttctacccgcgctctccatatgcggtcgccaaactgtacgcctactggatcacggttaactaccgcgaatcctacggcatgtacgcctgtaacggtattctctttaaccatgaatccccgcgccgcggcgaaaccttcgttacccgcaaaatcacccgcgcaatcgccaacatcgcccaggggctggagtcgtgtctgtacctcggcaatatggactccctgcgtgactggggccatgccaaagactacgtaaaaatgcagtggatgatgctgcaacaggaacagccggaagatttcgttatcgcgaccggcgttcagtactccgtacgtcagttcgtggaaatggcggcagcacagctgggcatcaaactgcgctttgaaggcacgggcgttgaagagaagggcattgtggtttccgtcaccgggcatgacgcgccgggcgttaaaccgggcgatgtgattatcgccgttgacccgcgttacttccgtccggcagaagttgaaacgctgctcggcgacccgaccaaagcgcatgaaaaactgggctggaaaccagaaatcaccctcagagagatggtgtctgaaatggtggctaatgacctcgaagcggcgaaaaaacactctctgctgaaatctcacggctacgacgtggcgatcgcgctggagtcataagcatgagtaaacaacgcatttttatcgctggccatcgcgggatggtcggttccgccatcaggcgacagctcgaacagcgcggtgatgtggagctggtattacgcacccgcgatgaactgaacctgttggacagccgcgcggtgcatgatttctttgccagcgaacgcattgaccaggtctatctggcggcggcgaaagtgggcggcattgtcgccaacaacacctatccggcggatttcatctaccagaacatgatgattgagagcaacatcattcacgccgcgcatcagaacgacgtgaacaaactgctgtttctcggatcgtcctgcatctacccgaaactggcaaaacagccgatggcagaaagcgagttgttgcagggcacgctggagccgaccaacgagccttacgccattgccaaaatcgccgggatcaaactgtgcgaatcttacaaccgccagtatggacgcgattaccgctcggtcatgccgaccaacctgtatggcccgcatgacaacttccacccgagtaattcgcatgtgatcccagcattgctgcgtcgcttccacgaggcgacggcacagaatgcgccggacgtggtggtgtggggcagcggtacaccgatgcgtgaatttctgcacgtcgatgatatggcggcggcaagcattcatgtgatggagctggcgcacgaagtctggctggaaaacacccagccgatgttgtcgcacattaacgtcggcacgggcgttgactgcactatccgcgagctggcgcaaaccatcgccaaagtggtgggttacaaaggccgggtggtttttgatgccagcaaaccggatggcacgccgcgcaaactgctggatgtgacgcgcctgcatcagcttggctggtatcacgaaatctcactggaagcggggcttgccagcacttaccagtggttccttgagaatcaagaccgctttcgggggtaatgatgtttttacgtcaggaagactttgccacggtagtgcgctccaccccgcttgtctctctcgactttattgtcgagaacagtcgcggcgaatttctgcttggcaaaagaaccaaccgcccggcgcagggttactggtttgtgccgggagggcgcgtgcagaaagacgaaacgctggaagccgcatttgagcggctgacgatggcggaactggggctgcgtctgccgataacagcaggccagttttacggtgtctggcagcacttttatgacgataacttctctggcacggatttcaccactcactatgtggtgctcggttttcgcttcagagtagcggaagaagaactgttactgccggatgagcagcatgacgattaccgctggctgacgccggacgcactgctcgccagtgacaatgttcacgctaacagccgcgcctattttctcgctgagaagcgtgccggagtacccggattatgaaaatactggtctacggcattaactactcgccggagttaaccggcatcggcaaatacaccggagagatggtggaatggctggcggcacaaggtcatgaggtgcgggttattaccgcaccgccttactacccgcagtggcaggtgggtgagaactattccgcctggcgctacaaacgagaagagggggccgccacggtgtggcgctgcccgctgtatgtgccaaaacagccgagcaccctgaaacgcctgttgcatctcggcagttttgccgtcagcagtttctttccgctgatggcgcaacgtcgctggaagccggatcgcattattggcgtggtaccaacgctgttttgcacgccgggaatgcgcctgctggcgaaactctctggcgcgcgtaccgtgctgcatattcaggattacgaagtggacgccatgctggggctgggccttgccggaaaaggcaaaggcggcaaagtggcacagctggcaacggcgttcgagcgtagcggactgcataacgtcgataacgtctccacgatttcgcgttcgatgatgaataaagccatcgaaaaaggcgtggcggcggaaaacgtcatcttcttccccaactggtcggaaatcgcccgttttcagcatgttgcagatgccgatgttgatgcccttcgtaaccagcttggcctgccggataacaaaaaaatcattctttactccggcaatattggtgaaaagcaggggctggaaaacgttattgaagctgccgatcgtctgcgcgatgaaccgctgatttttgccattgtcgggcagggcggcggcaaagcgcggctggaaaaaatggcgcagcagcgtggactgcgcaacatgcaatttttcccgctgcaatcgtatgacgctttacccgcactgctgaagatgggcgattgccatctggtggtgcaaaaacgcggcgcggcagatgccgtattgccgtcgaaactgaccaatattctggcagtaggcggtaacgcagtgattaccgcagaagcccacacagaactggggcagctttgcgaaacctttccgggcattgcggtttgcgttgaaccggaatcggtcgaggcgctggtggcggggattcgtcaggcgctcctgctgcccaaacacaacacggtggcacgtgaatatgctgaacgcacgctcgataaagagaacgtgttacgtcaatttataaatgatattcggggataattatggcgcagtcgaaactctatccagttgtgatggcaggtggctccggtagccgcttatggccgctttcccgcgtactttaccccaagcagtttttatgcctgaaaggcgatctcaccatgctgcaaaccaccatctgccgcctgaacggcgtggagtgcgaaagcccggtggtgatttgcaatgagcagcaccgctttattgtcgcggaacagctgcgtcaactgaacaaactcaccgagaacattattctcgaacctgcagggcgtaacactgcaccggccattgcgctggcggcgctggcggcaaaacgtcatagcccggagaacgacccgttaatgctggtgctggcggcggatcatgtgattgccgatgaagacgcgttccgtgccgccgtgcgtaatgccatgccatatgccgaagcgggcaagctggtgacctttggcattgtgccggatctacctgaaaccggttatggctatattcgtcgcggtgaagtgtctgcgggtgagcaggatacggtggcctttgaagtggcgcagtttgtcgaaaaaccgaatctggaaaccgcccaggcctatgtggcaagtggcgaatattactggaacagcggcatgttcctgttccgcgccggacgctatctcgaagaactgaaaaaatatcgcccggatattctcgatgcctgtgaaaaagcgatgagcgccgtcgatccggatcttgattttattcgtgtggatgaagaagcgtttctcgcctgcccggaagagtcggtggattacgcggtcatggaacgtacggcagatgccgttgtggtaccgatggatgcgggctggagcgatgtcggctcctggtcctcattatgggaaattagcgcccacaccgccgagggcaacgtttgccacggagatgtgattaatcacaaaactgaaaacagctatgtgtacgccgaatctggcctggtcaccaccgtcggggtgaaagatttggtggtagtgcagaccaaagatgcagtgctgattgccgaccgtaacgcggtgcaggatgtgaaaaaagtggtcgagcagatcaaagccgatggtcgccatgagcatcgggtgcatcgcgaagtctatcgcccgtggggcaaatatgactctatcgacgcgggcgaccgctaccaggtgaaacgcatcaccgtgaaaccgggcgagggtttgtcggtacagatgcaccatcaccgcgcggaacactgggtggtggttgcgggaacggcaaaagtcaccattgacggtgatatcaaactgcttggtgaaaacgagtccatttatattccgctgggggcgacgcactgcctggaaaacccggggaaaattccgctcgatttaattgaagtgcgctccggctcttatctcgaagaggatgatgtggtgcgtttcgcggatcgctacggacgggtgtagtagttgaataatcaaccggattaattctccggtaaataacgacaaaaacaaaattggccgtttcggtcagggccaactattgcctgaaaaagggtaacgatatgaaaaaattaacctgctttaaagcctatgatattcgcgggaaattaggcgaagaactgaatgaagatattgcctggcgcattggtcgcgcctatggcgaatttctcaaaccgaaaaccattgtgttaggcggtgatgtccgcctcaccagcgaaaccttaaaactggcgctggcgaaaggtttacaggatgcgggcgtcgatgtgctggatattggcatgtccggcactgaagagatctatttcgccacgttccatctcggcgtggatggcggcattgaagttaccgccagccataatccgatggattataacggcatgaagctggttcgcgagggggctcgcccgatcagcggcgataccggactgcgcgacgtccagcgtctggctgaagccaacgactttcctcccgtcgatgaaaccaaacgcggtcgctatcagcaaatcaacctgcgtgacgcttacgttgatcacctgttcggttatatcaatgtcaaaaacctcacgccgctcaagctggtgattaactccgggaatggcgcagcgggtccggtggtggacgccattgaagcccgctttaaagccctcggcgcgcccgtggaattaatcaaagtacacaacacaccggacggcaatttccccaacggtattcctaacccgctactgccagaatgccgcgacgacacccgcaatgcggtcatcaaacacggcgcggatatgggcatagcctttgacggtgattttgatcgctgcttcctgtttgacgaaaaagggcagtttatcgagggctactatattgtcggcctgttggcagaagcattcctcgaaaaaaatcccggcgcgaagatcatccacgatccgcgtctttcctggaacaccgttgatgtggtgaccgccgcgggcggcactccggtgatgtcgaaaaccggacacgcctttattaaagaacgtatgcgcaaggaagacgccatctacggtggcgaaatgagcgcccaccattacttccgtgatttcgcttactgcgacagcggcatgatcccttggctgctggtcgccgaactggtgtgtctgaaaggaaaaacgctgggcgaactggtgcgcgatcggatggcggcgtttccggcaagcggtgagatcaacagcaaactggcgcaacccgttgaggcgattaaccgcgtggaacagcattttagccgtgaggcgctggcggtggatcgcaccgatggcatcagcatgacctttgccgactggcgctttaatctgcgctcctccaacaccgaaccggtggtgcggttgaatgtggaatcgcgcggtgatgtgccgctgatggaagcgcgaacacgaactctgctgacgttgctgaacgagtaatgtcggatcttcccttaccccattgcgggtaaggggcaaataacaggaacaacgatgacaaatctaaaaaagcgcgagcgagcgaaaaccaatgcatcgttaatctctatggtgcaacgcttttcagatatcaccatcatgtttgccgggctatggctggtttgcgaagtgagcggactgtcattcctctacatgcacctgttggtggcgctgattacgctggtggtgttccagatgctgggcggcatcaccgatttttatcgctcatggcgcggtgttcgggcagcgacagaatttgctctgttgctacaaaactggaccttaagcgtgattttcagcgcaggactggtggcgttcaacaatgatttcgacacgcaactgaaaatctggctggcgtggtatgggctgaccagtatcggactggtggtttgccgttcgtgtattcgcattggggcgggctggctgcgtaatcatggctataacaagcgcatggtcgcggtggcgggggatttagccgccgggcaaatgctgatggagagcttccgtaaccagccgtggttagggtttgaagtggtgggcgtttaccacgacccgaaaccgggcggcgtttctaacgactgggcgggtaacttgcaacagctggtcgaggatgcaaaagcgggcaagattcataacgtctatatcgcgatgcaaatgtgcgacggcgcgcgagtgaaaaaactggtccatcaattggcggacaccacctgttcggtgctgctgatccccgatgtctttaccttcaacattctccattcacgtcttgaagagatgaacggcgttccggtggtgccgctttacgacacgccgctttccggggttaaccgcctgctcaaacgtgcggaagacattgtgctggcgacgcttatcctgctgctgatctccccggtgctgtgctgcattgcgctggcggtgaaactcagttcacctgggccggttattttccgccagactcgctatggcatggatggcaagccgatcaaagtgtggaagtttcgttccatgaaagtgatggagaacgacaaagtagtgacccaggcgacgcagaacgatccgcgcgtcaccaaagtggggaactttctgcgccgcacctcgctggatgaattgccgcagtttatcaatgtgctgaccggcgggatgtcgattgtcgggccacgtccgcacgcggtggcgcataacgaacagtatcgccagctcattgaaggctacatgctgcgccataaggtgaaaccgggcattaccggctgggcgcagattaacggctggcgcggcgaaaccgacacactggagaaaatggaaaaacgcgtcgagttcgaccttgagtacatccgcgaatggagcgtctggttcgatatcaaaatcgttttcctgacggtattcaaaggcttcgttaacaaagcggcatattgatatgagcttacgtgaaaaaaccatcagcggcgcgaagtggtcggcgattgccacggtgatcatcatcggcctcgggctggtgcagatgaccgtgctggcgcggattatcgacaaccaccagttcggtttgcttaccgtgtcgctggtgatcatcgcgctggcagatacgctttctgacttcggtatcgctaactcgattattcagcgaaaagaaatcagccaccttgaactcaccacgctgtactggctgaacgtcgggctggggcttgtggtgtgcgtggcggtgtttttgttgagtgatgccattggtgacgtgctgaataacccagacctggcaccgttgattaaaacattgtcgctggcgtttgtggtgatcccccacgggcaacaatttcgtgcgttgatgcagaaggagctggagttcaacaaaatcggcatgatcgaaaccagcgcggtgctggcgggcttcacttttacggtggttagcgcccatttctggccgctggcgatgaccgcgatcttcggttatctggtcaatagtgcggtgagaacgctgctgtttggctactttggtcgcaaaatttatcgccccggtctgcatttctcgctggcgtcggtggcaccaaacttacgttttggtgcctggctgacggcggacagcatcatcaactatctcaacaccaacctttcaacgctggtgctggcgcgtattctcggcgcgggcgtggcagggggatacaacctggcgtacaacgtggccgttgtgccaccgatgaagctgaacccaatcatcacccgcgtgttgtttccggcattcgccaaaattcaggacgacaccgaaaagctgcacgttaacttctacaagctgctgtcggtagtggggattatcaactttccggctctgctggggctgatggtggtgtcgaataactttgtaccgctggtctttggtgagaagtggaacagcattattccggtgctgcaattgctgtgtgtggtgggtctgctgcgctccgtaggtaacccgattggttcgctgctgatggcgaaagcgcgggtcgatatcagctttaaattcaacgtattcaaaacatttctgtttattccggcgattgttattggtgggcagatggcgggcgcaatcggcgtcacgctcggtttcctgctggtgcagattatcaacaccattctgagttacttcgtgatgattaaaccggttcttggttccagttatcgccagtacatcctgagtttatggctgccgttttatctctcgctgccgacgctggtggtcagttatgcgctgggcattgtgctgaaagggcaactggcgctggggatgctactggcggtgcaaatagccgcgggcgtgctggcgtttgtggtgatgattgtgctgtcgcgccatccgctggtggtggaagtgaagcgccagttttgtcgcagcgaaaaaatgaaaatgcttttacgggcggggtgagttgttgttttcggttccgacaacggttgccgggtgcagcgtaaaacgccttatccatcctacggttctgtgctcgggacctgtaggcctgataagacgcgtcagcgtcgcatcaggcactgaatgccggatgcggcgtgaacgccttatccggcctacggttctgtgctcgggtcttgtaggcctgataagacgcgccagcgtcgcatcaggcaaaaaacggcaacgaacacaacaaacacagcctcacctggcatcaaatttatgaggaaaaaatgaaattacttattttgggcaaccacacttgcggcaatcgtggcgacagcgccatcttgcgcggcttacttgatgccatcaacatcctcaatccacataccgaagtggacgtgatgagccgctatccggtcagttcttcctggctgctcaaccgcccggtaatgggtgatccgctgttcctgcaaatgaaacaacacaacagcgcggcgggcgttgtcgggcgcgttaaaaaagtcctccgtcgccgctaccagcatcaggtactgctctcgcgcgtcaccgacactggcaagttgcgtaatatcgccatcgcccagggattcactgacttcgtgcgcctgctgtcaggttacgacgccattattcaggtcggcggatcgttttttgtcgatctctacggcgtgccacagtttgaacatgcactttgcacgtttatggcgaaaaagccgctgtttatgattggtcacagtgttggcccgttccaggatgagcaatttaaccaactggcgaactatgtttttggtcactgtgacgcgctgatcctgcgcgaatcggtcagccttgatttgatgaaacgcagcaatatcaccactgcaaaagtggaacatggcgtcgatactgcgtggctggtcgatcaccacaccgaagatttcaccgccagctatgccgtccaacactggctggacgttgccgcacaacagaaaacggtggcaattaccctgcgcgaactggcaccgttcgacaaacgtctcggcaccactcaacaagcgtatgaaaaagcctttgccggggtggtcaatcgcattctcgacgaaggctatcaggttattgcgctctccacctgtacgggtatcgacagctataacaaagacgaccgcatggtggcgctcaacctgcgccagcacatcagtgatcctgcccgttatcacgtagtgatggatgaacttaacgatctggaaatgggcaaaattctcggtgcctgtgaactcaccgtcggtacgcgcctgcactccgccattatctcaatgaactttgctactccggcgattgccatcaactatgaacataaatccgccgggattatgcagcagctgggactaccggagatggcaattgatatccgtcatttattagacggcagcctgcaagcgatggttgcggataccttaggccagcttccggcgctgaacgcacgacttaacgaagccgtcagtcgcgaacgtcagacgggaatgcagatggtgcaatctgtgcttgagcgcatcggggaggtgaaatgaaggtcggcttctttttactgaaatttccgctgtcgtcggaaaccttcgtcctcaatcaaattaccgcgtttattgatatgggctttgaggtggagattgtcgcgctgcaaaaaggcgacacacaaaacacccacgcggcatggacgaaatacaaccttgctgccagaacccgctggttacaggatgaacctacgggcaaagtggcgaagctgcgccaccgcgccagccagaccttacgcggcattcatcgtaaaaatacctggcaggcgctcaacctcaaacgctatggtgccgagtcgcggaacctgattttgtctgccatttgcggccaggtcgcaacaccgtttcatgccgatgtgttcatcgctcattttggccctgcgggggtaaccgcagcaaaactacgggaactgggtgtcattcgcggcaaaattgccaccattttccacggcattgatatctccagtcgggaagtgctcaaccactacactcccgaatatcagcaactgtttcgccgtggcgacctgatgttaccgataagcgatctgtgggccggaaggctgcaaaaaatgggctgcccgagggaaaaaatcgccgtatcgcgcatgggcgtagatatgacgcgctttagcccgcgtcccgtgaaagcgcccgcaacgccgctggagattatttccgtcgcacgcttaaccgagaaaaaaggcctgcatgtggcgatcgaagcctgccgtcagttgaaagagcagggcgtggcatttcgctatcgcatcctcggcattggcccgtgggaacgacgcctgcgcacgctcatcgaacaatatcaactggaagatgtggtggagatgcctggctttaaaccgagccatgaagtgaaagcgatgctcgacgacgcggatgtcttcctgttgccatcggttacaggtgcggatggtgatatggaaggcattccggtggcgctaatggaagcgatggcggtcggcattccggtggtttctactctgcatagcggaataccggaactggtggaggctgacaaatccggctggctggtgcctgagaacgatgctcgcgcactggcgcaacgcctggcggcatttagccaactggacaccaacgaactggctccggttatcaaacgtgctcgcgaaaaagtcgaacacgattttaaccagcaggtgattaatcgagaactcgccagcttgttgcaggctttatagaggagaacgtatgccatttaaaaaactctcccgacgcaccttcctgacggcaagctcggcccttgccttcctccatacccctttcgctcgcgcacttcccgcccgacaaagcgttaacattaacgactacaaccctcacgactggatcgcctcatttaaacaagccttcagcgaagggcaaacggtcgtcgtgcctgccggattggtttgcgacaatatcaacaccggcatcttcattcctgcaggtaaaacgttacacatccttggaagcctgcgcggcaacggcagagggcgatttatcttacaggacggcagccaggtgacaggggaggagggcggcagtatgcataacatcaccctggatgtgcgaggctctgactgcaccatcaaagggctggcgatgagcggctttggcccggtaacgcagatttatatcggcggcaaaaacaaacgggtcatgcgtaacctgaccatcgataacctcactgtcagccacgctaattacgccatcttacgccagggatttcataaccagattatcggtgccaacatcaccaactgtaagttcagcgacttacagggggacgctattgaatggaacgtggcgattaacgacagtgatattttgatctccgaccatgtcatcgagcgcatcaactgtaccaacggcaaaatcaactggggcatcggtataggccttgcgggaagcacttacgataataattacccggaagaccaggcagtgaaaaactttgtcgtggcgaatatcacgggatcggattgtcggcagttgatccatgttgaaaatggtaaacattttgttattcgtaatatcaaagcctgcaatatcacgccggatttcagtaagaaagcaggtattgataacgcgacggtcgctatttacggttgtgacaatttcgtgattgataatattgaaatgattaatagcgccgggatgttaatcggctatggggtaattaaaggcaaatatctctcgataccgcaaaatttccgagtgaataatattcaactggataacacccatcttgcttataaattgcgcggtatccaaatctccgccgggaatgctgtctcctttgtggcgctgactaacattgagatgaagcgtgcctcgcttgagctacacaataaaccgcaacacctttttatgcgtaatatcaaggtgatgcaggaatcctctgttggaccagcattgagcatgaacttcgacatgcgcaaagacgttcgcggcgtctttatggcgaaaaaagaaacactgctgtctcttgcaaatgttcatgcggtgaatgaaagagggcaaagctccgtcgatatcgacaggataaatcaccatattgttaatgtggaaaagattaactttagattgccggaacggagagagtagatttgcgaccattcctggaaaaatggagccatacttaggaacaatgctactgcaatccacaacgaagcggcgtaacatcacaagtaattcagtaatcaattcaaggtaattgatgctggcgaaaaaaatcgaacaagctataattcagcaaccattttacaggtggatgaaataatgacgaatttaaaagcagttattcctgtagcgggtcttgggatgcatatgttgcctgccactaaggcgattcccaaagagatgctaccgatcgtcgacaagccaatgattcagtacattgttgacgagattgtggctgcagggatcaaagaaatcctcctggtaactcacgcgtccaagaacgcggtcgaaaaccacttcgacacctcttatgaattagaatctctccttgaactgcgcgtgaagcgtcaactgctggcggaagtacagtccatttgcccgccgggcgtgacaattatgaacgtgcgtcagggtgaacctttaggtttgggccactccattttatgtgcacgacctgccattggtgacaatccatttgtcgtggtgctgccagacgttgtgatcgacgacgccagcgccgacccgctgcgctacaaccttgctgccatgattgcgcgcttcaacgaaacgggccgcagccaggtgctggcaaaacgtatgccgggtgacctctctgaatactccgtcatccagaccaaagaacctctggatcgcgaaggtaaagtcagccgcattgttgaattcatcgaaaaaccggatcagccacaaacgctggaatcagacatcatggccgtgggccgttatgtgctttctgccgatatttggccggaacttgaacgcactcagccaggtgcatggggacgtattcagctgactgatgccattgccgaactggcgaaaaaacagtctgttgacgccatgctgatgactggtgacagctacgactgtggtaaaaaaatgggttatatgcaggcgtttgtgaagtatggactacgcaacctgaaagaaggagcgaagttccgcaaaggtattgagaaattgcttagcgagtaagtttaaaaaatagacgcccttatagggcgtaataacaaataacggtagtcaacattcgacgcggtgatgcagatatgcccggaatgctgataccgttttttcattctaaaaaactcatcatttcattgagttaactacaaaatttagcactgttttttataatgtttcttcttgtttctggcatcaattggtaagataattagtgtttgagtttagaggctttgcggcagagaagcggagcttaacacgtctgtgagagtacgcagtgcactggtagctgtaaagccagtggcggtagcgtgtttaaataaatacattagtaatactacatattacatcattgtaggctatttaagcgctacatgttaagcgacagcgctagcaatcaaatcttttaaagttacttctcaggaatagtaaaatgagctttaatcttgaaaattataaaataggaattattgggctgggttacgttggcttacctttagctgttgaatttggcaaaaaaataaagactcttggttttgatatcaacgagaaacggataaaagaattatcagcaggtaatgactttacgcttgaatgtagttctgatgaactggctcaagcttactatcttcaatattcatgtgattataaagaattagcgacttgcaatgtattcattgtgacggtacctactccaattgatgaatataaacaacctgatttaacacctcttgttaaagcctcggaaacactcggaaaaataatcaaaaaagatgatattattatctacgaatcaactgtttatccaggtgcaacagaagaagtatgtatcccagtaattgagaagatctcaggtctggtatttaatatagatttttttgccggttacagcccggaacgcattaatccgggtgacaaagagcaccgcgtgacaacgatcaaaaaagtaacttctggttcaacgcctgaaattgctgagattgtcgataaattatatggaaccatcatcaccgctggaacgcataaagcatcttcgatacgtgtggcggaagcggctaaagtgattgagaacacccagcgtgatttgaatattgctctgattaacgaacttgcaatgattttcaataagctggggattgatacggaggaagtattaaaagccgcaggcactaaatggaacttcttaccattcagaccaggcttagttggggggcattgcatcggagttgatccctactatttgactcataaagcgcaagcgataggttatcatccagaagtcatcctggcggggcgtagaattaatgatggaatgagtaaatatgtagcatcacagttcattaaagccatgctcaagaaaaaattccaaattgaaggtgctaatgtcttaattatggggcttacctttaaagaaaactgtccggatcttcgtaatacaaaagttgtagatatcttggctgaactgaaagaatacaacgtgaacgtggatatttatgatccatgggttgatgttgaagaagcctattatgagtatgggattaatgtattaaacacattacctgataagaaatatgatggagtgatctttgcagttgctcactctcaatttaaaaatatgagtaaagaagaagtccatggaataattagaaatgatggtgttatttatgatttgaaatacatcattgaccctaacttagtagatattcgtctttaatcaatacttgatgcaatgtgtcagagaggatgcctaatgaaatataaaaaaatagaagacgctttgtcttctaaatctgaaacatggttgattacaggtgttgcgggatttatcggttctaacctattagaggccttactaaaacttaatcaaaaagtagttggcttagataattttgcaactggacatcaagcaaaccttgatgaggttaaagagtctgtttcagctgaacaatggtctgcttttacctttgtggaaggagacatatgtgagccagagacgtgtgtggaggttgtcaaaggagttgatcatgtcctacatcaggctgcattaggttctgtgcctcgttcaattaaagatccaattactacaaataataccaatatatcgggtttcattaatatgttggttgccgccaaagatgccaatgtcagaagtttcacttacgctgcaagtagctcaacgtatggtgatcatcctgcattacctaaaattgaagaaaatataggtaatccgctatctccatacgcagtgacaaagtatgtaaatgaattatatgcgcaagtatttgcaagaacctacggattcaaatcaattggattaagatactttaatgtatttggaaaacgccaggatcctaatggggcatatgctgctgtgataccgaagtggactgctgcaatgatcaatgatgaaccgctgtatatcaatggtgatggcgaaacaagtagagacttttgttttattgagaatgtcgtgcaaatgaatattcttgctgcacagtctgatgcgtctgcaagagatcaggtttataacgttgcagttggtgaccgtactacgcttaaacaattattcactgtattaaagaatgcacttaatgaaaatggtgtttcgtataacaaagaacctgaatataaagattttcgtgcaggtgatgttcgccattcgcaagctgatatcactaaagccaaaactagacttggatacgagccacagttcagtatatcggagggcatcctcaaagcgatgccgtggtatgtaaactctctgggcaacaaaaaataaccatgaaaatccttattacaggtggtgctggttttattgggtcagctgttattagatacatcattaatcatactaatgacagtgtcgtaaatgtcgataaattgacttacgcaggaaaccttcaatcacttaaagatatagaaaaaaatacgcgctataaatttgagtgcgcagatatctgcgatagcgcaaagatgcaagagatatttaccaatcatcaaccagatgctgttatgcatttggccgctgagagtcatgttgatcggtcaattaatggcccgtttgagtttatacagaccaatatcataggcacctttatcttacttgaaatagccaagtcttactggctgcaacttagtgaaagcaaaaaaaagaagtttatttttcatcatgtttcgacagatgaagtgtatggtgatctagctcatccagatgtactggatgaaggttcaccattgcctttatttactgaaaaaaatggctacgcgccaagcagtccttattcagcctccaaagcatctagcgatcatttagttcgtgcttggtacagaacttgggggcttcctgtaatagtaacgaattgttccaataattatggtccctatcatttccccgaaaaattaatcccattgacgatccttaatgcgctgcaaggtcagccattgccagtttatggcacaggggatcaaatccgggattggttatatgttgaagaccatgctagggcacttcatcttgtcatcagcagtaaacgtgttggagaaacatataacataggtggctataatgaaatgaagaatattgatgtcgttcagaaggtctgcgaaatattagatgaaatccaaccattgagtgaaggatcttacaaaaaactgattaattttgtaaaagacagaccggggcatgaccgtcgctatgccattgatgctaccaaaattacagagcatttaggttggcaaccaattgagacatttgagtctggtattagaaaaacagttcattggtatctacaaaataaagcttgggttgagtcagttaaaaatggaaattataaaaaatggcttactcagcagtatggagaaatgaaatgaaaggaataatcctcgccggtggctctggtacaagactttatcccatcacgaagggaatatcaaaacagttgatgcctgtttatgataaacctatgatctattatccactttctgtattaatgctagcaggtatcaaagatatattaatcataacaacgcctgaagatctgaataattttcagcgattactcggcgatggtaaacgttttggtattaatctctcatttgaggtgcagttaaaacctgaagggttagcacaggctttcattattggggggaaatttataggcaatgatgcggtctgtttggcacttggagataatattttttatggacaaaactttagtccaaaactcaaagaggctgcacaattaattgatggtgcaaccgtatttggatatcaggtaaaagatccagaacgatttggtatcgtagagtttgacgctaataaaaaagcactgtctatagaagaaaaaccggcaaaaccaaaatcaaattatgcagttacaggtctttacttttatgataataacgtagttaacattgccaaaacaattaaaccttcagagcgcggcgagttagagattaccagtataaacgaagtctatcttcgcaatgggaaattgaatgttgagttgttggggcgaggctttacctggcttgataccggaacacatcaaagcatgttggaagcatctcattttgtggaaactatcgaacaacatcaaggtttcaaaatcgcatgtctagaagaaatcgccttgtacaatggatggctaaccaaagatgaagtattcaaaataggtaatgagtacaaaaaaaatggttacggtcaatatcttctctctttggttaaggacaaataatggaaaagccaatctttgtaacgcaacctaatttaccaccgctagaggagtttataccatatctggaaatcatttggcagaataagcaatttacaaataatggtccaatgcatcaaaaattagaaaaaaaattatgcgagtttcttggtgttgaatacattagtctatttaataatgggactattgcgcttataaccgcagtgcaggctttgggtattaaaggcgaagtaattaccacaccatattcctttgtagcaactgcacactccttggtcttaaatgggcttaaacctgtttttgtcgatattgatcccaaaaccttaaatatcgatccgagaagaattgaagaggcgattacccctgaaacgcaggcaataatgccggtgcactgctatgggaatccttgcgatacacaagctattgctgatattgcgcaaaaatataatttaaaggtcatttatgatgctgcgcatgcctttggcgttgaagatgatgatggaagtgttcttcgccatggagatctaagtgtcttaagtttccatgcaactaaagtgttcagcacttttgaaggcggagctattgtgtgtaatagtaaagaaatgaaagaaaaaattgatagactaaaaaactttggttatatcgatgaaactaacatcaatatcattggctctaatggaaaaatgagcgaagttaatgctgctttcggcttgctacaattagaacatatggatacttttctacgtggtcgaatgaatgctgacatgttttatcggcagaaacttaaagatatcactggtataagcatagtaattcccagcggccagaaaatatcgaatttttcatatttccctatattggttgaatctgattttccgttatctcgtgatgaactatttaattatctgaagaaccagaatatttttgcaagacgttatttttatcctgttataccagattttcaagcgtatttgaatgtaggtgaagtctgtgatgtcaagaatgcccgtgaaatagcctcgaaagtgctttgcctaccgatgcatgcagaattgagctctgatatcttagaatatattgtaagtacgattagggagattaaatgattgccataatgcagccctatttatttccatatttagggtatttccaattgatcacggcatcagatacattcgtgctttttgatgatgttaattatataaagaaaggatatatcaacagaaacaacattttgctaaatggatctgcatataggtttacggttcctgtgcaaaatatatcacagaataaaaaaattaatgagcattatttttctgatgacactgataatctattaaaaacctttaacatggcatatgcaaaagctccatactatatggatatatatcctattatagagagagctttaaaaggaacagagagaaaggttagttctgtttgtttcaatgctattaacgatatactggattatctcgggatagaaaaaaatattgtcttctcaagtaatattgattatgacagatgtgctagtgcaactgataaactaattgggataacaaaagcattagaaagcaattactatattaatgcaagtggtggacaaaatctctacgattacgattattttaaaagcaaaaatattacgctcacgtttattcaaatggatgatattgagtatacacagaatggaaagaatgctgagtttattcctaacttgtcaatattagatgtcttaatgtggtcttctccaaaaaatgtgttggaattgctaaataaatatactctgataacaagcgggcataattatggcaaatgatacgttgatttttttaagtaaagttatccaagatgatctaaacctgaaatgttcgattcttaataactatcacaagatagatgactacattcaaaaattaatcgaacatgctacaataatttcaatcagagagaatggtcaagtaattggtgctatctgtttctattgcaataatcaaaaagatctaattgcgtatgtaagtatgattgcagttcatattgatcatagagggaaaggaatcggcgacgagcttctaagttttgcaattgctaattgtagaagaaaggggttcgaactttgcaagttagaagtcaacaaaagaaatgttagagcattaaccctttacagtaaaaatgatttttcaatattatcagaatctgagaatacttatttgatgcagaaaaaattataaataggctttgaatattgtgtctttaaaaaaaaatattatcattagctatgctgcacaaatatatgtcagtgctgtcgggattttaatactccctctgtacatcaagtacatgggagcagagtcatatggattaattggcttttttactatgcttcaggcgctgtttggtctcttagacttagggctaactccaacaattggtcgtgaaacagctcgctatcatggcgggacaatgacagtgctggactacagaaaattgctaagaactcttcatattttgttcttcactatcgctactattggtggagtatttctatttttcttagcacccatcatttcggttcattggttaaaggttacaacaatatcaattgacaccgtaaattactgtgtaaagataatggcattctctatagcattacgatggataggtgggttatataggggaatcattagcggtagcgaaaggttagactggctaagctatttaaatatttttataacaacgcttagattcatcattatatttcctgtcatgaaagtaaaaggttatactcctttcgtatttttcacatatcaattaatcgttgcgatcattgagtatttgtctttattatgtttgtctactttattaactcctaaattgaaatcagcaaacgagaaaattggtttttcattttcgcctattatgtcactgatgcgcttttccttaacagttgcttttacttcctctatttggatattgattactcagagtgataaactcatcttgtcgggtatattggaattaagtgaatacgggcatttcacactttctgtgttgttggctagtggcattctgatgattaatattccggttacaaactctatattaccgaggcttgcgcgtttacatgctgaaaataagcatgatgaacttctccgtatttataaaaatacgactatgttagtatgcatcttgggagtaagcgcatcgctagttgttgctatctatgcagaaccattgcttcttatctggactggtgatgcagaagtttcagcaagtgcatcgcctattctctcattgtatgccattggaaatggtttactggcagtatcagctttcccatattatctacaatatgctcaagggcggctaaagtatcacttctggggaaatattgtaatgttcttcatgctaatccccacaattattgtacttgctcgtaattttggtggagttggcgcgggttatgcctggttaatagttaatgtcttttatctttttgtatggactgcattggttcatcataaattaatacccggattacatctctcttggttaatgagtatcggtatgataacaattcctaccggtattattgtattttttctctcctttattgtccgatttagcggtaatagattgcatgacataattgtgctgggcttaatatcaattttggctctgatggtttcaatagtatcatgctggctaatcaaaagaatgaatctcggggtgtaaaataaatggaaggaacagttcctaaggtctcagtctgtgtgataacatataaccaggcgaaatatataaagcaatgcatagaaagcctaatcactcaggactgtgatttcgattatgaaataattgtgagcgatgattgttcgacggataatacacgagaaattttagaacacttatatcatcaatatccagaaaagatacgtatatttatacatgaaaagaatcttggggttactaaaaattatcttttcctgcatgaacaggcgcaaggcgagtatattgcacatgttgatggtgatgactactatttttcaaataaattaagtttacaagcacgatatcttgatgaaaataaagagtgtaatattgtttggcatcctatgttgttagataataattcacgagtatttaatggatatcagcagagtggaactaattttgccgatttaaaatttactcaaggtgacataattcaatatatttctgtcggtaaaaacagctcaaagatgtatcgaaaaaccgtacgagatattgatatacctgcattcgagctcgttgactacctcgttaatgttgaacaagttcagaatggctatggtggatatgcttcgaatgaacctctgggagtatatcgagtaggtgtaggaatttcatcttctggagacaaaactcgcattgctcttcgggatacttttctttatctattaaaaaagtatccaaaatacagattagaaataaatacagcggccttgacatattttatccgcgatatctttgcaagaagaaaatctgcaaagatttttttacatgtatggataaaaacgtttcatcccttttcagtaattaaattacttaaggggatgagtacaattaaaaaattaaaatatagagcataagtatgattaaaatcgttaacgaggacttacatgcttttactaaaaatggcagtttcgctagtaaagttaaatgcacaattataagccatacttttcatctagtgctcatgatacgcttagggcagtttctatcaaagatacctgtgatcggcgcattttttagattggtcattgaatattccataagaatcatattttctagtgatataagtctaagggcaaggattggtggtggattagtaataatgcatggccatgatatcgttattggaagagatgttgtcataggcagaaattgtaaaattctgaatggcgtcactttaggtaataaggacacggaatcaacagaaaaccagcaaccagtagtgggtgataatgtgataattggtactggagctaaaattctggggaaagtagttataggaaataatgttaaaattggagctaatagtgtagttatttctgacattgctccagattctgttgctgttggtatacctgcaagggttactaaaggtatctaataggttaagataagtaacgaagagattcatcatgataaatctaaatccagtagctatcctaaccttactttatttatctatcaattttttatcaatgttgataggatgttctagtggtgaaatacaagtagaaacatcaatttttagagttagtgaagaaagtctaatttattcatttttacttcaagctatctgtcttatttttttatattacatttataaatattttacaaatagaatctcatatcccccattaacatttaaagcaaagtggggaagggcgttacttatcattcaaatcgcatttattatttttaacacacaaatgggcgttaatacagccggtagtgttgaaaggatagaaggacaatcattaagcaactatctttttataattttacaacccgatattctagtagccgttatttcagtatgcttaaattcaggtttcctattttggactaatatcttagtatacctgctatccatgttccttagaggttggatgggtggaacctttgtcatactctttttgatattatcacgttatcaaaatttaaggatctcactaaaaacttttttggtatccttatgttctctattgcttcttttctccattttgcctgcactcattgaagcgaaatgggcaatgaggaccggtatatctctatcagtatttataagcaatatgagttcatatgttactccagagaattattatgctggcataaactatctgttaaatagatttcaacatgtcggccatttagcgttgatatatgaaaatgcagatgatttatttaaaaaatataacgcaggttattttagctcatattatatggatggcatgcctcagtattttcttgttaagatgtataacttagatatgtataagctcagcttttatcttgttcaatatttctttgatataacagaaccgacttggaatattaacacgggcgtggttggatggctttatatattaaggtatgaatccatactttttgcgttttatataatgttattgttgctggttccttattatgtagttagtagatttgctggtaagagaatgttgagtgttttggcttgcttttctattatttatttatttcacggatggttgggagcctatgttaacttagcattttacgcatgtataataagtctgcttgcaaatataagattatacagaactgtatatattccatgtgagaaataggattgttatgtgtggattagctggtttccttgaatcaaatttaaatgataataatagtgctaaagttttacattcgatgggtgaatccatataccgaaggggaccagatggtacaggaatatggtttgaaaacattgagaataaaataaatgttggttttgttcatactcgattagctattattgatctctcagacgccggtcaacagccgatgcattctcactgcggtcgttatgtaattgcattcaatggtgaaatatataatcatcttgaactaagatatctattagaaagtaataatcatatttcctggcgtggccattctgatacggaaacgcttttggcatgctttggtatatggggtattgataagacattgcaggcatgtgttggaatgtttgcaatagccttatgggacaaaaaagaacatcggttaacattagcacgtgatagagttggtgaaaaaccgttgtactggggatggcaagatgatgcccttctttttggctcagaattaaaagcgttgaaaactcatccggcatttagtgcagaaataaacagagacgcactttgcttgctattaaggcataactatattcctgcaccacatacaatatatcgagggatccaaaaactacaaccgggccactatctaagtgttgagttatcaaatgatgaaagaaaggagacacttcatcagtactggtcatatgagaaagtagtacaagaaggattagtgaatcctttcatgggatcacctatacaagcagtagaacatcttgagtctttaatcgctcaaagtattaatggacagttaatttctgatgtccctcttggcgcttttcttagtggtggaattgatagtagtctgattgtgtctatcatgcagtctttatcatcatctccagtgaaaacattctctataggatttgatgataaaaaatatgatgaggctatctttgctgttgaagttgcccgtcatttaggtaccgatcacaccgaaatgtacgtaaatgacaaagatatacaggatgttattccacttttgcctgaagtgtattgtgaacctttcgctgatagttctcagttgccaacttttttggtcagtaaaatggcacagcaacatgttaccgtcgcgttgagtggtgatgcaggtgatgagttatttggcggatatacgccatatagctttacgccaaagtattggaattatgcgcgaaatataccattgcaaattagaaaatttgcttctaggtatattgacaaattgccagttaatccgaagtttaaaaaattaatagagtgtatggcagttcagaatccgcagcttttttacaggaatatcattagccattggcttaatcctgaagagttagtcaaaaactcgagtgagccatcaactgcatttagttcatctactacgttccctgtaaatggcggatatgttgactggatgatgtcggtagatgctcaagtctatatgacagatgatattttagtcaaagttgacagggctgctatgtataatagcctcgaaacccgagtgccattattggaccaccgtattatcgaatttgcttggcagttaccggtttctttaaagattaataatggtgtaggtaaatggcctctgcgagaaatactctataaacgagtaccgaaatcaatgattgaacggccgaaaaaaggattctctataccgctatcatcgtggttgcgcggacctttgcgtgattgggcggaagagttgattgcttataaacgtctcgcagatgaaggatattttaatgttgctgctgtgagaagttgctggaatctgcatatccagggacaggctgactattcaagaaaattatggagcatacttatgtttcaatcatggttagaaaaccagaaatgaaagtcgttcatattataatcgatttgaatgttggtggggcggagctcatgcttcagcgtcttattaagcataccgctgataataatgttgaacatgttgtcatctctcttactgatattggcacactcggcgaggaaattctaaagagtggggtagatgtaaagtgcttaaacattaattccccaattaagtatgccaccagtttattgaagctttataagctatttactaaaattaagcctgatgttgttcatacctggatgtatcacagtgatcttattggtggtatctctgcgaaattagccggcgttaaaaaaataatttggtgtgttagaagtactgacattagtaaaggaggaaacaagcttacgcttctgataagatggttatgcgctaaaatatcatcgtttattcctgatactatcgtttatgctgcaaacgcttcgaaggaagttcatgaacagtgcggttatgataagaataaatcgttggtcattgccaatggatttgatttaactaaactatcgccagataaattttccagaagcgatttaagaaaagaaatcggcttagcagaaaatgatgttgtggtatgttcagttggtcgctatagtccagtaaaagatcactcaacctttatttcagcagctcttcaacttgcagaagaatttagtaatgtacgcttcttattagtcggtcgtggcttgaccacccagaataaaataataatgacacagcttagtgtaagctgtcactcagataaatttattcttcttggtgagcgtagcgatgttcctgcatgtttaaatgcttctgatattttttgccttcattcagtaacagaaggcttccctaatgtcttaggagaagcaatggcaatgggaattccttccgtgacttcaaacgttggtgatgccgcatttttacttgataaggttgattttgttgttccagccggaaactcgtatttattagcacagaaactgcgggaagttattttgttaagtcgaaaaaaccgcactaagttaggtcgtatattaaggctgcgaattgagaatgagttttctatggatactgtagccaataaatatttatccttatataaaaattaaatgaaaaagattgtttttataatcaataatgtcgattttttaatatctcatcgattacctatcttactcgaggctcagaaaaatgggtttcaggttcatgtgattgctcctaattccaggaataatgagctactaaagaagcataaaataatgggtcatgatctctttctttccagaggaggtaataaccctttttatgatttatttactttgcttcagcttacaaaaattctgaaatttctcaagcccgaccttgtccatcttgtcacgattaaaccaacactttatggtgggattgctgccagaatcgccaaagtgcctcatgtcgttgcagctgtctctgggctgggaaccgtattcttgagcagaggaatcatcagtggcttacgtcgcttactggttacaaccttgtatcactccgctctgaaacataaaagaatacgcgttatctttcagaaccctgatgatcgtgagttacttgtgagcgcaggcatattaaaggtttccaattcctgtctgatcagaggttcgggggttgatttaagagagtatccttatcttcctgaaaaagttcacggtaagactgtagtaatggcctctaggctactaagggataaaggggtttatgagtttatcgaagccgctcgcttacttaaacaaaggaatgtagaggctgatattagaatcattggttctccagatacctgtaatccgacaagtatcactgaggctgaaataagcaaatgggcatcagaaaatattgttgaattctgcggatttagaagtgacattgctaagcagtactctaatgctaatgtaatatgcttgccctcatatcgagaagggttacctaaatgcctggttgaagccgcagcgtgtggtagggcagttgttacaactgatgtaccaggttgcagggatgcgatagtggcaaatgttactgggatgttagtcgcagttcgggatcctgtatcgttagcagatgcgattgagtttctgctaaaaaatccagatgaaagaataaaaatggggaaggcggggagattgttagctgaaaatgagtactcaatcgaacatatagtgaatcagcacttatccatttacaatgacttaattcactcctgacgcttagtgctggtgccatttatgatcattctttttgcatcctatttggcacttgatgctatccatcgcgccctaacctaagttaacatcttcaatacattcaagccgcgcatacgtcgcgtggtgaccacacctgacaggagtatgtaatgtcaaagcaacagatcggcgtcgtcggtatggcagtgatggggcgcaaccttgcgctcaacatcgaaagccgtggttataccgtctctattttcaaccgttcccgtgagaaaacggaagaagtaattgccgaaaacccaggcaagaaactggttccttactatacggtgaaagagtttgttgaatctctggaaacgcctcgtcgcatcctgttaatggtgaaagcaggtgcaggcacggatgctgctattgattccctcaaaccatatctcgataaaggtgacatcatcattgatggcggtaacaccttcttccaggacaccattcgtcgtaaccgtgagctttctgccgaaggctttaacttcattggtaccggtgtctccggtggtgaagaaggcgcgctgaaaggtccttccattatgcctggtgggcagaaagaagcctatgaactggttgcaccgatcctgaccaaaatcgccgcagtagctgaagacggtgagccatgcgttacctatattggtgccgatggcgcaggtcactatgtgaagatggttcacaacggtattgaatacggcgatatgcagctgattgctgaagcctattctctgcttaaaggtggcctgaatctcaccaacgaagaattggcgcagacctttaccgagtggaataacggtgaactgagcagctacctgatcgacatcaccaaagacattttcactaaaaaagatgaagacggtaactacctggttgatgtgattctggatgaagcagcaaacaaaggtaccggtaaatggactagccagagcgcgctggatctcggcgaaccgctgtcgctgattacagagtctgtgtttgcacgttatatctcttctctgaaagagcagcgcgttgccgcgtctaacgtactgactggtccgcaagcgcagccagcaggcgacaaggctgagtttatcgaaaaagttcgccgtgcgctgtatctgggcaaaatcgtttcttacgctcagggcttttctcagctgcgtgctgcgtctgaagagtacaactgggacctgaattacggcgaaatcgcgaagattttccgtgctggctgcatcattcgtgcgcagttcctgcagaaaattaccgatgcttatgccgaaaatccgcagatcgctaacctgctgctggctccgtacttcaagcaaattgccgatgattaccagcaggcgctgcgtgatgtcgttgcttatgcggtacagaacggtatcccggttccgaccttcgctgctgcggttgcctattacgatagctaccgtgccgctgttctgcctgcgaacctgatccaggcacagcgtgactatttcggtgcgcatacttataagcgcattgataaagaaggtgtgttccatactgaatggctggattaatctgatttaaccaacaataaaattgaggcccggcgtatattgcaccgggcttttttttgccatttatcttatagactaaatttcactgcttaatattaactttgagctggccccctgaaataccagacagtagatgtatcttaaaataagagataggcttggatatatgtctaacactagttctaattttgagatggctggcgttttgttaggaaaagaggtgcgtaaa

SEQ ID NO: 47 - DNA, 52506 bp, Escherichia coli
  source 1..52506: mol_type = genomic DNA
actgcgtcatgtcgccctgacgcgctgccggttttccgctcatctgctcatccttgttttatcgggttatttgtctgcttccaggcaaaaccctacagatttataagaaagccttaagtgagatatccatcagatagaaacaattaggaaaatatttatatcaccatgataaatatgtgatttatttggaagtaacaaaccatcaacattttctgccctttttcccatcaccaggccatactgatatttttcctcgcacaaaggactcggcatgaaactcgtcggtagctacaccagcccgtttgtacgcaaactttctattctgttgttagaaaagggcataactttcgaatttattaatgaactgccctataacgcggacaacggcgtggcgcaatttaacccgttaggaaaagtgccggtgctggtgaccgaagagggcgaatgttggtttgattcgccgatcatcgctgaatatattgaattaatgaatgtcgctccggcgatgttgccgcgcgatccgctggagtcgttgcgggtgcgcaaaattgaggcactggcggatggcattatggatgccgggctggtatcggtgcgtgaacaggcgcgtccagcggcgcagcagtctgaagatgaattgttacgccagcgggagaaaatcaaccgcagtctggatgtgctggaaggatatctggtcgatggcacactcaaaaccgatacggtcaatctggcgactatcgccattgcctgtgccgtcggatatctcaatttccgccgcgttgcgccaggctggtgtgtcgatcgcccacacttagtcaaactggtcgaaaacctgtttagccgcgaaagttttgctcgcaccgaaccgccaaaggcttgatgcgcgatatgtcctcctgacccatctcacgttacaatccgtggttatgttaaacgcccttctccgtgtgagagggccttgatcagccaggtttcctatgacaaccgaaacgcgttccctctatagtcaacttccggctattgatcgcttattgcgcgatagctccttcctttctttgcgtgatacttatggtcacacccgcgtggtggaattgttgcgtcagatgctcgacgaagcgcgagaagtgattcgtggcagccagacgctgcctgcgtggtgtgaaaactgggcgcaagaagtcgatgcccggttgacgaaagaagcgcagagcgcgctgcgtccggtgatcaacctgacgggaaccgtgctgcataccaaccttgggcgagctttacaggcggaagccgcggtggaagccgttgcgcaggctatgcgttcgccagtgaccctcgagtacgatctggacgacgctggacgcggacatcgcgatcgtgcgctggcgcagttgctgtgccgcattacgggggcggaagatgcctgtatcgttaataacaatgcggcggcggtgttattgatgttggcggccactgccagcgggaaagaggtggtggtttctcgcggcgaactggtggagattggcggcgcgtttcgtattcccgatgttatgcgtcaggcaggctgcaccctacacgaagtagggaccaccaaccgcacgcacgcgaatgattatcgtcaggcggtgaatgaaaataccgcactgttgatgaaagtacataccagtaactacagcattcaggggttcaccaaagcgatagatgaagcggaactggtggcgctcggcaaagagctggatgttcccgtagtgactgatttaggcagtggctcgctggtcgatcttagccagtacggtttgccgaaagagccaatgccgcaggagttgattgcggcgggcgtcagtctggtgagtttctccggcgacaagttgttaggcgggccgcaggcaggaattattgttggtaaaaaagagatgatcgcccgcctgcaaagccacccgctgaagcgtgcattacgcgcggataaaatgaccctcgcggcgctggaagccacgttgcgtctttatttacaccctgaagctctgagtgaaaaattaccgaccctgcgcctgcttacccgcagcgcagaggtcattcaaatccaggcacaacgtttacaggccccccttgccgcacattacggcgcggagtttgcggtacaggttatgccatgtctttcgcagattggcagtggttcgctgccggttgatcgcctgccgagcgcggcattaacgtttacaccccatgatggacgcggtagccaccttgagtcattagccgcccgctggcgtgaattgccagtgccggtgattggtcgtatttatgacggacgattgtggctggatttacgctgccttgaagatgagcaacggtttttggagatgttgttgaaatgattattgcgactgccggacacgttgaccacggcaaaacaaccttattgcaggcgattactggcgtaaatgctgaccgtctgccggaagaaaaaaagcgcggcatgaccatcgatctcggctatgcctactggccgcagccggatggtcgcgtgcctggttttatcgacgtacccggtcatgaaaagtttctttccaacatgctggcgggcgttggtggtatcgatcacgcgctgttggtggtggcgtgcgatgacggcgtgatggcacagacccgtgagcatctggcgattttgcagctgaccggtaacccgatgctgacagtggcgctgaccaaagccgatcgcgtggacgaagcgcgtgttaatgaggttgaacgccaggtaaaggaggtgctgcgggaatacggttttgctgaggcaaaactgtttatcaccgcagcaaccgaaggtcggggaattgatgccctgcgcgagcatctgcttcagttgccggaacgcgagcacgccagccaacatagtttccgcctcgcgattgaccgcgcatttaccgtaaaaggtgccgggctggtcgtcaccggtacggcgttaagcggggaagtgaaggtaggcgattcactctggctgactggtgtaaataaaccgatgcgtgtacgtgcgctgcatgcgcaaaaccagccaacagaaaccgccaatgccgggcagcgtatcgcgcttaacatcgcgggtgatgcggaaaaagagcagattaaccgtggcgactggctgcttgccgatgtgccgccagagccgttcacgcgggtgattgtcgagcttcaaacccatacgccgctgacccagtggcagccgctgcatattcaccacgccgccagccacgttacgggacgcgtttcgctgctggaagataaccttgccgagctggtgttcgacacgccgctgtggctggcggataacgatcgcttagtgctgcgcgatatctcggcccgcaacacgctggcgggggcgcgtgtggtgatgcttaacccgccgcgtcgcggtaaacgtaagccggaatatctgcaatggctggcgtctcttgcacgggcgcagagcgatgccgatgcgttatctgttcatctggaacgcggcgcggttaaccttgcggatttcgcctgggcacggcagctcaacggcgaagggatgcgcgaattgctgcaacagcctggctatattcaggctggttatagcttgttgaatgcgccggttgccgctcgctggcaacggaaaattctcgacacattagcgacttatcatgagcaacatcgcgatgaacctgggcctgggcgcgaacgtctgcgacgtatggcgttgccaatggaagatgaagcgctagtactgttgctgattgaaaagatgcgcgaaagcggcgacatcctcagtcatcacggttggctgcatctgccggatcacaaagcgggcttcagcgaagagcagcaggccatctggcaaaaagcagagccgctgtttggtgacgagccgtggtgggtgcgtgatctggcaaaagagacgggtaccgacgagcaggcaatgcgcctgacgctacgccaggcggcgcagcaaggaataattaccgcgatcgtcaaagatcgttattaccgtaacgatcggattgtcgaatttgccaatatgatccgcgatctcgatcaggagtgtggttcaacctgcgcggcggatttccgcgatcgcttaggcgtaggccgaaagctggcaattcagattctggaatattttgaccgcattggctttacgcgtcgtcgtggaaatgatcatttattgcgcgacgcattattatttccggaaaaataaggaaatgattaattaatttttaaaataaattaatacaaatttcttatgattttaaaaaaagcacattgtttaatgaatacaatgtgctttttattagattaattttgataatcaataataatgatcatgttttcgaatgaaaatcctcagtaagctgcccacccttttttacactttcaggagtgtgttatggcatcttcaactttctttattccttctgtgaatgtcatcggcgctgattcattgactgatgcaatgaatatgatggcagattatggatttacccgtaccttaattgtcactgacaatatgttaacgaaattaggtatggcgggtgatgtgcaaaaagcactggaagaacgcaatatttttagcgttatttatgatggcacccaacctaaccccaccacggaaaacgtcgccgcaggtttgaaattacttaaagagaataattgcgatagcgtgatctccttaggcggtggttctccacacgactgcgcaaaaggtattgcgctggtggcagccaatggcggcgatattcgcgattacgaaggcgttgaccgctctgcaaaaccgcagctgccgatgatcgccatcaacaccactgcgggtacggcctctgaaatgacccgtttctgcatcatcactgacgaagcgcgtcatatcaaaatggcgattgttgataaacatgtcactccgctgctttctgtcaatgactcctctctgatgattggtatgccgaagtcactgaccgccgcaacgggtatggatgccttaacgcacgctatcgaagcatatgtttctattgccgccacgccgatcactgacgcttgtgcactgaaagccgtgaccatgattgccgaaaacctgccgttagccgttgaagatggcagtaatgcgaaagcgcgtgaagcaatggcttatgcccagttccttgctggtatggcgttcaataatgcttctctgggttatgttcatgcgatggcgcaccagctgggcggtttctacaacctgccacacggtgtatgtaacgccgttttgctgccgcatgttcaggtattcaacagcaaagtcgccgccgcacgtctgcgtgactgtgccgctgcaatgggcgtgaacgtgacaggtaaaaacgatgcggaaggtgctgaagcctgcattaacgccatccgtgaactggcgaagaaagtggatatcccggcaggcctacgcgacctgaacgtgaaagaagaagatttcgcggttctggcgactaatgccctgaaagatgcctgtggttttactaacccgatccaggcaactcacgaagaaattgtggcgatttatcgcgcagcgatgtaatcatcatttccacaacggctggcaaattgtcagccgctttttcaactatctctgtaacccttgcccgtaaattcgtgatagctgtcgtaaagctgttaccgactggcgaagatttcgccagtcacgtctacccttgttatacctcacaccgcaaggagacgatcatgaccaataatcccccttcagcacagattaagcccggcgagtatggtttccccctcaagttaaaagcccgctatgacaactttattggcggcgaatgggtagcccctgccgacggcgagtattaccagaatctgacgccggtgaccgggcagctgctgtgcgaagtggcgtcttcgggcaaacgagacatcgatctggcgctggatgctgcgcacaaagtgaaagataaatgggcgcacacctcggtgcaggatcgcgcggcgattctgtttaagattgccgatcgaatggaacaaaaccttgagctgttagcgacggctgaaacctgggataacggcaaacccattcgcgaaaccagtgctgccgacgtgccgctggcgattgaccattttcgctatttcgcctcgtgtattcgggcgcaggaaggtgggatcagtgaagttgatagcgaaaccgtggcctatcatttccatgaaccgttaggcgtggtggggcagattatcccgtggaacttcccgctgctgatggcgagctggaaaatggctcccgcgctggcggcgggcaactgtgtggtgctgaaacccgcacgtcttaccccgctttctgtactgctgctaatggaaatcgtcggtgatttactgccgccgggcgtggtgaacgtggtcaacggcgcaggtggggaaattggcgaatatctggcgacctcgaaacgcatcgccaaagtggcgtttaccggctcaacggaagtgggccaacaaattatgcaatacgccacgcaaaacattattccggtaaccctggagctgggcggcaagtcgccaaatatcttctttgctgatgtgatggatgaagaagatgcctttttcgataaagcgctggaaggctttgcactgttcgcctttaaccagggcgaagtttgcacctgtccaagccgtgctttagtgcaggagtctatctacgaacgctttatggaacgcgccatccgccgtgtcgaaagcattcgcagcggtaacccactcgacagcgtgacgcaaatgggcgcgcaggtttctcacgggcaactggaaaccatcctcaactacattgatatcggtaaaaaagagggcgctgacgtgctcacaggcgggcggcgcaagctgctggaaggtgaactgaaagacggctactacctcgaaccgacgattctgtttggtcagaacaatatgcgggtgttccaggaggagatttttggcccggtgctggcggtgaccaccttcaaaacgatggaagaagcgctggagctggcgaacgatacgcaatatggcctgggcgcgggcgtctggagccgcaacggtaatctggcctataagatggggcgcggcatacaggctgggcgcgtgtggaccaactgttatcacgcttacccggcacatgcggcgtttggtggctacaaacaatcaggtatcggtcgcgaaacccacaagatgatgctggagcattaccagcaaaccaagtgcctgctggtgagctactcggataaaccgttggggctgttctgatataagaagctggtcgcattgggtattcattgcctgatgcgacgcttacgcgtcttatcatgcctacgggaacctgaccgtaggccggataaggcgtacacgccgcatccggcataaacaaagcgcacgttgttacaatttacgttttaaacctacgtgcgcaataacccagactacgccaacagaagtgcgtttctggggcgtgttttgtcaggagtttaatctcgcgtttcgatggtgagcgggcgaaccaggccgtaaatcaccattggtgatccgaggccaatcagcaataaacggtagataattgaaggtttaatacgcttaatctgtactgtggatgttttactggagttattcattagtttggccaatagttccactatttcaatatgataaacctcgtcctgttgaaaaaccagacagcacatttaagaaagtatataaaaaacaatatgtcgttatataaataaggaaattgcactgcatcatggcatttcataatatgcgttaattgttcttttttatattctttgagggaaatatgttcctggactattttgcactgggagtgcttatttttgtatttctggtgatattctatgggattattattttacatgatattccctacctgattgctaaaaaacgtaatcatcctcatgccgacgccattcatgttgctggttgggtgagtctttttacgttacatgttatctggccatttttgtggatttgggccacgctttaccgcccggagcggggatggggaatgcaaaaccatgactcctccgttgtgcaactacaacagcgtattgccgggctggagaaacagctcgccgacatcaaatcctcttctgccgagtaatacttatggatttactgattattttaacctatgtggctttcgcatgggcaatgtttaagatcttcaaaattcctgtaaataaatggaccattcccaccgcggccctgggtggcatatttattgtcagcggtttaattctgttaatgaactataaccatccgtataccttcaaagcgcaaaaagcggttatttctattcctgttgtcccacaggtgacaggcgtggtgatcgaagtgacggataagaaaaatacgctgattaaaaaaggtgaggtgctatttcgactggacccgacgcgttatcaggcgcgggtggatcggctgatggcggatatcgttaccgcagaacataaacagcgggcgttgggcgcagagttagatgagatggcggcgaatactcagcaggcaaaggccacgcgggataaattcgctaaagagtatcagcgttacgcacgcggcagccaggcgaaagtaaacccgttttcagaacgcgatattgatgtggcgcggcaaaattatctggcgcaggaagcctccgtaaagtcatcggcggcggaacaaaaacagatccagagccagctggatagcctggtgttgggtgaacattctcaaatcgccagcctgaaagcgcagctcgcggaagcaaaatataaccttgagcagacgatagtgcgtgcgccgagcgatggttatgtgacccaggtgctgattcgtccgggtacctatgccgcgtcgctgccgctacgtccggtgatggtgtttatacccgatcagaaacgacaaattgtggcgcagttccgtcagaactccttgctgcgactggcccctggcgatgatgcggaagtggtatttaacgctctgccaggtaaggtattcagcggcaagctggcagccattagtccagctgttcccggcggagcttatcagtcgaccggcaccttacagacgttaaacacagcgccgggttcagatggcgttatcgcgaccattgaactggatgagcacactgatttgagcgctttaccagacggtatttacgcccaggtggcggtctactctgatcatttcagccatgtctcggtgatgcgcaaagtgctgttacgcatgaccagttgggtgcattacctttatctcgatcattaatcttcgctttccgccgcttgttcaggccgcagttgctgcgactgagcaagctggtggcgaatttcacgcagcatttcatccagcacatactggacccgccagggctggtattcccgtttacggaagatagccaccagatccagccaccattcatacgggtgctgaaagcagggcaccagcgtgccgtcttgcaggtcgctctgcacacttttgtctggcgcaaacacaatccccaggtgatttcgtgccagctccagcgccgattgcgtgttatcgcaaacgtaatttcccttcacgcgataatcccgcacctctttactcccggcgacgttgaagcgccagatattcgcgtcgtcaatcatcatcgagtcgatcaaaatacaggagtgatgttcgagttcgtcaggacggctaataggatgtttctcaagatagcgctggctggcataagcggttacggcatattgggtaataaaactggcaaccagcgattcatcttttggtggagcgtagctgattaaaacatcacaatcatcaggaaattcgacgccttcataaaaggcattacgctcaagattgcaggtttttagcgataaggtgatatcaccgatatctttaattttatcgattacatgtttggataaataggtaattatgccggttggggcgtagatagtgacccgaccacgtttctcatgcttataatctgcaataaaattattaagttgctcgtttctatccagcatgtcgttgatgtacggtaacagcgcggtgccaaaaggtgtgagcatcagctgccgggtggttcggtcaaagacttttaaacccacttttgattcaaaatcagcaagatatttgctgacgttggcctgtgcgatgccaagtacagtcgcggcatggctgatattttcactggcagcgattaccgagataatttttaactcccggtacttaagttgtaattttgtcatcgcaacagcccaattatatataattttatatattactatataaatatgaatcttgcaccggagaaattgtaagcattactatgccgactcttttttatcttattttaaaatggaataccggacatgttaattaaccgcaatattgtggcgttatttgcgttgccttttatggcaagcgcaactgcttctgaattatccattggtgccggtgcggcttataatgaatcgccttatcgcggttataatgaaaatacaaaggcaattcccctgattagttatgaaggtgattctttttatgttcgtcagaccacgttaggttttattctgtcgcaaagtgaaaaaaatgaacttagcctgaccgcatcctggatgccgctggaatttgaccctgccgataatgacgatcatgccatgcaacaacttgataagcgtgatagtacggctatggcgggggttgcctggtatcaccacgagcgttggggaaccgtgaaagcctctgcagctgcggacgttctggataacagcaacggctgggtgggggagctatcggttttccacaaaatgcagataggtcgcctgtcgctgacacctgcgctgggcgttctctattatgacgagaatttcagtgactattactatggcatttcagagagtgagtcccgtcgtagcggtctggcaagttattccgcgcaggatgcctgggtgccctatgtcagcctgacggcaaaatacccgataggagagcacgtagtattgatggcgagcgccggatacagcgagctgccggaagagattaccgacagcccgatgattgatcgtaatgagagttttacctttgtcaccggcgtgagctggcgtttttaattcaccggtggatgtcggtgcggctggtgctccgtcgtaatgccacaaaggttgttgctctggattgctctgttcataccgggaacctggcgtctgaatcaggatcttatggctgaacaatcccttgccttcaaatgtcgtaaatggcgcatcggcgggcagcaacaggttatgcagtgactcgacgttgtcggcctgctccatgcaatacggtttaatgaggttggctatttccggcagatttttcgcaagcacaccggtttaacgccagcagcgtggaagcggcgttacagcaaggaacatatcaattcgtagtgccggggcgatgaagccccggcgtgagggattactgcccgtaataggcattgtctccatgcttacgcaggtagtgtttatccagcagttcgttttgcatcgcagggagctgcggcgcaagctggcgcgagaacaggcccatataggcacactcttccagcaccacggcgttatgcaccgcatcggcggcattttttccccaggcgaacgggccgtgagaatgtaccagtaccgccgggatttgtgccggactcctgccgcgttcttcgaaagtttcaatgatcacttcgccggtctggtattcatactcgccgttgatctcctctgcggtcatcaggcgtgtgcaggggatggcaccatagaagtaatcagcgtgcgtggtgccccaggcggggagatccagcccggcctgtgaccagatggtggcgtggcgcgagtgggtatgcacaatgccaccaatttcggcatagcgacggtaaagtgccagatgcgttggcgtatcggacgagggctttttgctaccttccaccgccttaccgctggctatctcaaccaccaccatatcgtcggcggtcatcacgtcgtattcgacgccggaaggtttgattaccatccattgccgcgtgtcgtctaccgcgctgacattgccccaggtgaacgtcaccagatggtgagcgggaagcgccagatttgccgccagcacgtcggctttcagttgctctaacatataaaacctgcctcctgcatacgcgcttcaatccagcgccgcgcctgaataatctccagcaccggctctttggctttttcggtccacatctcaatcaagaaagaaccgcgatagttcagttgatgcagcgttttgaagatgccaacgaaatcgacgcagccttcgccaaacggcacatcacggaactgtccgggactttgctcggtcactggctgggtgtctttcaggtggatcgcggcgatacggtcaatgcccagtttcagttcggcgggaacatcattgccccaggcgctgaggttgccgacgtccgggtagacggtgaaccacggcgaggcgagcatctcgtcccattttttccatttgctgatggagttcataaacgcggtatccataatctccaccgccagcattacttgtgatgccgccgcctgttcgactgcccacgccagcccttcagcaaaacgttgttgggtgccttcgtcgtggtcttcgtaatagacgtcataacctgccagctggatggtgcgaattccgagatcgcgcgccaggcgaatcgctttactcatgatttcccgcgcccgttcgcgcactgcctcgtcccggctgccaaagggaaaacgacgatgggcagacaggcacattgacggaatggcaacacccgtttcgatcatcgcagtgaccagcgaagcacgttgtgcggcgctccagtcaagacgtgagagccgttcgtcggtttcatccaccgacatttcgacaaaatcaaagccgcagctttttgccagcaccagccgctccggccaggagagatctttcgccagcgctttttcataaatccctaacggatgattacgcacgcttgcctccccagatagcgtcgatttgcgcatggaaatcggcagccacctgtgccggatttgctgcgcctgccagcgcccgtccggcaataaacgctttcacgcgaatatctttaaacagcggcaggtcagcaggggtaatcccgccggtaatggaaagttcaagaccgatatcagaaagcgccttcatgcgtgccagatcggcctcgccccactgttgcccgctggcctgtgcatcacgaccacgatgataaatggcctgccgcacgccaatacgatgccagtcgcgggcgtcgtccagcgtccagttaccgaacagctctatctgaatttcaccaccgcagcgttgcgccaccgcgtggcctttttccaccgtcgcgagcggtgcggcgcagatgatggtcatccagttagcacctgcggtaaatgcttgttgagcgagtgtttcaccggcatcggcgaccttccagtcagcgacgatgattttgtccgggcactgttcgcgcaaggcttttaccgcgccaagcccttcgtttaaacagagaatggtgcccgcttcgacgatatcgacgctgtcttttaacagcgtcacgtcgcgctgtgcgtcttcaagtgatgagtggtcgagggccagttgcagaagtggtcggctcataatgtgtgctccttgatgcgggcgtgaaagccctgaagtgcggcaatgagatgctgatagcgttggtatttttgttggtaaagctgatgggcggtcatatccggcagcagggtgcgtaccgggtgctgtaaatcacgttgagcttcgctgaaatcgcgataaactccggtgccgacgcgggcggcaagtgccgcgccaaaacagccggtttcttccacctgcggcagctcgatacgcagaccgctgacgtccgccagcatttgcatccagacatcggagtgcgccgggccgccagtgacgcgcagggtgtgcacatcagtaaaacgttcgcgcatccggttgaggtgggtcatatggctgaacaccaccccttcataaatggcctgcaacaggtatgcgcgggtgtgaatggcctgcatcccgtagaaaccgctggtcatctcgagtccggcgttgctgccgtacaggaacggcaggaaaaagagatcgccaccggccttcggcaagctggcaacggcctggttgatctcatcaaacgagatttctccccactgtgcggtaaaccattcgaggttgccggaagaggtggggctggcttcgtgaacgataaattcaccatcgttaacgtagcgaccatagacatacggatgcgcttcaccgtcacgtaaaccgcgggttatgccgctggtcaccgcccaggtgcccatcaccgcattaagggtaaattcgtcttcgatcccggcgcagagtgcggtggaaaccacatcaaacaggccgccgacaacgggcgtacccgctttcagaccggtcagtacggctgtctgagcggtgatctccccgcagatttcggcagatccgacaacaggcggcagggcgtgattgatttcagcaatccccagccagtcggtgaggcacgggtcatattccccaagactcatgttgtagaggttggactcggaaatattgctctcttcacagcctttgacgccggttaaacaccagcgcaggtagtcgtgcgtcatcatcacgcagccaatttgcgcgtagcgttccggttcgtgctctttcagccagcgtaacagcgacaccggatgcccggtccacaaggtttgtcgggtcaacgggtagagtttttccgggatgccatcttcctgccagcgacgaacgatttccatcgcccggcgatccgaggacaaaatggcgttaccgagcggcttgttgtttttatccagcaaaaacaagccttttccttgtgcggagataccgataccgacaatttgttccccgctaacgccggaatgggtaagcagttcgcgaatgacagccatgcagcattgccacagttctgccatatcgcgctctgcccaacctggctgcgggcttaatgcgcacagcggcaggcgctgcacgcctgcctcccggccttcgcggtcatacagcccggctttcagccagctaccgccacaatctaaccccagccagtattgcgtcatggtttattgcacctcatccacggctttcagtagatcagcaccctgcggaacatcttttacaaacatgtcgcggacctgagtacccagtgcgtcgctaaaggctttgcggtcgagatcggtgatgacttccacgcccgcttctttcatgccgtcgatgattttttgctgatcttcggcaaccagtttgcgctggtagttacccgcttcctgcgcagatgaaattagcgcttgctggaactccggggttaagccatcaaacttcgctttgttgatcaccaccagaagcggggaataggcgtggtgcgtcagagaaaggtacttctgcacttcgaaaaattttgctgaccagacgacgttgatcgggtgttcctgagcgtcgatagtgcgggtttccagcccggtatagacttcggcaaacggcatcgggatcgggttagcgccaaagactttgaatgcggcgatattcatcgggctattgttggtgcgaattttcagccctttcaggtcggcgggggttttaaccggtgcgcgcgagttggtgacatcgcgccagccgttttcccagtaggccagtacttttagtcctttaccttcaagtgaggctttcagatcatcaccgactttgccgtcgagcgttttatgcgcgtgagcggtatcgcggaacaggaaagggacatcaagcaagttcatcactggtgataacccggcaaagttattcgagccggacatttccatatcgatggtgccgccacgtacgccgctgatcatcgcctgcgcgttaccgagggtgctatccggaaacaattttaatttcagctcgcctttggttctctcctgcaataaatcattgaattttttcgccgcaatatgttgcgagtcggtttgtgaggtttcataaccgaaacgtaaagattgcgccgccagagaagatgtgctgaatgcagccaggccagcaatgaataatgcgtaggttacagagcgtaatttcataatattttccttttaattaatccatttcaaagggaggatgatgagatcgggaataaaaacaaatacgactaataatgaatataaaaccaggacgtaagggaaaacgcttctgactgcatcatcgaatttgagttttgccacccctgaaataacgttaagtacattaccgataggcggtgtaattaagccgattgagcagttaatgataaacatgacaccgaaataaatcggatcgattcctgcctctttaactaaaggcattaataccggggtaagaattaataccgtcggcgttaaatccatgaccatgccgacaatcaggatagccaccataatgacgataaacagcagacgcggtgaatcgaccaacggttgcagtaaatcagaaaccatcatcggcagttcagcaatggtaatcagccaggcggaaacttgtgccgaggccaccagaaacataaccactgaggtggttttcgccgcgccaatgagtacatgccaaagtgtggcgaaggtcatttcacggtaaataactgtggcgacaaacagcgcatagaaagcagcaacggccccggcttcggtaggggtaaacagaccggagcgaaacccgccaataatgatgactggaagaaacagcgcccagataccggagacaaaagagtgccagatttcctgcatcgttgctttttgctggcggggtaaattaaggcgactggcctgccaccaccaggtaagcatcagcgttgcgcccatcatcatgccaggggcaatgcccgccataaacagcttactgatggataatccgctggaaacgccgaagataataaacggaatggaagggggaataattggcgcgataatgccgccagaggcaatcagccccgccgcccggttgaccgggtagttggcgctgcgcatcatcggcaccagtagagcggcaacggcggcggtatccgcaacggcagaaccagaaaggctcgccataatcatagctgccagcacgccgacgtagcccagcccgcctggtttatgccccaccagtttcatcggcaggtcaacaatgcgttttgacaagccgcccgcattcatgatttcacccgccagcacaaagaacggaatcgccagcagggagaagctatcggctccgttcaccagcgtttgtgccatgatctggacatcaaacatgtccagccagaacattaacgccgccccgcacaacaacagtgcccaggcaataggcaaaccgatagcaataccacccaacagacagcccagaaaaatcagcacagccatgattaagctccttgcggtggcgacgttagagaattgctacgcgtgatgagttgatataaatgacgcagttcaaagaatgcgataacgaggctggtgggcagacaagcggcatacatcaggccgatgggtaaaccgaggatcggtgaataatcgctccagtcctgaattgtttttagcgttgcgccccaggccagtgcgccacaaataaataagattaaggaatgggtaaccagagcgactcgtcgttgccatgcgggggagagtttctccaccagaaaggtgacctgaacgtgggcgttatccataaaagccacaatcgcgccaataaatgttaaccagacaaataaataacgtgacaattcatctacagataaaatgcttgtctgaaaaccatatcttaaaataatgtttataaacacaatacaggaaagtacggcgagattaatcgccagtattgcttcaagtatttttttcatagctattccttgaggctatgtctgtcataattcaagttgcatgtgcagcaacctaaattattaatatagttagagcaataacattacccagtcgttctggcgtagacgattattcgattaattcagcgccgttaatgcgactttaaccacaatttttcgtatctcagaggctgtttgcaaaatacaacctggtcggtgaacatcctgcggaaagaaaattgcgtagctgcccggtatcatttctataaatgattcatgttcactgtcatgataaaaaataatatcgcgctgctctaatagtgattcgctgactttattatttcccgtatcaatagcaatgccgattttctcttcaccccacgccagaaactgaatatcgatataccgacgatgcacttccggacggttttccaccgcttcgcgtgtggttaaatcgataatttgcgcataaatatttttgccgtcgatttcgacaacgcccggctccagggcgttgaaatcggtagcgcgcagaaaatcgagccccttttcaatggcggcgggcaaacggcacggattgggctgcgcgatatgtccaaaaatcatgacttatctccttataacgcctggattttggcccacacgctgtcatcaacggtaataccgttacggcggttttcggccagcagggtagtaaattcgtggccgggtaagcggatggcctggttttcgtcagcgcgttcagcggtagtaacgtaatccatgatacgttgcagcttggcatcgcgggtgggaccgtcgataagcttgtccacttcaatggcaataaaaatttgtgaaatgccgtattcgtcgctgttgtcctgggtgacttcggcaaccgatgcgccgtcggaaaggagagtagcgatcatatccagcacaatcgacatgccagaacctttccagtagcccatcggcaaaatgcggcgattcttctcgataacgccaggttctttggtcaaattgccctcatcatcaaagccaccatcgaccgggagctgacggcccgccaggcggttaacttctaacatgccgtaagagaacatcgacatcgacatatcgaccatggtgatcggcgtggaaggaatggcgacgatcagcgggttagtgccaatgcgacactcttttgcgccccacggcggcattacggcgatggagttggtccagcaaatgccaatatagcctttttccgccgcctgccagccgtagctgccgccgcgcatccagtggttggcattacgaagtgccaccagaccaataccgtgatcggcagccagttcaatggcgcgatccatcatctttttcgccgtcaggttgccgatcgaacgctgggcatcccactgttcaattgcgccgaggctggttatacgtttgggttgggcatcaggaatgatatcgccgttttccagttgttgaatgaaacgagggaaacgattaacgccgtgagaataaacgccggattcggtggtgcgggcgaacatctctgcacaggcgttagccgtttcgctgtcaacgccgcgtgaaattaagacccgattaaaggctgcttttaactgctcaaatgtcactttcatcccaggcttccttgtttttttgatcgcttttttggcttaaaatttcaatatgcgaaacttgatttcaaatatatcgatcactttttaacaaagcaatctgattgatgaatttcaaaagacataaaaatcaagtggttataaattatctgtcgagatcgtgaactacggcacactttgcgctaccatcaggacgcgacaaaatggggaaagaagtgatgggaaaaaaagagaacgagatggcgcaggaaaaagagcgtccagccggaagccagagtctgtttcgcgggttgatgctgattgagattttgagcaactatccaaacggttgtccgttggcgcatctttcggagctggctggtttaaataagagtaccgtccatcgcttattgcagggattacagtcctgcggctatgtgaccaccgcgcccgccgcagggagttaccgcctgactaccaaatttattgccgtcgggcagaaggcgctgtcttcgctgaatatcattcatatcgccgctccgcatcttgaggcactgaacatcgccactggtgaaaccattaacttctccagccgcgaagacgatcacgctattttgatttataagctggaacccacaaccgggatgctgcgaacccgtgcctatattggccagcatatgccgctctactgttccgcaatgggcaagatctacatggcgtttggtcacccggactacgtgaagtcatactgggaaaaccatcagcatgagatccagccgttaacccgcaataccattaccgagctgcccgcgatgttcgacgaactggcgcacattcgtgaaagcggagcggcgatggacagagaagaaaacgaactcggcgtctcctgtattgctgttccggtgtttaatattcatgggcgggtgccgtacgccgtgtcgatttcgctttcgacatcacgtctgaaacaggtgggggagaaaaatctcctgaaaccactgcgtgaaaccgcgcaggctatttctaatgaactgggatttactgtcagggacgaccagggcgcgatcacataacgctttggacaagtgccaaaactttaacatttccttcgttggatcaaagcagtagggacgcgctctctggcactctgctgttttagtgcaaaggagtgatcatgaaccggtttattattgcggatgcgacgaaatgtatcggttgccgtacctgtgaagtggcttgcgcagtgtcgcatcaggataatcaggattgcgctgcgttgtcaccagacgagtttatttcccgtattcgtgtcattaaagaccacagctggaccacggcagtagcctgtcatcagtgtgaagatgcaccgtgcgcgaatgtctgccctgttgacgcgataagccgcgaacatgggcatattttcgttgaacaaacacgttgcattggctgtaaaagctgtatgctggcttgcccgtttggtgcgatggaggtcgtttcttcgcgcaaaaaggcgagggcgattaagtgcgatctgtgctggcatcgggagacggggccggcctgtgttgaagcctgcccgacaaaggcgttgcagtgcatggatgtcgagaaagtgcagcggcatcggctacggcagcagcctgtttgaaacgttttccggcgtttctcaacgccggaatagtgcgctttgtttatgccagatgcggcgtaaacgccttatccggcctacaaattcttccaaattcaatatattgcagaaatcatgtaggcctgataagcgtagcgcatcaggcaatttttagtgactttcagcccaggctctttctatctcttccgccagaatcttcacccccgcctcaattttctccggctctggtacgtagttcatgcgcatacattgatgcgtatgcggccacggtttatccagtcccgggaagaagttgtgccccggcaccatcagcacgccgcgtgctttcaggcgctggtagagttgctcggtcgtaatgggcaaatccttaaaccatagccagaggaaaatggctccttctggtttatgaattaggcagcgatcttccggtaaatagcggcgaatgatggcgatagtttcctgaacacgctggtagtaaaacggtttgatgactgtttcagacaggcgcagcagatcgttacgcttaatcatttcacacatcatcgccggaccaataccgccaggtgccaggctgataatgccgttcatattggtgatggcagtgatgattttttcattggcgatgataatgccgcagcgggagccaggcagccccagcttggaaagactcatgcacagcacgatattcggattccatagcgggcgcgcttcactgaagatgatacccgggaacgggacgccataagcgttatcaatcaccagcggaatgccgtgttgattcgccagcgcgtcaagcttcagcaactcttcgtcagtaatcacattgcctgttggattcgtcggccgggagacgcaaatcatcccggtttcttcgccaatatgcagatgctcaaaatcgacgtggtatttaaactggccttccggcagcagttcaatattcggacgcgcagagacaaacagatcttcttccagtccggcgtcagcgtagccaatgtattccggtgccagcgggaacagcacttttttgacccgaccatcggcacggcgtccggcaaacagattaaataagtagaaaaacgcgctctggctgccgtttgttagtgcaatattctgtgcttcgatatcccaacccaacttctcgcgcagcattccggcaagcagtgtgagtagctccgttttcccttgtggaccgtcgtaattgcacagtgcatcagtcgctttgccactttccagcatgtcggtcagtagcgtctggaagtagtcctgcatttccgggatctgcgccggattaccgccgccgagcataatcgcgccaggcgtgcgtaaaccgtcgttcagatcttccatcagcagcgtaatgccggagtggcgggtaaatttgtcaccaaaaagggagaatgtcatagcgggatatctgtcgaactctgtagcaaggaaggtaacaataacgctacatttgctggggtgcaaatcggtctgttggagagtgagcggtgctttatcctgcaacgctgattagggctgacattttatcctggttggcggcttcccgaggtactgacgaacgggaagccggaaaagtcactgttgcccagcccagatgaccagcactttatcgtcgccatgctcacgaacaaagccgtagccctgcttcagcgaaagtgtcgtttgtttgcccgcgccaattgcgggatggcgggcgcggaactggctgattttctgccagtgcgcgacgttggcggcagatttaccgctaacatcctgccagttcatatccgaacgtgtaccttgcagcggatcagaacctgtaggaccgaacggacgcgaggattcatcgccataaaagatttgtaccgcgcctggcgctaatagtaataactctgctgctttgtcgcccccttcacggaacagacgggtatcatgcgacgagaggtagctcaacacgttgaaaccctgcaatttctccgccatttgctgccaggtcgtatccatctgcgccagacaatcgactgctttcgccgcctgctcctgataatcgaaattgatcatcgcatcgaagccgtggcgatagtagtcactttgcatcacgccgtggccccaggcttcaccggtcatccagaaaggtttgtcatctaatgctttgtcggggtaagcttttttccattcgcgaagcgcggcgctggcttcggttttcagttgctgccaggcgggcaactcaacatgtttggcggtatcgacccgaaaaccatcaatcccatagtcgcggacccactgacttaaccagtgggttaagtaatcgcgaggtgtaaagccttcgatgactttagcgtgagtatccgttttgtttttatagaacaccggcagaccagaagcggtagttgattcggttttgatatccggcaaaaaggccagcgacatagtgagatcgtcgaatccaggattgtcgtaatcgccgatatccgttctgatccagttttttccccaccatttatcccagcctgttttgtcgctgaaattaatgtaatcgttaaagctatgccaggtttgcccggcggcaggtttccagtcgctccagcgttcacccagcgtttttttcacctcgtcaccagaaagatataacgcgccaaactgatactcctgcatatccgccagcgtggcatagccggtgtggttcatcacgacatcaaagagaatacgaataccgcgctgatgtgcgctatcaaccagcgtccgtagatcggcttcgttgcccatattggcatcaagattcgtccagtcctgtgtgtaataaccgtggtaggcataatgcgggaaatcgccttttgtaccgccgccgacccagccgtgaatttgctcaaatggggcgcttatccataaagcattaacgcccaactgctggaggtaatccagtttgttggtcaggccgcgtaaatcgccgccgtgaaaagtgccaatttccgccataccgtctttatgacgtccgtaactctggtcattactgggatcgccgttttcgaaacgatctgtcagcacaaagtaaaccgtggcgttatgccagtcgaaaggggcaggggcgtcagtttctgcccgttccagcaggagtaaaccgttgctggtagcagcgggttgtaacgttatttgaccgttcttcactatcgcaatttgctggctgtaataatcccgtacggcggctccttccgggaaagtggcgctgacatccagcgtgagcggtaatccatcccatttcgggcattcacggaccaggtttgctaccggttcggcggcgttctggatggaaatcatcaatgttggcgtaccggagcgggtgtctatttgcagcgtatatttgccgtctctgaacaatcgccattgaggcggcgtgttgctacaaggttgcagggaaagcatctgattgagttttatcgcatctgcaggctgccagcactgttggtcaaaatttagcgtgagtggacgcgtacctttgggcaactgcgcgtggctgacaaatgttcccgttccctgttcgctaaaggcagggaaccccggagaagtccagctggcggcaacggcgaagccaggaaggagtgtcagaaaacaggcggcgagtttcatggtggatgagtccttattgctgcgatttcagacagtttgccagcgataagccagacaaaactcatccctgagcggtaagtccacaggatgagaagcaagggtgagcgatctcgcgcaaaaaacggctgaattttgcgataaaccccacattttctgcgatttagcgccaatctgaatcgttaacacgtgacatagtttcagatttggactattccttggggtgctcttgacagctatttttgatatgatttgagattcaactctcaaatttgtgaaaaatataaggtgttggaatgattaaatccgaccaggagacctgatgattttgactcccatacgacgatatggggcgatgattcttatgttactcactctggtgttttcgagtgaggtgttagcgaagacgcacacaacaacagcgagtcaaaagtcccacttaactaaagctagtaataaacaggtaagcagtaaacaagagtattctcgcaatagtgcaaagagtagttcacttcctgatttgcgaaaatacccttccggaacaccaaggaaaaaggcgtttctccggaccgtaatgccttacattaccagccaaaatgcagccattactgcagaacgtaactggctgatttcaaaacagtatcagggccaatggtcacctgctgagcgtgcgcgtctgaaagacatcgccaaacgctacaaggtgaaatggtctggtaatacgcgaaaaatcccgtggaataccttgcttgaacgcgtagacattatccctaccagtatggtggcgacgatggctgcagcagaaagcggttggggaacgtcgaagctggcgcgcaacaataacaatctgttcggcatgaaatgcatgaaaggacgttgtaccaatgcgccgggtaaagtgaaagggtactcacagtttagttctgtcaaagaatcggtgagcgcctatgtcactaacctgaatacgcacccggcttactcttcgttccgtaaatcgcgtgcgcagctgcgtaaagcggatcaggaagtgactgccacagcgatgattcacaagctgaagggctactcgaccaaagggaagagttataataactacctgttcgcaatgtaccaggataaccaacggttaatcgcggcgcatatgtaattgcatttccttgagccttatctgatttgtcggtcggataaggcttttgctcgcatcaggtggctgtgctgagttccctgatgtgacgccgacaattctcatcatcgctacaacatgacctcgctatttacatcgcgatactcttttggcgttgtgtcatatgcttttttaaaaacagagtagaaatattgcagcgatggataaccgcacatttgcgatatctcattgatcgacaaggtggttgaaatcagcagactgcgcgctttctccagcttctcggcatgaatcatggcatggatggtttcacccacctcttctttaaaacgcttctcaagattggagcgcgagatcccgaccgcatccagtacctgatccactttaatccctttacaggcgtgattacgaatgtaatgcatggcctgaataacggcgggatcggtcagcgagcgataatctgttgagcgccgttcaatgacgcgaactggtgggaccaaaattcgctgtagcggcatttcttctttatctaataatcgatgcaacagttttgccgcctgatagcccatttgccgcgcgccctgagcgaccgaagaaagggcgacacgcgacagatagcgggtcagttcttcgttatcgatgccaatcacgcataatttttccggtacgggaatatgtagatgttcacatacttgcagaatatgccgcgctcgggcgtcagtaacggcaataatcccggtttgcggtggcagcgtttgtagccagtctgccagccgattttgcgcgtgttgccagttctctggcgcggtttctaacccctgataaaccactccgcgatacttttcttcagcgacaagctgacgaaatgcatattcgcgctcagtggcccaacgtttgccgcttgattccggaagaccataaaaagcaaagcggttaacgcctttctcttttaaatgcaaaaatgcgctttcaaccagcgcatagttatcggtggcaatgtaatgaacgggtgggtaactttctgcaaggtgatacgagccgccaaccccaacaatggggacgtcgacatcagccagcgcttgctcgatctgtttgtcgtcgaagtcggcaatgacgccatctcctaaccagtccttgattttatcaatgcgggcgcggaaatcttcttcaatgaaaatatcccattctgattgtgacgcctgtaaatattcccctacgccttctactacctgccggtcataggctttattggcattgaacagtaatgtgatgcggtgacgtttagtaaacatggttcttttcctgctgaatcatgcaaaaactcaaaaccggtaatacgtaaccggctttgagaaaatttttatcaaaatcaagaacggcgtttggttgcggagtccatccatactgccagcaacagaatcgcacctttaacgatatactgccagaaggtcggtacatccatcatactcatgccgttatccagtgaagccatgataaatgcccccattactgctccggcaacgcttcccactccgccagccaggctggtgccgccaatcacgcatgctgcaattgcgtccagttcggcgatatttcccgcagaaggtgaaccagcgccaagtcgagaactaaggattaatccggcgatggctaccattaatccgttaatcgcgaacacggcaagtttggtgcgttcaacgttaatcccggagagacgtgctgcttccagattgccgccgatggcataaatgcgtcgtccaaatgccgtccgcgttgccataaacattccgccgagtaacagcaacgtcagcagcagaacaggagtgggaacgccacggtaatcattcaacagccagattgcgcctaatacgatgatagcggttaaagcctggcgaccgactactgcggtagaggccggagactgcaaacccaaagcctgacggcgcattcttccgcgccattgccaaccaacaaaagccattaagccaagcgcgccaatgatgaagccagtgctggcaggtagatagctttgcccaatttgtgacatcgcggcgctggtgggggaaacagtcgtgccgttggtgatgccaatgagtatgccgcgaaatgccaacatgcccgcgagggtgacaataaatgaagggactttgcggtacgcgacccaccatccgttccaggcaccgagaagcagtcccagaaccaacgtcacaatgatggtaagtggcaaaggccagcctaaccagacgtcacaaatcgccgcgacgccacctaatagccccatcattgagccgacggaaaggtcgatttcagcagaaattatgacgaacaccattcctaccgcgaggatgccggtaatcgcggtctggcgtaacaggttggagacgttacgggcgcttaagtaggcaccatcggtggtccaggtaaagaacagcatgattgcgatgatagctgcaatcatcacgaagacctgcaaattcagtgaattcagcccggaaaagccaccggatgtcggtacggccaatttcacttcagacggattgcttttcgacatgatgttcgctcctcaatgcggcttccatcacctgctcctgagtcaggttatgatttatcaggttggcttttagtttcccttcatgcatcaccagtacccgatcgctaaggccgagcacttcaggtaattcggaagagatgacaataacggcaataccctgctggacgagttggttaattaatttgtagatctcgtatttcgcgccaatatcgatacccctggtaggttcatcaagaatgaggatgcgcgggttaagtaacagacagcgagcgaggatcgctttttgctgattgccgccgctcaaacgtccaatagcaaggtcgggggacgacgttttaactttgagttgctgaattgattccagaatacatttttgctctgccgcgtcatcaagctggctaatgccaccggtaaatttattgagtgcggcgagggtaatatttttaccaaccgccattaccggaacgatgccgtcgcgctttctgtcttcgggtaccatcgcaatcccctgggcgatggcttgctgacagttacgaatatctacctgtttgccatcaatataaatttttccttcccattgtccgggccacacgccaaacaggcactgaatggtctcggtacgtccggcaccaacgagtccggcaatacccagtatttcgccacgtttcagggaaaacgagacatcattaactcgtttaatatgacgattgaccggatgccatgccgtcagatgttcaatacgtaatatttcatctccggtggtatgtggttcattagggtaaagcgcggttaactctcgcccgaccatcatggtgataatatcgtcttcactcattccggcagcatcacgcgtaccaatgtgctgtccgtcgcgaataacgcaaatcgtatcggaaatcgctttgacttcgttgagtttgtgcgaaatataaatacaggcgataccgtgctgttgtagatcgcgaataatatccagtaaaaccgacgtttcctgctcagttaatgaggctgtcggttcatcgagaattaacaagcgcacctgtttattaagtgccttggcaatttcaaccagttgttgttgcccaagccctaaatcgccaacgcgggtatcaggtgaaatggataaactgacctgtgcgagcagcttctgacagcgtagcgtcatcaggtcataatccataatgccattgtgggttatttcgttacccaggaagatattttccagcacggtcaattctttcaccagggccaattcctggtgaatgatggcgatacctttgcgttcggtatcgcggatgtgactcgcctgaatctcttctcccgcaaaaataatttcgccttcgtaggagccatggggataaataccacacagcactttcatcagcgttgatttaccagacccattttccccacaaagtgagacgatttcgccagcattcaaccgcaagcagacgttatcaatcgccttcacactgccgaaggttttggtaatattcttcatttcaagtagataaggcataacgactccacctaagccaattcattcacgcggcatggagagaaatcacgcccccgctccgcgccggggcgtaacgcttacagctcgctctctttgtggaatccgtctttaactaccgtgtctttgatgttgtttttattcacatcgatcggtgtcaggaggcgggagggcacatctttcaggccattattcagtgtggtatctgcttttggttcctgaccattgcccaactcaacggcaatttctgcggcagtatttgccaacaacgtaataggtttatacaccgtcatagtttgcgtaccggcagcaatacgtttaatacctgcgagatccgcatcctggccggaaattgctactttccctgataaaccttgcgcgcttaatgcctgaattgccccacctgcggtggcatcgtttgaggcaactacagcatcaattttgttattattggcggttagcgcgttttccataattttcaatgcgttttccggtaaccagccatcaacccattggtcaccaacgactttaatttttccggaatcaacgtaaggttttaacactttcatttgtccggcgcggaacagcttggcgttgttatctaccggcgagccgcccatcaggaagtaattaccttgcggaacaatatcgaccagggcttttgcctgcagttcaccgactttttcgttatcgaaagaaatataaaaatcgatatccgcatcgttaatcatacgatcgtaagctaatactttaataccttcttgtttggcttcttttacaacgttacttaatacctgaccgttatacggaataatgacaagaacatcgacaccccggttaatcatgttttcaatctgcgacatttgtgtttcttcattgccatttgcagactgtacaaatactttcgcgccgagagattctgcctttttcacaaaaatatctcgatctttttgccagcgttcaagacggagatcatcaatcgccatacctattttgacttctttggcgtgtgccgcaacgttggtaagcagaagtgaggtgcaaagggtgagtagaatgttctttattttcatggtgtagggccttctgtagttagaggacagctttaataagtaacaatcaccgcgataaacgtaaccaatttttagcaactaaacaggggaaaacaattacagatttttatctttcgattacgatttttggtttatttcttgatttatgaccgagatcttacttttgttgcgcaattgtacttattgcatttttatcttcgaggaattacccagtttcatcatcccattttattttgcgagcgagcgcacacttgtgaattatctcaatagcagtgtgaaataacataattgagcaactgaaagggagtgcccaatattacgacatcatccatcacccgcggcattacctgattatggagttcaatatgcaagcctattttgaccagctcgatcgcgttcgttatgaaggctcaaaatcctcaaacccgttagcattccgtcactacaatcccgacgaactggtgttgggtaagcgtatggaagagcacttgcgttttgccgcctgctactggcacaccttctgctggaacggggcggacatgtttggtgtgggggcgtttaatcgtccgtggcagcagcctggtgaggcactggcgttggcgaagcgtaaagcagatgtcgcatttgagtttttccacaagttacatgtgccattttattgcttccacgatgtggatgtttcccctgagggcgcgtcgttaaaagagtacatcaataattttgcgcaaatggttgatgtcctggcagccaagcaagaagagagcggcgtgaagctgctgtggggaaccgctaactgctttacaaaccctcgctatggcgcgggtgcggcgacgaacccagatcctgaagtcttcagctgggcggcaacgcaagttgttacagcgatggaagcaacccataaattgggcggtgaaaactatgtcctgtggggtggtcgtgaaggttacgaaacgctgttaaataccgacttgcgtcaggagcgtgaacaactgggccgctttatgcagatggtggttgagcataaacataaaatcggcttccagggcacgttgcttatcgaaccgaaaccgcaagaaccgactaaacatcaatatgattacgatgccgcgacggtctatggcttcctgaaacagtttggtctggaaaaagagattaaactgaacattgaagctaaccacgcgacgctggcaggtcactctttccatcatgaaatagccaccgccattgcgcttggcctgttcggttctgtcgacgccaaccgtggcgatgcgcaactgggctgggacaccgaccagttcccgaacagtgtggaagagaatgcgctggtgatgtatgaaattctcaaagcaggcggtttcaccaccggtggtctgaacttcgatgccaaagtacgtcgtcaaagtactgataaatatgatctgttttacggtcatatcggcgcgatggatacgatggcactggcgctgaaaattgcagcgcgcatgattgaagatggcgagctggataaacgcatcgcgcagcgttattccggctggaatagcgaattgggccagcaaatcctgaaaggccaaatgtcactggcagatttagccaaatatgctcaggaacataatttgtctccggtgcatcagagtggtcgccaggagcaactggaaaatctggtaaatcattatctgttcgacaaataacggctaactgtgcagtccgttggcccggttatcggtagcgataccgggcatttttttaaggaacgatcgatatgtatatcgggatagatcttggcacctcgggcgtaaaagttattttgctcaacgagcagggtgaggtggttgcttcgcaaacggaaaagctgaccgtttcgcgcccgcatccactctggtcggaacaagacccggaacagtggtggcaggcaactgatcgcgcaatgaaagctctgggcgatcagcattctctgcaggacgttaaagcattgggtattgccggccagatgcatggagcaaccttactggatgctcaacaacgggtattgcgccctgccattttgtggaacgacgggcgctgtgcgcaagagtgcactttgctggaagcgagagttccgcaatcacgagtgattaccggcaacctgatgatgcccggatttactgcgcctaaattgctatgggttcagcggcatgagccggagatattccgtcaaatcgacaaagtattattaccgaaagattacttgcgtctgcgtatgacgggggagtttgccagcgatatgtctgacgcagctggcaccatgtggctggatgtcgcaaagcgtgactggagtgacgtcatgctgcaggcttgcgacttatctcgtgaccagatgcccgcattatacgaaggcagcgaaattactggtgctttgttacctgaagttgcgaaagcgtggggtatggcgacggtgccagttgtcgcaggcggtggcgacaatgcagctggtgcagttggtgtgggaatggttgatgctaatcaggcaatgttatcgctggggacgtcgggggtctattttgctgtcagcgaagggttcttaagcaagtcagaaagcgctgtacacagcttttgccatgcgctaccgcagcgttggcatttaatgtctgtaatgctgagtgcagcatcgtgtctggattgggtcgcgaaattaaccggcctgtgcaatgtcccagctttaatcgccgcagctcaacaggctgatgaaagtgccgagccagtttggtttctgccttatctttccggcgagcgtacaccacacaataatccccaggcgaagggggttttctttggtttgactcatcaacatggccccaatgaactggcgcgagcagtgctggaaggcgtgggttatgcgctggcagatggcatggatgtcgtgcatgcctgcggcattaaaccgcaaagtgttacgttgattggtggcggggcgcgtagtgagtactggcgtcagatgctggcggatatcagcggtcagcagctcgattaccgtacggggggggatgtggggccagcactgggcgcagcaaggctggcgcagattgcggcgaatccagagaaatcgctcattgagttgttgccgcagctaccgttagaacagtcgcatctaccagatgcgcagcgttatgccgcttatcagccacgacgtgaaacgttccgtcgcctctatcagcaacttctgccattaatggcgtaaacgttatcccctgcctgaccgggtgggggataattcacatctatatatctcactaattaattaatatttagtatgaatttattctgaaaatcatttgttaatggcatttttcagttttgtctttcgttggttactcgtaatgtatcgctggtagatatggagatcgttatgaaaacctcaaaaactgtggcaaaactattatttgttgtcggggcgctggtttatctggttgggctatggatctcatgcccattgctaagtggaaaaggctattttcttggcgtgttaatgacagcaacttttggtaactatgcatatcttcgcgcagaaaaactcgggcaactggataatttttttacccatatctgccagttagttgcgttaatcactatcggtctcttgtttatcggtgttttaaatgcacctatcaatgcttatgaaatggtgatctaccccatcgccttttttgtctgcttgtttggtcaaatgcgtttgtttcgctcggtatgagcaacataaagctcttacacattcaggaatgaaaggaatactgtgatggacaacaaaatatcaacctattcaccggcctttagtattgtgtcatggatagctctcgttggtggtatcgttacctatctgttagggctatggaatgcagagatgcagttaaatgaaaaagggtattattttgccgtactggtgttaggactgttttctgctgcgtcttatcaaaagaccgttcgggacaagtatgaaggcataccgaccacttccatttattatatgacctgcctgactgtctttattatctctgttgcattactgatggtaggtctgtggaatgcgacattattactcagtgaaaaaggtttttatggactggctttcttcttaagcttgtttggtgcagtagcggtgcagaagaatattcgtgatgccggaataaacccgccaaaagaaacacaggttacccaggaagaatacagcgaataattcacgtaagcccggtcagtccaatgtgaacgggcttttacttaactcactaatctgtttctgtcgattcgttgtaccagcatagaaagtaacaaactcgctgccaacgtcgcgcaaaagatccaaataatatccagtattggccaatttttaagctcaattccccgggtgcgcagcgcatggataatcaaggcgtggaatccgtatatacccaatgaatggcgggagattaagccaagtccgcgaatggtacgcgtatccagcgtgtttttaaccagagtcaatagcgcgattgcgcagataaaaaccatcggcccacagtaaagataccaggtatcggcaaaatttccgcgccactgcaattcatataatgtcccgcgagagataataaaaacccccgtcgcaaacagcgcggcgctcacccacgacagtgctttatgctgtgtgtccatcatccctatagcgcggcccaacatgccatacagaatgtagtaaaaagtatcgccattgatatataagttaattggcagccattcaaaaccgtcaattttctgcggcactgtgtttgggttagcgataatgccaatcaccaccattagcaccagcaacatttttccgccgacgttcttcacctgaatcagcggtgaaaccagataaatcaccgcaatcgcgaagaaaaaccacaagtggtaaaacactggcttttgcagcaggtttttcagcgctaactccatattgatggaggtaaacagcgcaatgtagagcagtgcgattgcgctataaaaaatcaggcataagccgatacgcaagaaatggcgcggctgggcgctgcgttcgccaaaaaagagatagccggatatcatgaaaaatagcggcacgctgacacgagaggcagaattcagaacattggcgatatcccaggtgacggggctaacactatgagcattggtcacataccaggtagtggtgtgaatcatcaccaccattaaacacgctatccctcgcaggttatcaatccagtaaattttgggctgcatctgtgtctctgtatctggttaaaaaaagtctgactgataaatcattcagttggcgcactggaataatctgagttttatcactacagcttatagaggcttaaggaaattcgtaagatatcagccactataccgatataaataataagactcacctgcaaaccagacggtaatttaatgatgatgaacgctttctttccggcaatggcgcttatggtgctagtgggttgttctacaccgtcacccgtgcagaaagcacaacgggtaaaggttgatcctctgcgttcgttgaatatggaagcgttatgcaaggatcaggcggcaaaacgttataacaccggcgagcaaaaaatcgacgtcaccgccttcgaacagttccagggaagctatgaaatgcgcggttataccttccgtaaagagcagtttgtctgttcttttgacgcagatggccattttttgcatctttccatgcgttaagccctgctttttcccgtttcgtactgtatatcttccatccagcgggtatactgatcccttcctttaaatccacacgtatccagcacgaaataatatgcaaaagtttgataccaggaccttccagggcttgatcctgaccttacaggattactgggctcgccagggctgcaccattgttcaaccattggacatggaagtcggcgcgggaacctctcacccaatgacctgtctgcgcgcgctggggccagaaccgatggcggctgcttatgttcagccttctcgtcgcccgaccgatggtcgctacggcgaaaaccccaaccgtttacagcactactatcagttccaggtggtcattaagccatcgccggacaatattcaggagctgtacctcggttctctgaaagagctgggcatggacccgactattcacgacatccgtttcgtggaagataactgggaaaacccgactctgggtgcctggggactgggctgggaagtgtggctaaacggcatggaagtgacgcagttcacttacttccagcaggttggtggtctggagtgtaaaccggttaccggcgagatcacctacggtctggaacgtctggccatgtacattcagggcgtagacagcgtttacgacctggtctggagcgacggcccgctgggtaaaaccacctacggcgacgtgttccatcagaacgaagtggagcagtccacttacaacttcgaatacgcggatgtggacttcctgttcacctgctttgagcagtacgagaaagaagcgcagcagctgctggcgctggaaaatccgctgccgctgccagcctacgagcgtattctgaaagccgcccacagcttcaacctgctggatgcgcgtaaagccatctccgtcaccgagcgtcagcgctacattctgcgcattcgcaccctgaccaaagcagtggcagaagcatactacgcttcccgtgaagccctcggcttcccgatgtgcaacaaagataagtaagaggcggctatgtctgagaaaacttttctggtggaaatcggcactgaagagctgccaccaaaagcactgcgcagcctggctgagtcctttgctgcgaattttactgcggagctggataacgctggcctcgcacacggcaccgttcaatggtttgctgctccgcgtcgtctggcgctgaaagtagctaacctggcggaagcgcaaccggatcgtgaaatcgaaaaacgcggcccggcgattgcccaggcgttcgacgctgaaggcaaaccgagcaaagcggcagaaggttgggcgcgtggttgcggtattaccgttgaccaggctgagcgtctgactaccgataaaggcgaatggctgctgtatcgcgcccatgtgaagggcgaaagcaccgaagcactgctgccgaatatggttgcgacttctctggcgaaactgccgatcccgaaactgatgcgttggggcgcaagcgacgtgcacttcgtgcgtccggtgcacaccgtgaccctgctgctgggcgacaaagtcattccggcaaccattctgggcattcagtccgatcgcgtgattcgcggccaccgctttatgggcgaaccggaattcaccatcgacaacgccgatcagtatccggaaattctgcgtgagcgcgggaaagtcatcgccgattacgaagaacgtaaagcgaagattaaagccgatgccgaagaagcagcgcgtaagattggcggtaacgctgacttaagcgaaagcctgctggaagaagtggcttcgctggtggagtggccggtcgttctgaccgcaaaattcgaagagaaattcctcgcggtgccggctgaagccctggtttacaccatgaaaggtgaccagaaatacttcccggtgtatgcgaacgatggcaaactgctgccgaacttcatcttcgttgccaacatcgaatcgaaagatccgcagcaaattatctctggtaacgagaaagtcgttcgtccacgtctggcggatgccgagttcttcttcaataccgaccgtaaaaaacgtctggaagataacctgccgcgcctgcaaaccgtgctgttccagcaacagctgggtacgctgcgcgacaaaactgaccgcatccaggcgctggctggctggattgctgaacagattggcgctgacgttaaccacgcaacccgtgcgggcctgctgtctaagtgtgacctgatgaccaacatggtcttcgagttcaccgacacccagggcgttatggggatgcactatgcgcgtcacgatggcgaagcggaagatgtcgcggtggcgctgaatgagcagtatcagccgcgctttgccggtgatgacctgccgtctaacccggtagcctgtgcgctggcgattgctgacaagatggatactctggcgggtatcttcggtatcggccagcatccgaaaggcgacaaagacccgtttgcgctgcgtcgtgccgcacttggcgtgctgcgaattatcgttgagaagaacctcaaccttgatctgcaaacgctgaccgaagaagcagtgcgtctgtatggcgataagctgactaacgccaacgtggttgatgatgttatcgactttatgctcggtcgcttccgcgcctggtatcaggacgaaggttacaccgttgacaccatccaggcggtactggcgcgtcgtccgactcgtccggctgatttcgatgcccgcatgaaagcggtatcgcatttccgtaccctggatgcagctgctgcactggcggcggcgaacaaacgtgtatctaacattctggcgaaatctgacgaagtgctgagcgaccgcgtgaatgcctctaccctgaaagagccggaagaaattaaactggcgatgcaggttgtggtgctacgtgacaagctggagccgtactttgcggaaggtcgttaccaggatgcgctggtcgaactggcagagctgcgtgagccggttgatgctttcttcgataaagtgatggtcatggttgatgacaaagaattgcgtctcaaccgtctgaccatgctggagaaactgcgcgaactgttcctgcgcgttgcggatatttcgctgttgcagtaataacgccgttattaaaaagcctgccatctggcaggctttttttattatcgctaaataatacagcaacctttaataatcttctgctgaataaagattatctcatatattaattttatgaggtttttttaggattatatcaaggagaagaaacaaacttattaagctagaatagccacgggtgcttgagactgtttgtctcaggtattcaccgaaaggcagacagagaaaagccccacctgactataaatcaaagtgaggctaccctatgcctgaacaccataaggttagcctcttactcgttggaaatcaacacagggggctgggaatgccgcagaaatatagattactttctttaatagtgatttgtttcacgcttttatttttcacctggatgataagagattcactgtgtgaattgcatattaaacaggggagttatgagctggcggcatttttagcctgcaatttaaaagagtaagagtcttcggcgggaagttattcccgcctttcttacggcgttgcgcattctcattgcacccaaatttatttttcacaaaaataatactagattttattacgcgatcgattatttatttcctgaaaaacaaataaaaaaatccccgccaaatggcagggatcttagattctgtgcttttaagcagagattacaggctggttacgttaccagctgccgggcctttagcgccgctttcgatggtgaaggacactttctgaccttcgtccagagatttgtaaccatcgttctggatagcagagaagtgtacgaacacgtctttagagccatcgtcaggagtgatgaagccgaagcctttgtcagcgttgaaccattttacgataccagtcattttaccggacatagtgtattacctttaataattaagtgtgcctttcggcgatatggcgtgctttacagattttgaagcgttaaaggaatgtgcactacgaggggtatcaacgataactcttgaagggacttgccttactacactgctttaatggtctgtacgtcaaaccgttgatgtgcattaagccacgcattggcgggtgatgcaacaattatttttcatatttatgattaatcggttggaaaacggtcctgtcatcaggaccgtaaacagcaataaagtggataaaagtctattccatcaactgcttacttaatgccgggttggcttgaatcaaacgcatcaattttagttcggcacttgaaggcttcacgcgtctggattcccattcctttaccatggcgactgatacgcccaaaacccgggcgaaatcatcgatttttaaccctgtcccttttcgtaactgctcaatttcggtacaggacgttgttctgtgcgtcagggtaattttctgcgtttcatctttaaaaacaatctgttccaggctgctcaacagctcatgcattggatctttatattccattgaaaactcctcaaatcacactgcgggatcgtgaattgcatcgaagctcattaagaatagtcgggaaaagcagacacagcggggtgaagtcagggcatgctctggctatgattcgattcagccagtcatttagcgtgacttatagccacctaacgatctgataaatgccgatatatctcttaccactcctggttgtaaagatttcgaaaatctaaccttctgcgaaggcgtaaatctctggctacaaaaaaagcaacggcactatcattttttaacaatgaaacaacaaattaaccttgtttcattttctccatgattttaccaggaagattacgtagaaagggtatcctgcaagcctgtcctggactatccttgtcacgtcagacacgcgtgtgtcgttgtgcgctttttttgggtgaaaggagtaagaaaatggcgacaggaaagtcctgctctcgctggtttgcgcctcttgcggcgttattaatggtagttagcctgagtgggtgttttgataaagaaggcgatcagcgtaaagcgtttatcgacttcctgcagaatacagtgatgcgtagcggtgaacgtctaccaaccctgactgccgatcagaaaaaacagtttggtccttttgtctctgattacgcgattctgtatggttattttcagcaggtgaatcaggcgatggattccggtctgcgcccggtcgtagacagcgttaacgcaattcgcgtaccgcaggattacgttacgcaaagcggtccgctgcgtgaaatgaacggttcgctgggtgtgctggcgcaacaactgcaaaatgcgaagttgcaggccgatgctgcgcactctgcgctaaaacagaccgatgatttgaaaccggtctttgatcaggcattcaccaaagtggtaacaacgccagctgatgcattgcaaccgttgattccggctgcacaaactttcacgcaacaactggtgatggttggagactacattgctcaacaaggtactcaggtgagctttgtcgcaaatggcatccagttcccgacttcacagcaggcaagtgaatataacaaactgattgcgccattaccggcacaacatcaggcgtttaatcaggcctggactacagcagttactgcaacccaataaagagtaaaagcccgagcgattatcgggctttacttcacgcagtcgcggcttagtccgcgacgtgcggattcacacagttcttctcaacctttccttgtaacgcatcaatcaaattatccacggcacaggcggccatgccataacgcgtctcatgggtggcagatccaatatgcggtactgcgacgacgttggccattgagagcaacggcgaatctacggacagtggctcttgttcgaagacatccagcccggcggcgtgaatttcgcctttctgcaatgcagcaatcagtgcattttcatcaaccaccgggccacgtccggcattaatgaaaatggcggaggatttcattttggcgaattgttctgcgccaaacagatgatgcgtctcatcagttaacggcaggatcaggcaaacgaaatctgactcttgtaacagagtatccaaatcgcagtagcgggcgttgaagcgttcttctgcttctttatggtggcggcgcgcgttatagaggatgggcatgttgaagccaaagtgcgcacgttgtgccagcgccataccgatccgtcccatcccgacaatgcccagtgttttatggtgaacgtcagtgccgtaccagtccgggcctatgctcgcggtccattcgcctgcttttacccgttctgctacctccacaacccgacgagcggtagacaacaccagcgccatcagcgtatcggcgacggtttctgttaatacggttggcgtgtgcatcagcagaatttttcgggcggtaagcgcatcgacatcaaaattgtcatagccgacggagatcgttgatgtggcacgcagtttcggcattttttccagcaatgcggcatcaacattctcgtttgaacccagtaaaccttcagcttcggcaaaaattgctgcattttgttcgacggtttgtgggctgaggtttgccacctggtgaacggtgaaatgctcttgcaggcgttgcagtaaatcatcaggtaaggctttgtagaggataacggacggcttcatgcttctctccattcactgataaggcgatcaccttagcctgaaatatgatgaaggaaaactgaagaatgccaggtgatttctgcatcacctggcatgaaagggattacagcgggcttaaggtaatttctacacggcggttttgcgccttaccttctgcggtgctgttgctggcgattgggttagccgggccaaggccctgagtacggatgcggctggcgtccacgccctgggtgatcaacgcgctggcaacggaatccgcacgttgctgggagagacgcatgttcaggtcgtgaccacccgtgctgtcggtataaccaatcacgttaaccgccgttttcggatactctttcagcaccattgccacgccggtcagggtgttagcgcccgcaggtttcagggtcgcgctgctgctgtcgaaggtcacattgttcggcatattgaggataatgttatccccgctgcgggttacgctaacaccagtgccgcgcattttgtcacgcagcttcgcttcctgcacatccatgtaataacccacgccgccgcccagagctgcgcctgctgctgcgccaatcagcgcgcctttaccgcgatctttcttcgaagaagagagcgcaccaatacccgcgcccacgagagagcccagacctgcgccgatagcagatttacctgcttcgcgttcgccggtgtaagggttagttgtgcagccagataccgccagagcgccactcactacggcggcaataagataaacacgtttcttcattgttaatccttaataacctttttattctttgccacgggttccgtggcgggagattatgccgcgtgaacatgaagattattcctgggaatactcggaaatttgtaagtaatatttaactgctcaatacatctaacctttcaggagttttcggtttggccaactcatcctcacgatattccgttctgactgccgcccattgggggcccatgctggttgaaaccgacggcgaaaccgtgtttagctcgcatggcgcgttagccacaggaatggaaaactccttgcagagcgcggttcgcgaccaggttcacagcaatacacgggtacgatttccaatggtgcgcaaaggctttctcgcgtcaccggaaaacccgcaaggcattcgtgggcaggatgaatttgttcgcgtgagttgggatgaggcgctggatcttattcaccaacaacataaacgcattcgtgaggcttatggtccggcatcgatttttgctggttcctacggctggcgttcaaacggcgtgctgcataaggcctcgacattattacaacgctatatggcgctggcaggcggttatatcgggcatctgggggattattcgaccggtgcggcacaggcgatcatgccgtatgtcgtgggtggcagcgaagtttatcaacagcaaaccagttggccgctggtgctggaacatagcgatgtcgtggtgttgtggagtgctaacccactcaatacgctgaaaattgcgtggaatgcatctgatgagcaggggctttcttacttttccgcactgcgtgacagcgggaaaaagctgatctgtattgatccaatgcgatcggaaaccgtcgatttctttggcgataaaatggagtgggtggcaccgcacatgggcaccgatgttgcgctgatgctggggatcgcccatacgctggtggaaaatggttggcacgacgaagcgtttctgacgcgttgcaccacaggttatgccgtcttcgcctcttatttgctgggcgagagtgacggaatagcgaaaaacgccgaatgggcggcagagatttgtggggttaacgcagcgaaaatccgcgagctggcggctcttttccaccaaaacacgaccatgctgatggctggctggggaatgcagcgccaacagtttggtgagcaaaaacactggatgatcgtcacgctggcggcaatgttggggcaaatcggcacacccggcggcggttttggtctttcttatcattttgccaatggtggtaaccccacgcggcgttctgcggtgctctcttccatgcagggcagcttgccgggtggctgcgatgcggtggataaaatccctgttgcccgcattgttgaagcactggaaaaccctggtggcgcatatcaacacaacggtatgaaccgacatttcccggatattcgttttatctggtgggcgggcggtgccaactttactcatcatcaggataccaatcgtctgatccgtgcctggcaaaaaccggagctggtggtgatctctgaatgcttctggacggcggcggcgaaacacgcggatatcgttctgcctgcgactacctcttttgagcgtaatgatctcaccatgaccggtgattacagtaatcagcatctggtgccaatgaagcaagtggtgccgccacgctatgaagcgcgtaatgattttgatgtttttgccgagttgagtgaacgttgggagaagggcggctatgcgcggtttacggaaggaaaaagtcagctgcaatggctggaaacgttttataacgttgcccggcagcgcggggcaagccagcaggttgaattgccgccatttgctgagttctggcaagccaaccagttaattgagatgccggaaaacccggacagcgagcggtttattcgcttcgctgatttttgccgcgatccgctggcgcatccgttaaaaaccgccagcggcaagattgaaatcttctcacagcgtattgccgattacggttacccggattgccctgggcatccaatgtggctggagccggacgaatggcagggcaatgccgaaccagaacagttgcaggtactttctgcccatccggcgcaccgcctgcacagccagctgaattacagttctctgcgcgaattgtacgcggtagcaaaccgtgagcctgtcaccattcatcctgacgatgctcaggcgcgcggcataaccgaaggggatatggtgcgggtgtggaactcccgtgggcagatccttgccggagcggtcattagcgagggaattaaacctggcgtgatttgcattcacgaaggggcatggccggatctggatttaaccgctgacggtatttgtaaaaacggcgcagtgaacgtgctgaccaaagatctccccagctcgcggctggggaatggctgtgcgggtaatacggcgctggcatggctggaaaaatacaacggtccggaactgacacttacagcgtttgaaccaccggccagctcataatccaggtgggtagttgggtttcatcctgccatgcgcaatcgacaatgtgaaaaccctgcgcacggtaaaaatctatcgccggttgatttttttgataaacctccagcatcagatggggatagcgctgctgcacatactgcatcagcgccttaccaataccgcgtctgacggccttcggtgcgacaaacattgctgccagaaatcggccttccataatgctgacaaaaccgagaagcttaccgtcctcttcccagacccagttttgcgcgttggcaagataggcatcccgcaccagcggaatgcagtcacgccagtaattcgcttttataaagggatgcccccaggttgtactttccagccacagttcgaggatcgcggggagttctgaacgttgcgcttcccgaatcatggtttatttcccggatagcaacagcagccaaccacatgatcattcaccagcccacatgcctgcataaaggagtaacagattgtggtgccgacaaacttaaaaccacgttttttcagtgccttagatagggcgtcggaggcggacgtagatgtgggaatttcgctcaacgttgtggcttgtgtcacctgtggctgatgatttacaaacgaccagacaaagtcggcaaacggttcgccgttctgttccatttgcaggtacgcccgcgcattaccaataattgcctgaattttccctcgatggcggataatcccggcgtcctgtaccagtctttcgacatcctcttcctgcattgctgcgaccttcaccggatcgaactgatgaaagcaggcgcgatagttttcgcgttttttgaggacggtgatccacgataacccagcctgctgcccttcaaggcagatcatttcgaacagttttttactgtcagtttcaggcacgccccattcattatcatggtaggcaatataaagcgggtcctgactcacccagccgcaacgttccatactttccctcgctatgtacccgatcgtaaaaatttcagccgcttttcttgacgcatcggtgaaaaagtcaatatttaatacagggctactatgcccgatatccttcatgcaatgacaataatattgccgaattcggctcttccctggagtcgtgttaatgatcataaaaaaaagcggtggtcgctggcagctaagcctgctggcgagcgtggtaatcagtgccttttttctcaacacagcttacgcctggcaacaagaatatatcgttgatacgcaacccggacattccacagagcgttacacctgggatagtgatcatcaacctgattacaacgatattttgtcgcaacgtattcaaagtagccaaagggcgctgggactggaagtcaatctggcggaagaaactcctgtggatgtgaccagcagtatgagtatgggctggaattttcctttatatgaacaggttacaaccggcccggtcgcggcattacattacgatggcacaaccacctcgatgtataacgagtttggcgacagtactaccacgctgaccgatccgttatggcatgccagcgtgagtagcttaggctggcgtgttgactcccggcttggcgatctccgaccctgggcgcaaatcagctataaccagcaatttggcgagaatatctggaaggcgcaatcaggcctgagccggatgacggcgacaaaccagaacggcaactggctggatgtcaccgtaggcgctgatatgttgctcaatcaaaatattgccgcctatgccgcgctaactcaggcagaaaataccactaataatagcgactatctgtatacgatgggggttagcgccagattttaacgtaacagtcacaattgaaaccattgaataacaacagttgtggcgatagtgggtgctaacttaccaaataataaatttggtgaataattgtcgcgtcattcattcctgaactaaggcatttcattccgttctgatggcatttcatgccgtttttccccaggcataaaatgcacttcgttatggttgtcggcagagatttttcctttttattactgcaggaatactgccatgacaccttcaaattatcagcgtacccgctggctgacactcatcggtacaatcattacccagtttgcgctggggtcggtttatacctggagcctgtttaatggcgcgctttccgccaagctggatgcgccggtaagccaggtcgctttctctttcggcttgttaagtctggggctggcaatttcatcttctgttgcgggcaaattacaggaacgttttggcgttaaacgcgtcaccatggcttccggcattttgctgggattaggcttcttcctgaccgcgcattctgacaacctgatgatgctgtggttaagcgccggtgtgctggtcggtctggcggatggcgcgggttacctgctgacgctctctaactgcgtgaagtggttcccggagcgtaaaggtctgatatccgcgttcgctatcggttcttatggtctgggtagcctgggtttcaaatttatcgacacgcagctgctggaaacggtgggtctggaaaaaacctttgtgatttggggagcgattgcgctggtgatgattgttttcggcgcaacgttaatgaaagacgcaccaaaacaggaagtgaaaaccagcaatggtgtggtggagaaagattacacgctggcagagtcgatgcgtaaaccgcagtactggatgttagcggtaatgttcctgactgcctgcatgagcggcctgtacgtgattggggtagcgaaagatatcgcccaaagtctggcacaccttgatgtggtttccgcagccaatgcagtaacggttatttccatcgccaacctttcaggtcgtctggtgctggggatactgtctgacaaaattgcccgtatccgtgttatcaccattggtcaggtgatttcgctggtgggtatggcggccctgctgtttgcaccattaaatgcagtgacgttctttgcagcgattgcctgcgtggcatttaactttggcggcactattaccgtctttccgtcactggtcagtgagttcttcggcctcaataacctggcgaaaaactacggtgtgatttacctcggtttcggtatcggtagcatttttggttcgattatcgcctcactgtttggcggtttctatgtgaccttctacgtgattttcgccctgctgattctgtcattggcgctttctacgacgattcgtcagccagagcagaaaatgttgcgtgaggcgcatggctccctttaatgctcagccgcgagctactgggcttcagcttccgtgtgcatcaaacgcatcaacgaaatgtataaacaatgactcgtaaaatttgggccagttaactggccctttttactgctttttgtaacgctaaagtctcttttcaaacttgcatttttgtaaatttgtgcttcatgcacactctttccccacactttttcgctttgctgtggtctacttattcgcgcgtgtagattttacttatctgactacctccgcacttttcccctgccgggcctgaaaagccgctaagcagggtgttatcacctgtttgtccagggtttgtttgcatgagatacatcaaatcgattacacagcagaagctgagctttttgcttgcaatctatattggcctttttatgaatggcgcggttttttatcgccgcttcggcagctatgcgcacgattttaccgtctggaaaggcgtttctgctgttgttgaactggccgccaccgtactggtgaccttctttttactacgtcttctatcgctgtttggccgccgcagctggcgtattctggcgtcgctggtggtgctcttttccgcaggtgccagctattacatgaccttccttaatgtggtcattggttatggcatcatcgcttccgtcatgaccaccgatatcgacctgtcaaaagaagttgttggtctgaactttattctctggttaatcgccgttagtgcattgcctcttatccttatctggaataaccgctgtcgctacaccttgctccgacaactgcgaaccccagggcagcgtattcgcagcctggcggtcgtcgtactggcgggtattatggtttgggcaccgattcgtttgctggatatccagcagaagaaagtggagagggcgaccggcgttgatttgccgagttatggcggtgtcgtagcgaactcttatctgccatcaaactggctttctgcgttggggctgtatgcctgggcgcgggtcgatgaatcttccgataataattcattgcttaatccggcgaagaaattcacttatcaggcaccgcaaaacgttgatgacacttatgtcgtgtttatcatcggtgaaaccacgcgttgggaccatatgggtattttcggctatgagcgtaataccacgccgaaactggcccaggagaaaaatctggcggcgttccgtggttactcctgtgataccgcaaccaaactctcactgcgttgcatgtttgtacgtcaggggggcgcggaagataatccgcagcgcacattaaaagaacagaacattttcgcggttctgaagcagttaggattcagttctgacctctacgctatgcagagcgaaatgtggttctacagcaacacgatggcggacaacattgcttatcgtgagcagattggtgcggagccacgtaatcgtggcaagccggtagatgatatgttgctggtagacgaaatgcagcaatcgctagggcgcaacccggatggtaagcatctgatcattctgcataccaaaggttcgcattttaactacacccagcgttatccgcgtagcttcgcgcagtggaagccggaatgtattggtgttgatagcggctgtaccaaagcgcagatgatcaactcctatgacaactcggtgacctatgtggatcactttatctccagcgtgattgatcaggttcgcgataagaaagcgattgtgttctacgcagctgaccacggtgagtcaattaatgaacgcgagcacctgcacggcacgccgcgtgaactggcaccgccggagcagttccgcgtaccgatgatggtctggatgtcagataaatatctggaaaatccggccaatgcgcaggcgtttgcgcagctgaaaaaagaagccgacatgaaagtgccacgccgtcacgtagagctgtacgacaccatcatgggttgtcttggctatacttcaccggatggtggaattaacgaaaacaacaactggtgtcacatcccgcaggcaaaagaggcagcggctaactaagcggcctgctgactttctcgccgatcaaaaggcattttgctattaagggattgacgagggcgtatctgcgcagtaagatgcgccccgcattcggtgattggcgcagcctggtagcgcacttcgttcgggacgaaggggtcggaggttcgaatcctctatcaccgaccaaattcgaaaagcctgctcaacgagcaggcttttttgcatctgcagctcatgaggatgagaacctccgggggcggggaggttcgactcgagcgaagcgagagaacgttgcgccagcaacggcccgcagggcgagccacgaagtggcgagtaatcctctatcaccgaccaaattcgaaaagcctgctcagcgagcaggcttttttgcatttgaagcccatgaggatgagaacctccgggggctgggaggttcgactcgacgtagatactgttatggcctgcaagttttttcctggtccggtttcccggattgcaggcatgccagacacagcgccgtcaggcgctgtttttttcatcccttccgcgatttttacgccgctaccggatt

SEQ ID NO: 48 - DNA, 51366 bp, Escherichia coli
  source 1..51366: mol_type = genomic DNA
gtgaaataaacgtcaggtcgtcctcaccgtactgcatcacctgttcacgggacgggtattcgcttttgaggttaaacacgaagtcctgaccgcgcatctggtgccgctcgcgcaggattttttcgactatttgcggcaccgtctggttctggtaaatggcgttctggcggctgcgggccagcagcgccattcggggttcaaggcgcacttcgtaacgggcttcatcctgtgacgatgacaggtgtttaaagccggtgatgacgccgtgcagggtgcgcagggcagtctgtaccggcatcccctgtaccggcggtgccgtcaggctgaatgcgccgtcctgcatcagcaccaactccggcgtgatggctttatcggtactggtaaactgaatgtcgtagcggaacggggtactcagttgttcgcgaccttcgaaggtcagcacatccaccggactttgcaggccgcgaattttgagcttgtggtgtgaatgatcgaaattctgaatacccatgacagcctccgttattgcatctcttccgtagcgaactccagtacaatcccgtcttcctcatcccagccaagccgtagctgggctggtttacggtgcgcggcctgttgcgccagcaactgctggcttaagaccggcaggatttgctggttcagcaggctgtcgatattacgcgccccggtgtccggcagcaggcaggcggcggtcagcgcgtcatacaggctgtcgttgatttccgtttccagcccatagtgctgacgaagacgacgaaccacctgcgccagtttcatttccacaatggcgcgcatcgcttcctgtcccagagggcggtaaatcaccgtctgaaaacgcgccatcagtgcaggctggaagtgctcgcgcagcagggggtacagcagttcatgcaggtctgcgtccgtggcgtccggtttttcctccagcagctgcatgatgtggtcactgcccagattagccgtcatcagaatcacggtgttgcggaagtcaatttcccggccttcgccgtcgcgcataaagccccgatcaaatacctgatagaacaggttcatcacgtcgcgatgcgccttttccacttcgtcgagcagcaccacgctgtacgggcgtttgcgaacggcttcggtgagtacgccgccctgaccgtagccaacgtagcccggaggagcccccttaagctgggagacggtatgcggctcctgatattcggagaggttgatggtgataagggatttttcaccgccaaacagggtgtcggccagtgtgagcgcagtttcggttttaccggtgccgctggggccggtcagcaggaataccccctgtgggccattctccggcgtgaggccggttttagccgcccgcagccgctgtgcgatggcgcagagcgccgggctttgtccgacaacgcggttttcaaggctttgttccatactgagcaggtcgctctgttcgtccctgagcagggaagagagcgggatgccggtccagtccgccaccaccgtggcgacggcgcgggcgtccacatccagcgccagcagcggtgcaaagccctgatgtgttcgcagttgctgttgcagttcagtgctgtctgtcccttcctgacgcaacgtcataatctgctgcgcaagccgcttttcctgctgatactgcgtttccagatgcccggcttctgcctgtaactcatcacgcaaatcgatcagttccgccagccgctccgggctggcttcgggataaaatacgctgtcctgctcaatcgcttcccgctcaatatccagtgccgccagtcgcgcatgaagctgcgtcaacggttccggcagggtgtcaaggctcatgcggactcttgccccggcggtatccagcaaatcaaccgccttgtccggcaactggcgcccggtcagatagcggcgcgacaggcgcacggcggtctgaatggcgctgtccagcatatgcacgccgtggtgctgtgcatagcgggccttgagtccccgcagcatcaggcaggcggtatcgtcatccggctcgtcgactttcaccatctggaagcggcgttccagcgcggcgtcgcgctcaaaatactgtttgtattcgctccatgtggtcgccgcgatggtgcgcagttcgccccttgccagcgccggtttcagcaggttcgccgcatccgcgccgcccgcctgattacccgcgccgataatggtatgggcttcatcaataaacagtagtaccggctccggtgatttctgtactgcatcaatcacgtttttcagccgctgctcaaattcgcctttaacgcccgcgccagcctgtaacagaccgaggtccagcgtgcggatatgcaccgttttcaggctgtccggtacattgccttcggcgatacgcagcgccagcccttccaccagtgcggttttgcccacccccggttctcccaccagaatcgggttgtttttgcggcgacgggagaggatatccaccatctggcgaatttcggtgtcgcgcccgaataccgggtcgatgcgcccgctgcgggctttttccgtcacgtcttcggtaaagcggttaagtaccgccagcagggcgtcatcctgtttccccgtcagcgtgtttgccggtgcgtccgtcgttgccaccccgggttgcgcggatgtcagcggttcggtgacctgtggctgacgtgccgggcattcatccgactgcgcatccagcaggggacgcagccgctcaagctgcacacggctcaggctcagcaatacccacaggtcattacaggcgggcagcatcggtttttctgtcagcgccatcagcaggtgctggctgcggatttgcgggtcgtcgccttccagcgaagcaatcagccacgcctgtctgataagcgccgtcaggggttcagaaagctgcggacgttcgcggaccgagcggggtaaggtgtccagatgtgccagcagagactgccagagcgtgtcgatatcccattcatagcggcgggcaatcaccgtgatatcgccttctccctgctccagcagtttcagcagccagtgttcaatggttatctccgcatgggcgcgggtctgacacagtgaggcggcagcgtccagcgcccgtgcacagtatgggttaaggcgacgcagcagcgcggcggggtgatttccggtcatagaaggtttccttatcgtgttctgtattcctgcgatctgcgttcaggcacgctaccgcccatagccgttacctcactcaggcccatcaggtatcaccagattgtgggtatgctttgctcagtaccggtgcctgcggcactgggcaaagcacacaacagaaaggcagacagtttcctgtctgccgcagttatcaggcggaaggacgttcattccacgagtcggaatgaatgatgttgccgtctttgtaagtccaggtgattttttcgtagcggaactcaatgcgttccaggtggttatgcttctctttggaaggctccttgatgtcgtgcatcagcggagcgactctgaccagcttgacgttatccagcgtgatgttgaagtactccacttcctgaccggcgtcgttgatgcggtaaaacttaaattccgccgttttcagggtctgaccggtggtcacagctttgtagagatacgggctggacgcatcgatttctttggtaaaaatgaacggtttatgggtgcgagtaccggtcagtttgccggtgttgttgtcggtcgggatgtacacatcgtgatccagcgccaccacttcgatgctgccttcgcgcccctgaacgtccacggaacctttgatatccgcgccgccgtcatctttcagccagagataagcaggaatagccatgagaattactctccttgttagtgtgattgaagcaccgccttcttccggcggtatgttttatttcacgtcctgacaggcgtcagaacgcggaacaagactgatttcgacgcgccggttgactgcccggccctgtggcgtatcgttggtcgccgcaggctggctctcgcccagtccctgtacggcaaaacaggtggccgggatgtcgctggtctgcagcatccagttgcgcaccgcttcggcacgtcgcagcgataactgctgattgcttttttcgtcgccggtggcgtcggtatatccggcaacgaggatcagccagcccggttttgcccggatgttcaccagtgcgtccaccagcacttttgtcgagccgtctttcaggcgggcctgtccgacgtcaaacagcgacatactgtcaagacgcacggtctgcgcctgaagcgaggctgtcacctccattttttgctcaggcgggcggtagtcacgaatggcgcgtaataccggctggcggatttgttcgccggggtataatcccagaccgagacgcagtggctctccttcccggtaatacccatcgagcatgaccgcatcgtctttcagcaccgacagacgacgggctttggtgataaattcctccgccggaacggcataaaactggtgcagatcgtcaccgatatgccgtaataactggcgattcgccgtggctgacagacacagcgcggcgatacccgccacggtggtgatgcccagcatggtcacgcaggctcgtcgcagcggggtaaagcccgactgacgcggcaaccgccgtaacagggcatccgggaatggcagcgtggcgtctgtgccggtgtccgcgatatccgtcgtcaggccggttctggcggtgatccacgactgccacaggttgttatccacctcaggcaacgaggggaccagccccacagccatcgccagtggcgggcatttcgcctccgggccgttcagtgccgccagcacattaagattcagccactgcatcaggctttcggctttcagcaggtaacagagttgctggctgcgctcctgtgtgctggtctgcgtgagccactgcgcaggggaggcggtctctgcagacgtcgctacctgaatttcgccgccggtacagataagccacggtgaatgtgccttctccggcaacggcgagccggacaacccgctccagagaagccaggggacgtttacgcccgcccggcgacgcactgtcgccatactgtgggcgaaccgtcgcagtcgtccggtcagaaccgccgcatcccggtacatgccgggcatgacggtatacgccacggcaagctgcgatgcccacgccgggcgaagggtcagtaatcgctccacctgcgccacaagctgttcttcatcgggaacatgcagatacagcccttctgaaacctgccggaccgggctgtcagtgaacagatgcgccgacatatcgccacagaccagcactaccggttgtcggtacgtttccggcggcagcgatgacaacccggcatcgccggtcatctccgtccacgcctgcctgcgccggtaaatcagcaacgcggcaaccgccagaacgatagccgccgccccggcccatctcagtacgccagacggactgataaacaccgaccacagcaccagcagtaacaccattccccacagcacgacggcctgtttcagcgtgttcctcactcacgactccctttaccgcaggctttgcggcagcaattcatccaccagcacgttcagccagtggtgcagcccccaccagacaccggccagtagcagcgtcagcgttaccagccagaaaaacggcgaatgcagcaaagggtgctgacgggtggataacggcacgttcagtaccgccgtttccggcagtacgccaaatggcgcgaccagcccgttgagcgtcgaaataagctggtcgcgctccggggccaccggatcctgataacgcccgcgaaatcccagcagcaggacacggtgaaagcaggtcagcaccgcctgtgcaggcgcgggctcctgcaacacctgcttcatccgctcgtacagcagctcgcctgcctgcagggtgttgaagaaatgcgactggagtggatccttcatccagatggcctgaccgtcgtccatgccgctgcgactcaggactgtttcgtccagcagggcgcactgcgcgtaggtaatgtgctccacgctctcacggctgaacccggcatctttcaggcgttcgcggaccagttcgacctgccgctggcagtggcgatacagctccataccgtgacgcacggtggttccctgacgcagttccaccaccgtcagaaacgtgtcgcgcagcagcgcgtcgatattgatatccgtctcttttttcatgtgcgcagcaccgcaaacagttcaggtttcaggtcgcccatggttcctggcgcataaatcatgcagcacccggactccagcatcgatttagccgcgtcactgtgcatatccagcgcaaaatactgattctccaggcgcagtggcagcgctgccggaactgaggtcagtggcaccagtggaacaccattcagcgccacgttgataagcagcgtgacgtcatcaggcgcaccgattttgcagaccagcggtagctggtgcagtacctgatgcgcaggcagtgaggaacgaacggacaggtaaaaatcggcctcttcccgcaggcgcggatcgtgcaggtcggctttccagcggttgcccggcagggattccagatccagcgcgatcacccgtgacggcaggctggcttccagcagttcgctaagcagggagaacagtggcggaaagacagtggacggcgattcgtggacatagggcggaacggcgctgacgttatgttcaagggaaaacgtcagcagcgctccggcaagcctcgccagctcccgccagaccagttcgggatgaaccgccgggtagcgcaggaaatcactcagcaccggctcggcggagttcagcgcgttaagcaaccagaacagggagacatcggcgacggcgaagtccgccatacgctggttgctttcccgacgcatcgccatcaggcgctgacatttggcccgtagctgcaacagcagcgtgtccagacgctgtaccaacccgtcatgagcattaaacgccagtaacggcggaatatagccctcatcctgtgtccagttgccctgaacatcccgcaccagacgcgccagtgggcaggtgatgtaatcctgattgttatcatgagcaaagcgcagggacagcgcatgacgctcaacggccatatcttcactgtcactgccgtagatatcctgtaccttttgccattcctgacgatagcgtagcggtctttcagtctgctcaccctgaccgagattaccgccgttaccatgggcaagcggcagcgccagcagaacgaccgcgctgtcgttcgtcagcgcgtgcagatcgcaggcgagaggcagaacatcgctcacgtcagaatcgatcagcgtgccatcagcaaaacgcaggcgtactgcctgcgttttcagctttccggacatcagggcatcgcggtcaaagagcacattcgcgatcccccacggatgacgaatacaaagttgcgcaatgctgtcattgctgaacgcttcccagcgggcctgctgctgaaactgctgagaggacaggaatgtcccctcagcccacagtggtcgatgaattttcatatcacaccacttcccggtcaggctttcgctttcggcatctgggaaaccagtgacaggttgatatccatcccttcaatctggaaatgcggcacggcaaagagtctgacgcggaagaagcccggattgtcctcaatatcttccacgataaccttaccgtcgcgcagcgggtgagacgcctgcagttcatcacccggatcggtcatctccgtcaccagtgtgcggatccaggtgttcagttccagttccagtacgcggcggtctttggtggtaccgatattctcgcgctggatgattttcaggtaatgcgcaatgcgggacagcaggaagatatagggcagacgggcgttaatacggctgttggcggtggcgtcagcggtatcatacaacgccggtttctgggcagagtttgccgagaagaagcaggcgtaatcgcgattcttataataagagagcggaataaagccaaggttggaaaattcaaattcgcgggtttccgggatcatcacttcggacggaattttgacctgattgccggtgccgagatcgtaaagatggatgggcagatcggccactgcgccacctgcttgtggaccacggatctgcacgcaccagccattattcacaaagctcttcaccatattggcggcaaaggcgaacgaggcgtttgtccagagatacttttcgtgatccgggcctttgacttcttccacatagttaaagctgcgtaccggcaccgtgtccggcccatagggcagacggcccagcactcgcggcatcactaatcccacatagcggctgtcatcggtatcacgaaacgatttccatttaatatattctgcgcggtcaaagtagttgccgatatctttaatcgcggcgacttcttccatcgaatttttaaggaagaatttcggcccgacagaaccgataaaaggcatatgggaagcggcagacactctggaaatattgcgcagcagggcaatatcctgcgggctgttatcaaattcatagctggaaattaatgaggcaacaggttcgccacccggcgtatcgtactcctgaatgtatgtatgacgatataaaccgctctgaatgatttccggggagtcgtcgaaatcctgacgcagatgctctttgctgatatccagcaattcaattctgacatttttgcgaaaatcagtgcgctgtacgacgaaccatgtgccgcgccacagcgactcgactttctggaattcaggatggtgcatgaccgcatcaagctgtttactgattttctgatccaaatcgtcgatatgaaaatccagcaggctcttgtcgagcttgaccacgttctcgcctgatttcgccagacaggaaagtagaacgtgaatcgccgctgtcacgcgctcatcgggtgaggcatccgccagtgtttcgctgttttgccataaatctatttcctgaatggaagacaccggggttaaattaattttatcaaacagggactgataaacgccgccggactcagtggtggtcagtgttgcagtttcagaggtggcatgttcttgttgtacagacatcagcatttccttttcagtgatcctttcttctccggtttaacctgaatatcacttcgggttaaacgttctcctgcggcgcaattttcgccagttcatcacgcagttctgaattgagcgtcgggtctttcaggatattttccagttcacgtcgaaacgttgcgttatctaacagattggatttcaggtcacgtaataaattgcgcatagcgagtaatacacgaagctgtgggatattttttgctacctgttcgggttcaaaatctttcaggcttttaaattcaagcgcgatattttgctcattaccgcttccgcttagtgtgtcttctactgttaaattaaccgcaggcgaaaactcagccatgacactgttgaagttgtttttattgatatcaatcttgtcccgttcggacagcggacgttgctcttttccgttactgtaatcgccaacagcaagaagcttgagggggagttcaactttctttttagcattgcctgtatgcaggtcaagcttgatatttacacgagcggcgggaacttcattctggaaactgtcggccatatccttttcctcatcatccactttttctgatggttattgacataattatattcacgggattatcgggtgatttaaataaaaagcaatgattaggaaaatataaaaatgaataatgtatttttctggggaatagatacagttgtatcattttagatattatttagcctcttgattatttttcgggagagggcagccttatctggtgagaaaatttggcatgaaacttaaaataataacaagataaacttcacaaatttgcgtttttaagaaattgggtagtgtgggagtctattaaagcattcattaaaattattgcccgggcttccacaaaaaattattaatttttctactaattaaaaattgtgtgctttttgtacaataattatataagtgtagcctccagttgtgatattgaaatgttaacataatcaaaacaaattgatttatagaatatgtaagtgaagttcattggtggggtatatatttaatatataaataagatggatggctttgattgggggggatcaacggtttactcattgtttcaggcttcactgaaacggataaggaagcgtaaaaacgaaaaaaccgcaagctaaaggtagcgttgcggtttctgatattctaataaattggttgcgggggccggatttgaaccgacgaccttcgggttatgagcccgacgagctaccaggctgctccaccccgcgtcaccgtactgcttttacttcatcaaatttgattggttgcgggggccggatttgaaccgacgaccttcgggttatgagcccgacgagctaccaggctgctccaccccgcgtcaccgtactgctttacttcatcaaattttaattggttgcgggggccggatttgaaccgacgaccttcgggttatgagcccgacgagctaccaggctgctccaccccgcgtccgtggatgcgcactatactccgctcgcgttttcatgcaaccttttttttaccccgatcacggatttagcatgattttgaacaaaaacaaaccactaaagcctattttttgtacaaaatttgcgtcagggagaggctgctcatttcattaaacgcggcggtttgttatcttcgttgcgccttattttttaacctgaagaagagaacaatgaaaggacgttgggtaaagtaccttcttatgggcacggttgtggcaatgcttgccgcctgctcttccaaaccaaccgatcgcggacagcaatataaagacgggaaatttacccagcctttctctctggtgaaccagccagatgccgttggcgcgccgattaacgccggtgattttgccgagcaaattaaccatatccgtaattcgtcaccgcgtctgtatggcaaccagagtaatgtttataacgcggtgcaagagtggctgcgcgcaggcggtgatacccgcaatatgcgccagttcggcattgatgcctggcagatggaaggtgccgacaactatggtaacgtgcagtttacaggctattacacgccggtaattcaggcgcgccatacccgccagggcgagttccagtatccgatttaccgtatgccgccaaaacgtggtcgtctgccgtctcgtgcggagatctacgcaggggcgctgagtgataaatatattctcgcttacagcaactccctgatggataacttcattatggatgtgcagggtagcgggtatatcgactttggtgatggcagtccgcttaactttttcagctatgcagggaaaaacggtcatgcctatcgcagcattggtaaggtgctgatcgaccgtggcgaagtgaaaaaagaagatatgtcgatgcaggcgattcgtcattggggcgaaacacacagtgaagccgaggttcgcgagctgctggaacagaacccgtctttcgttttctttaaaccgcaatcttttgcaccggtgaaaggggcaagtgcggtgccgctggttggccgtgcttctgttgcctccgatcgttcaattattccgccaggtactaccttgctggcagaagtgccgctgctggataataacggcaaatttaacggtcagtacgaattgcgtctgatggtggcgctggatgtcggtggcgcaatcaaaggccaacacttcgatatctatcaagggatcgggccggaagccggacatcgcgcaggttggtacaaccactatggacgtgtctgggtgctgaaaaccgccccgggcgcaggtaacgtctttagcggctgatgtgttattctgtataccgtttttacggatacgccagggtgagggataacctcaccctttttaattctgaggtgctatgtctgtggtaattagtgatgcatggcgtcagcgttttggtggcacagcgcgtctgtatggtgaaaaagcgttgcaactgtttgctgacgcgcatatttgtgtggttggtatcggtggtgtcggttcctgggcggcggaagcgctggcgcgcacggggattggcgcaatcacgcttatcgatatggatgatgtgtgcgtcaccaataccaatcggcaaattcacgctctgcgcgataacgtcgggctggcaaaagcggaagtcatggcggagcgtattcgccagattaacccggagtgccgtgtaacggtggtggatgatttcgtgacgccggataacgtagcgcagtatatgagcgtgggttattcgtacgtgattgatgccattgatagtgtacggcccaaagcggcgctgattgcttattgtcggcgcaataaaatcccgctggtcacgaccggtggcgcgggtgggcagattgacccgacgcagattcaggttaccgatctggcgaaaacgattcaggatccgctggcggcgaagttgcgcgagcgcctgaaaagcgattttggcgtagtgaaaaacagtaaaggtaagctcggcgtcgattgcgtgttttctactgaagcgctggtgtacccgcagtcagacggtactgtgtgtgcgatgaaagccacggcagaagggccgaagcggatggattgtgcatctggatttggcgcggcaacgatggtgaccgccacctttgggtttgttgcggtttctcatgcgctgaagaagatgatggcgaaagcggcgcgtcagggttaaacaatcaggtcggatgcgacgcgaacgtcttatccgacctggttctgtgcttaaacctgcttcgccgcagcgataatcgcctcgcttaacgcattcaacccctggctgcgtgaggcgctaagctgtgcacgcaatcccagctcatcaaacaatgccagcggcgactgtgcctgcaattcggcggcggttttcccctcaacggcagtcaacaacaccgccaacaggccgcgcacaatgcgcccttcgctatcgccaaagaagtgcattttaccgttttcagtcacggtatatcccagccagacgcggttttcgcatccggcaatctctttagcctgcgcttttaactcgtctggcaaagccggaagctgtttccccagcatgatcaactggcgatatttatcttcccattgcgacaacggagcgaaggtattgcgtaacgtttctgcggttacggttgtgccgaacggatgtccggcgaattgcgggtttgtcattaatccaccaataattccagcgcgcggtcaacggcattcaccagcgcatccacatcactctttgtattatatggcgcaaatgaggcgcgcagtgtgccggttacgcctaattctgccagtagcggctgagcgcaatgttgcccggcccgcaaggcaataccgtactccgccagcagcgtcaccatatcgctatgatgaacgccagcaaaatcaaaggccagcaggctggaatcctggcagcggaatgaacgaaagcctggacgtttcgccagcgcttcttctgcaagcgttgctaagctacggctccagctttcggcctggttgatatcgtaatctgccagccattccagcgccgcgcttaatcctatgacgccagcgacatttggcgttcctgcttccagtttccacggcgcagattgagtggtgaaaccgtcaaaactcacttcgtgaatcattttgccgccacccagccagggcgacatcgcttccagcagttctgatttaccatacagcacgccgatacctgtcgggccatacagtttgtgacctgaaaaagcatagaaatcaatatccagttgctgaacatccgcggggaaatgcactgccccctgagcaccatcaaccatcaccaccatcccggctgaatgagcaaaggtaatcgctcgcgccagatccgggcaaccgccagtaacgttcgacatctgacccaacgccagaatccgactacggggagtaatcagttctggcaacaaatcgacatccggcagtcgctgcgcattaagcggcaatttcaccactttggctccagtttgttgggcgaccatcagccaggggacgaggttagcgtggtgttctgccacgctgacaataatctcatcgcccggttgcagacgcggacgcgcatagcattgtgccaccatgttgatggattcagtggtgccgcgcgtccagacgatagttttatcatccggtgcattcagtaattgcgccactttctctcgtgcagcttcataacgcgcggtcaggcgttgggcttcggcaaactggctgcgatggacgtttccggcgctcaggctgtaaaactgtcgagtggcttcaaccacggcttcaggtttaagcgcggtcgcggcgctatcgagatagacgcccgcatcctgtagtgcgggaaactgggcgcgaaactgcgcgggattaaaaacgttcatggtactcctcggcttgatgcaccgatcgtgacgcaaaattcactttgatacaaggagagtgctaaccatcagaattatctggatatcctggcgaagccgcgtaagtaacatatgctgaatagtgttaggcgttaattttagcctgttaatcaatactattaagatttattaatcgctttaaggagaagatgatgaaaaagactgccgcaattatttctgcctgtatgctgacttttgccctgagcgcctgttccggttcgaactatgtgatgcacaccaatgacggacgtaccatcgtctctgacggcaaaccacagactgataacgataccggtatgatttcgtataaagacgctaatggcaacaaacagcagatcaaccgtactgacgtgaaagagatggtcgaactggatcagtaattcgcgatcgcaaggtaaaaaaaagcaccgcaattaggcggtgctacattaatcactatggacagacagggtaaatgtacaggaagtgaaaaaaggtagctttgctaccatggtctgaatcgcagaccaattgcaaacacaacaacacaacatcacaaccgtaagccaaaagttcaccagaacacgcattccgataaaacttttcgttccggctcaggaagtgccgccactataggtatttgctggtagaagctcaacggacaatttataatggctcagattaaaaaaactaataggttacacagtgtaatctaattgttaaattcatttaacatcaaagtttaaaagccatgtctaaacgattaccaccgctaaatgccttacgagtttttgatgccgcagcacgccatttaagtttcactcgcgcagcagaagagctttttgtgacccaggccgcagtaagtcatcaaatcaagtctcttgaggattttttggggctaaaattgttccgccgccgtaatcgttcactcctgctgaccgaggaagggcaaagctatttcctcgatatcaaagagatattttcgcaattaaccgaagcgacgcgtaaactccaggcccgtagcgccaagggggcgttgacggtcagtttactccccagtttcgccattcattggttggttccgcgactttccagctttaattcagcttatccgggaattgacgttcgaatccaggcggttgatcgtcaggaagataagctggcggatgatgttgatgtggcgatattttatggtcggggcaactggccggggctacgggtggaaaaactgtacgccgaatatttattgccggtgtgttcgccgctactgctgacaggcgaaaaacccttgaagaccccggaagatctggctaaacatacgttattacatgatgcgtcacgccgtgactggcagacatatacccgacagttggggttaaatcatatcaacgttcagcaagggccaatttttagtcatagcgccatggtgctgcaagcggctattcacgggcagggagtggcgctggcaaataacgtgatggcgcaatctgaaatcgaggccggacgtcttgtttgcccgtttaatgatgttctggtcagtaaaaacgctttttatctggtttgtcatgacagccaggcagaactgggtaaaatagccgcctttcgccaatggatcctggcgaaagccgctgctgaacaagaaaaattccgctttcgttatgaacaataatttacgtagggtacgaccatgaccagccgttttatgctgattttcgccgccattagcggcttcatttttgtggctctgggcgcttttggcgcgcatgtgttaagtaaaaccatgggggccgttgagatgggctggatccagaccggcctcgaataccaggcgtttcatacgctggcgatcttaggtctggcggtggcaatgcagcgtcgcatcagtatctggttttactggagtagcgttttcctcgcgttaggcacggtgttgttcagcggcagcctttattgcctggcgctgtcccatctgcgtttgtgggcgtttgtcactccggttggcggcgtgagcttcctcgcgggctgggcgttaatgttagttggtgctatccgtttaaagcgcaagggcgtaagtcatgaataaggttgtattgctgtgccgtccgggctttgaaaaagagtgcgccgcagaaattaccgataaagccggccagcgggaaattttcggttttgcccgcgtgaaagagaatgcgggttatgtcatttatgaatgttatcaacctgatgatggcgataagttaatccgtgagctgccgttcagttcattaatttttgcccgccagtggtttgtggtgggggaactcctgcagcatttgccgccagaagatcgtattacccccattgtcggcatgttacagggcgtagtagagaagggcggtgaactgcgtgttgaagttgccgataccaacgaaagcaaagagttactgaaattctgccgtaaatttactgttccgctacgcgctgccttgcgcgatgccggggtgctggcgaactatgaaacgccgaagcgtccggttgtgcatgtattctttattgcaccaggctgctgctataccggttactcatacagcaacaataattcgccgttctatatgggcattccgcgcctgaaatttccggcagatgcgccgagtcgttccacgctcaaactggaagaggcatttcatgtgtttattcctgcggatgagtgggatgaacgcctggcgaacgggatgtgggcggtggatttaggcgcttgccctggcggctggacctaccaactggtgaagcgcaacatgtgggtttattccgtcgacaacggcccgatggcgcaaagtctgatggataccggacaggtgacgtggctgcgggaagacggtttcaaattccgtccgacgcgcagcaatatctcctggatggtatgcgatatggttgaaaaaccggcgaaagttgcggcattgatggcgcagtggctggttaatggctggtgccgtgaaaccattttcaacctcaaactgccgatgaaaaaacgctacgaagaagtgtcacacaatctggcgtatattcaggcacagcttgatgaacatggcataaatgctcagattcaggcgcggcagttgtatcacgatcgcgaagaagtgacggtgcacgtccgccgcatctgggctgcggtgggtggtcgtcgcgacgagcgataacaggcaaggccggggcgtcgtctccggcctgctaccctttccgtcaggctgttaccaaagaagttgcaacctggcgctcatcagaaataatgtgcgttacctcatccagatgcccgatgcgggcttcccctgaacgattaaatttacttttatcaatcaataacaacgattgcgcggcacgttttaatagcatcgatttgtaatcagcgttgatcgcattggagtcccacagtgcgccgctgctatcgatcccttcacaagaaaaaataaacagatcgatttccagcgatttaagttgggaaatcagcgagggattgacgtaacagccatatttgcgctcaagtgtgccgccggaactgatcagttgaatgcgttcgcgtttaccgagttcatggcaaatcggatggctattggtgaagacctgaatgttgatgtcaggcaactggcgtgccagataccagcaagttgaactggcgtctaaggctatcaccatcccttcttcaatccacgcgagcgcctcgcgcgcgatatctgctttatgcgcataatggcttttcagcctgatgtgaaagggatcgccactgtcttgattttgacggtggatatatttagcgcgtccatgattgcgcagaattttaccctgcgtctgtaattcattgagatcgcgacgaatggtttctttactgacctttagctgttcagagagagcttccgtggtcaggctggtatggttcagcagcaggtcgactatcgcttgctggcgtgccgctttcatatttttcaccccatcattcgataaccgcccgcgtcatgcgggcgtaccggtatgagattacggtgttacccctttttttaaaagaatattcccgtacttcgctcgttcgcctgtgataacgatcgcaaaggctttttgcgcccgttcataaaacgcaaaacgattgatgcggatgatgtcaggacacggggcttgtagtgaaagcgcattacggtaacgtcgttctacttcaggatcgagagtgtcaccttctaccgccgccatcatcaccagcggcggtgcataactgtccagttcaaataacgggataatcgcctggagcaagtcgctcaccaacaggccatcagcgcggatcacctgcggtcccatcgaatgggcgggaaagtgagcatcggaaaaaataatttcatctccatgtcccatctctgccagcactttcaatagttcgggagaaattaacggcgaaattgttttcagcatttcacacttcctctataaattcaggttcagtttgcgggtagaaataacggtactgataatgaatctgtgcgcgggcttcttccgggctgttaaattcccctacgccataccaaccgaacagcgcagctcctgcgacggtcgtttcggcgtcgtcgagaacttttaccggaatatcaagcatattggctttaatctgattccacaatgtgttgcgacttcctccaccgactaacaataattcagaggccttaaagtgcccgattttttccagcatctgtagattgcgctgtaattgcgcagttaacccttccagcgccgcgcgatagaaatgcccccgcgtggtattaagcgtcactccttgccagccagcgttctgacacgacaataaatcacactgcatttttacgccatccgcgccaggcgcgatcagacgagcttcttcaatcaacatttgccagggtgtttcagccgtccagaacagttttctcacccattccagcacgccggatgccagccattgcatacctgggttatacaaccctgcctggctatccagttcgcaggtggaaccggcgtactgacttaacagcgaagtatcaacctgggcgctacggaccattaaaatttcccatgtaccggaagagagcacgggttcattttggtcggcaccagcgccaaaaagggcgaactgggtatcgtgacctgcggaaatcaccggtatgccaacgggtaagccgagcattgctgcggcgctgttctgtagcgtaccaatctgttcacccgcttccaccagacgagggaagagtcggcgtggaataccggtggcttgtaaaatttgcggactgaaatcgcgttgctggatatccagcatctggctggttccggccatcgtgatatcagtagtgaattcgccggttaaacggtggttaatcagcgacgaaataaagagccaggcgtgcgcgcgttccagcagttgtggatgattttctttcaaccacaccaacttatataacgtattgaaactaaaggctccgacgccagaaatagcctgcaaccgctgtgcggagatcaactgttcaatattgtccataaccgctgctgttcgcggacatttccagctaatgatcggatagagcagattgccttgcttatctaccagagcgccatccacaccaaaggtggtgacggcgataccgcggatgtggcattcagtcagttcactattgatttgccgacagcaatcagcaaagcgttgcaaaatggcgtctaaagaccactggtgccaggtgttgttttccatcgcgatatcgctggcattaggcgttgaggcgcgggcaacaatttttccctgccgattaaccgcgatggccctgacattggtcgcgccacagtcgagtaccaggataacttcttgtttcataatcgctcctgcaatatagccggataacattgcttatccggctaaccactcttgcttgttcaggcccggtagccggagcgaccgggcatcacatcagggagtaatgtattaacgcttgtacaacgggccgtagttctggcaagcgcggtaatcctgaccttcaatatccatgccgtgcgcggcccaggcagaaggacgatatactttggtctcttcaacgttgtgcatacataccgggatacgcagcatggaggcgagagtgataaagtctgcgccaacgtggccgatggtcagaaccccgtggttagcgccccagttcgccattaccgaatacacatccgtaaacggccctttaccggtgaggcgcggtgcaaaccaggtggttggccaggttgagttggtgcgtttgttgaggatgtcatgcacatccttcggcaattccacgctccagccttccgcgatttgcagtaccggtcccaggcctttgatgatgttgacacgggtcatggtgaacgggacgccgccttcggtaaggaagcgggaagagtaaccgccgccacggaagtattcgtggatcgccgggcaccattcggtagcggcgaggcaagcgtcagcctctttctgagagatttcccagtgcggcttcatcgtcgggttaccttcgctgtcgcgttgtttacaggaaccgtccagcgcagcagaaccggagttgatcaaatggatgatgccgtgttctgccagtccatcgagtttatgccccgttacacgctcaattgcttctggtgaccagtaggtacgcacatcggcaaatacctgagcggtgccggtgagctggtgacccattagcattgccacgccgttaagactgtcgttttcggtcgccacgacaaagggttcgcgcacgccattccagtcaaatgaactgttaaggatcgcttcggcggtgtcaccattgggatattgatcggtccagtgacgttgcccctggaagcccgcagcgatggcgttgtagccaagtgattcttccacgcgaccaatatcggccagtttgctgttgccttgcatcatgtcgcggatacacatcgccatcagtaaactttcgcgcagaactgcgcggctttgctcggcattgcgttgatactgtttgttattttcatcttcgccatagcggaagtttttatcagcccaggccagtgccatttccagttcggcttcgtcgtaaatcttctgatcgatacggcgacgcagttcggtcatatccaccgcctggactttcattcccagccaggattcaaagaagttgtgatcaacaatggaaccggcgatacccatcgaaacgccgcccagcgacagatagcttttacctttcatgctggcgacggccaaaccggcgcgggcaaagcgcagcagtttttcttcaacatcggcaggaatcgatgtgtcatcggcatcctgaacgtcatgaccgtaaatggagaatgccgggatgcctttctggctgtgagctgccagagccgctgccaggtaaacagcgccgggacgttcagtgccgttaaagccccaaatggctttcgggcgggttggatccatgtcgatggtttcactgccatagcaccagcaaggcgttaccgtaatggtgaggcctacattctgactgctgaatttttcttcgcaagcagcggcttcagccatacccgcgatacaggtatcggaaatgacacactcgacggcagctccgcaggcatggcgcagtttctcggtcagcagtgcggccgtagctttcgccatattcattgtttgttcttcaagcgactcacgaacacccatgcgacgaccgtcaataaccgggcggataccaattttcggtaagctgatttttttcattacagattcctcactttattcggaaaatatgttcagttagttgccgtttgagagcggaaacgggcaaagataaagatgaccgcgaagcagagtgcggggatcagttcagcagtggggatgttgcccgccgcgtcactgacaaaacccatgaccggagtgacaataccgccgccaatgatggtcataacgatgaaggacgaaccgtatttggtgtcctggccgagattcttaatgcccagcgagaagattgttgggtactgaatcgacataaaggcgctgcataaagtcagggctattaagcccacatgaccgccagcgaaggctgagatcaggcacagtgccatagcgattaatgcgtaggcggccaggactttgtgtggtgcgaagcgactgatgagccaggtaccggtgaaacgaccaataaagaagcacaccatggttccggttaaatagttagcggcaaagcctgcagtcatacctggaatttcttctacagcgtagcgaatcaaatagctccagcaggccgtttgtgcgccgacatagcagaattgcgctaataccgcccagcgccagtgacgaatacgcgccagacgagaaagcgatgcggagaacgatccttgtttggcgtcactgtgattatcactctgcaatgccgggaatttcgtcagcatgatcagcagggcgaccagtaacacgatagccacgatgatcatataaggtgtctgtaccgataataccaggctgtgtttatacgcactcaattgctctggagacattttatcgagaacgtcttgcgattgatgtggcacgttagacaaaataagactttgcccaaagacaaccgcgataattgcgccaaacgagttaaatgtttgcgcaagatttaagcggaagtgaccactgctttccggccctaataccgtaacaaaagggtttgcggcagtttccagacaacctaatccggctgcaataataaataggccaactaaaaataaggtgtagttcattatttctgcagcgggccagaataatgcagcgcccaaggcatataaaaataatccggtaataatccctgctttataactgagttttttcatcaatatcccagcagggattgggataatgaaataaccaaagtaaaaggccgattggatcaggccagcctggaaatttgtcagcgtaaaagcctgctggaattgaggtaataaaatgtcgttaaggttattggctaccgcccaaagaaaaaacagtgagcacagcagcgcgaatggaataatgtaacttctgctttgccctgcatctttatctaccgcacggtaactctgcgtttgtattgatgtgtttcccatagcatcctcttaggttcagaagcttaagcacgtaatcggttatgttttcaaaagtgcaaaaccagcgagttcgggcttcatatcagtgaatatttgcctgtctgaaatgaactcatggattcattttcaaataaaaaacgctctgtaatatgacggcggtcacacttattagctggaaggtgactttatgtgactaccatcactttaataatcgaaatttcatgcccgtttcagaaaataaatcataaaaaacacaaaccagatgaccgtattaattgtttatgccgaaaacgggcattcctggcttgagtgaatagaaaaatgaccgttttgataaatatttttaagagcggtcatttttaatggggttataaaaagagaacttgcagttatttactgtgattagttgaaccaggtcacaaaatataagcttgtgaatttctttctggttaatcaggaagaagatggtgggtaattaaacggctaattcaatagtgtgaaaggaacaacattattgccctgttttgaatcagagagaggtagctaatggaacgaaataaacttgctcgtcagattattgacacttgcctggaaatgacccgcctgggactgaaccaggggacagcggggaacgtcagtgtacgttatcaggatgggatgctgattacgcctacaggcattccatatgaaaaactgacggagtcgcatattgtctttattgatggcaacggtaaacatgaggaaggaaagctcccctcaagcgaatggcgtttccatatggcggcctatcaaagcagaccggatgccaacgcggttgttcacaatcatgccgttcattgcacagcagtttccattcttaaccgaccgatccccgctattcactacatgattgcggcggcaggtggtaattctattccttgcgcgccttatgcgacctttggaacacgcgaactttctgaacatgttgcgctggctctcaaaaatcgtaaggcaactttgttacaacatcatgggcttatcgcttgtgaggtgaatctggaaaaagcgttatggctggcgcatgaagttgaagtgctggcgcaactttacctgacgaccctggcgattacggacccggtgccagtgctgagcgatgaagagattgccgtagtgctggagaaattcaaaacctatgggttacggattgaagagtaatttcgtaaagcaacaaggagaaggatgatggctaacagaatgattctgaacgaaacggcatggtttggtcggggtgctgttggggctttaaccgatgaggtgaaacgccgtggttatcagaaggcgctgatcgtcaccgataaaacgctggtgcaatgcggcgtggtggcgaaagtgaccgataagatggatgctgcagggctggcatgggcgatttacgacggcgtagtgcccaacccaacaattactgtcgtcaaagaagggctcggtgtattccagaatagcggcgcggattacctgatcgctattggtggtggttctccacaggatacttgtaaagcgattggcattatcagcaacaacccggagtttgccgatgtgcgtagcctggaagggctttccccgaccaataaacccagtgtaccgattctggcaattcctaccacagcaggtactgcggcagaagtgaccattaactacgtgatcactgacgaagagaaacggcgcaagtttgtttgcgttgatccgcatgatatcccgcaggtggcgtttattgacgctgacatgatggatggtatgcctccagcgctgaaagctgcgacgggtgtcgatgcgctcactcatgctattgaggggtatattacccgtggcgcgtgggcgctaaccgatgcactgcacattaaagcgattgaaatcattgctggggcgctgcgaggatcggttgctggtgataaggatgccggagaagaaatggcgctcgggcagtatgttgcgggtatgggcttctcgaatgttgggttagggttggtgcatggtatggcgcatccactgggcgcgttttacaacactccacacggtgttgcgaacgccatcctgttaccgcatgtcatgcgctataacgctgactttaccggtgagaagtaccgcgatatcgcgcgcgttatgggcgtgaaagtggaaggtatgagcctggaagaggcgcgtaatgccgctgttgaagcggtgtttgctctcaaccgtgatgtcggtattccgccacatttgcgtgatgttggtgtacgcaaggaagacattccggcactggcgcaggcggcactggatgatgtttgtaccggtggcaacccgcgtgaagcaacgcttgaggatattgtagagctttaccataccgcctggtaaatgcgctgatgtgataatgccggatacgacgtttgcggcgtatccggctcgccgttaccgtaccaaccgcaattgctgtaaattgccgtcgatatgcaaatcggtttgtaagcgggcaatatcgcggcacagaaacgccatctctttatgggtttctaattttttgcgccacttttcggcaaccgcatccagattctcatatattccttccagactctgaaactcgaccagcagctgcgtggcgctttttggtccgattcccgcaacacccggtacctttgaactgctgatccccgcaagtccccagtaatcgggcaactgctgcggttgaacgccaaattctttatcgataaatggcgcatccagccaacgtttctggaagtaatcacgaatacgtaatgtcggtgaaagtaactgacagtagcctttatctgtcgaaacaatcgttgcctgatgcccggcctgtgtcactttgaccgccagcgtggcggctaagtcatcggcttcgttgccgctggttgaccagcacgggacgccgcgttgctcaaaggcggcgcgtaatgcaggcatctcgtcgtgcaactcttccggcattggcggtcgacccgctttgtaatctggtaaacgctgatgacgccagccgctactgcggttttcatcatcaaaaacggcgaccgcgtgggttggctggctgtgcataatgagctgatcgagcgcgtgctggcaggtttcgacacagggcgaaccctgaacggcatgaatgcgacgaataagattcagtgcatcgacaataagcaaatgaacagccacgataacccccttaaagatcaggcgataagggtaacattcgatgccggaacaggctacggctggatgagaaatcgggaagaggcctcgcaaaacgaggcctctggagagcgattaatcgcaggcaacgatcttcattgccaggccgccgcgagaggtttcgcggtacttggcgttcatatctttacctgtttcgtacatagtttcgataactttatcgaggcagacgcgcggctcgctggtacggcgtagcgccatacgtgcggcgttcaccgcttttactgccgcaatggcgttacgctcgatgcatggcacctggacctgtccggcgaccgggtcacacgtcagaccgaggttgtgctccatggcgatttccgccgcgatgcacacctgcgccgggcttgcacctaacagttctgccagaccagccgccgccattgagcacgccacaccaacttcaccctggcagccgacttcagcaccagaaattgacgcgttcatcttataaagagaaccaatggcactggctaccagcaggtaacgagccagtgagttagcgttcacttcgcggataaacttatcgtagtacgccagcacagccgggataatcccgcacgcaccgttagtcggcgcagtcaccacgcgtccgccagcagcgttctcttcgttcactgccaatgcaaacatgttgatccagtcaacaaccgccatcgggtcagtggtggttttatcctggctgaccagcatccggcgtagtgctgcagcacggcgtggaacgcgcagtttgccaggcaacacgccttcggtggaaataccgcgctcaataccgccacgcatgacttcccatacgttcgccaggtgctgttccagctcttctttgctgtgcagcgccagctcatttttcatcatcaggccagagagtgacagcccggtttcctgacaatgtttttgcagatcggctgctgaactgtacggataaggaacttcaaccggtgcgctattctgctggccaaaatgctcttcatcaacgataaagccaccgccaatagagtagtaagtctggctgtaaacgactttatcgcccgccagcgcggtaatgcgcataccgttttcatgcagagaaaggttgtctgcatggaagttcatgcactgatcaaccgggaactccacttcatgctgaccgtttgccagcatcaggcgaccatgagtattcacatcctgaataaaaccagggatggaatcgatatccacggtatccggcaggttacccgccaggcccataataatggcgatatcagtgtggtggcctttaccggtcagagagagcgagccgtacacgtcaaccaccacgcgggtcacgtctttaagcagattacgggcaatcagatcgtcggtaaattgtttacccgctttcattggtccaacggtatgagaactggaagggccaatgccgattttgaaaatatcgaatacgctaatcataggaaatacatcgcgttaaaacggaggaagcgccgcccgaaagcggcgcgaaaggacttagctgaacagagagtagaagattgcggagattgcaatcagacccatcacgacaacgaatacgttgctgatgtgaccgctgtacttacgcattgccggtactttctgaattgcgtacatcggcatcaggaacaggatcatcgcgatgattgggccgcccagggtttcaatcatacccaggatgctcgggttcagggtggcaacaatccaggtcgttaccagcatgaacagcgcagtgatacggttcagcttgttgatttcgatagacttacctttaccacgcagagatttaatcaccataccgttgaagccttcacgtgcgcccaggtagtggccgaggaaggatttggtgatagcgataatcgcgataatcggagccatccacgcgataaccggtgcgttaaagtggttagccaggtaagacagaatcgagatgttctgctctttagccgcagccaggtctgccggagtcaggctcagtacgcagctgaagacgaagaacattacggtcagcaccatcatgatgtgtgcgaatgccaggatcttcgagcatttctgttctgccatatcgccgtactcttcacgcttcgcaacggcgaaagaagagatgatcggagagtggttgaacgagaacaccattaccggaattgccagccacagggtcatccacagaccgtttccggttgcagatgcagtgtccagagacagcgtttccagtgctgcgccgttccactgcgggatcaggtacagagccagcagcatcagtacgccaacaaacgggaataccagaatactcatcgctttaacgatcatctgctcaccaaagcgaacgatggtcatcatacccacgatcaggatcagcgacagaatcgcacgcggcggtggcgtcatacccagctggtgagacatgaagctttcaactgtattggtgattgccacgctataaaccagcaggatcgggtagatagcgaagaagtagagcagggtaatcagtttacctgcgccaataccaaagtgttcttctacaacctcggtgatgtcttcgcccgggtttttaccagacagtacgaagcgagtcaggccgcggtgagcaaaaaacgtcatcgggaacgcaaggatagccatgatgatcagcgggatcataccgccaacaccggcgttgattggcaggaacagcacgcccgcgccgattgccgtgccgtaaaggcccagcatccacatggtgtctgtcttgcgccaggcactacgagagtctttcgacgcaatcgtgctggtttgagtcgtttccatctatttctcctggaggaatgcaaataattcagcttttagccagttcagcccgggaaggtgcctgaccgtaaaaatgaaatctgtctatcggcgatggcttaatcatttaccgccgtaataatttgagggcggaaagatacacacaagttatgtatctatcagtgatcttgatctcaaatacaataatctacttggaagatagattatcccaacgctttactctgtaaatcaaaagtaaaagagaatttaagggcaatatttgcccattaaacgacatctgacttcttccggggcgcgcaatatatgtaggttgaactgaaaaaatcaatacttttagttaatcatggcgataatttctttttcatagcgataaaatacggtttatgaaaatagggaaacgtttgcgttgcaacataaattgtatgacatattaactgtgatgatatttgtcgcgtgagggtggtaagaaacattcatataacaaatgaaatgagttgatgagtaagtgaccaaaaacgagaaaacccggcaacaaacgtcaccgggggagcggagattacgtgcagatttcgtagcaagggatgtaggctgagcctggcaacttcatacgatgctgggcaacaaaaccctgtagcaggtcgtccatacgacgcataatctctttatcgccgttgattttgtaaggaccaaactcttcaatggcgcgaataccgacttcttttacgttacccgccacaataccggagaacgcacggcgcaggtcggcagccagcacttcaacaggttgatccgggtaaagcttcagattagccatattctcgtgagacggctcaaacggcatttgcaaatctggtgcaatgcgcattgaccagttaaagctgtaagcgtcaccagtgtcgcggcgattttctttcaccagcggcatcgattttttcatctgacgagcgacttcagcggcgtcatcaatgatgatgcggtaatggcggcgcgcgttttcgcccagcgtatgtacgacaaactcgtccagtacgcggaagtagtcggcgctctctttcgggccggtgaggatcaatggtaaaacctgatctttgttggccgggttcattaaaattcccagcaaatacagcaactcttctgccgtacccacacctccagggaagataatgatgccgtgagcgatacggacaaacgcttccagacgtttttcgatatccggcatgatgatcaattcgttgaccagcgggttaggcggttcagcggcgataatcgacggctctgtcataccaataaaacgactgtctttgtaacgctgctgcgcgtgtccgaccgcagcacctttcatcggcgcttccatcgctcccggaccacagccggtgcagatattcagctcacgcaggcccagctggtttccgacgcgacgggcatacaaatactcgttttcgttaattgagtgaccgccccagcagaccaccatatttggcgcttcacccacatgcagcgcgcgagcgttacgcaagatggaaaagaccaggttagtgatgtggacggagttgtcgagattcaggttgggaaaacgaacggtattatggatttgcccgtaaacgaagagaatgtctcgcagaaccgcgaacaagttggcctgcaaagcgcgaataattcgcccatcgacaaaagcctcttccgggggattaatcagttccagctttacgccgcgttcacggcgcaggacgttaatatcgaaattttcaaaacgagacagcaattctttgctgttatcggtcaaactaccggagttcagtacggcaagtgaacagttgcgaaacagttgatagaggtcgctgctggcggtgcgtttaagcatatccacttccagctgcgacaacatatccatggagccaagcgggctaatatgtgtaatcaagaaaaactccttatgggacgaatatcgtcattccctttgattacaatagccctgcctgatgacctttcacaaccttctgcgtgaatccagcacgcaaaattgagaaaaaatttattgccgaaccagtcttgtggtcgatgggacaaaatcgctattactgcgccacgggttaatgtccagaccgccacgacgggtataacgtgcgtaaacgcttaatttctctggctggcagaagcgtaacaggtcattaaagatgcgttccacgcactgttcgtggaactcgttgtgatgacggaatgagaccaggtaacgcagcagtttttctctgtcaatttggcgtccacgatactgaatttggatcgaaccccaatctggttgatgggtgatcaggcagtttgatttcagcaggtggctgacaagcgtctcttccactactttttcaccgctggtggcattctccagatagtcagtagtgaattcatagttatcgatagtgatatcctggtcatcaatgcaggtgccattgaaatgacctatcggctggccttccagttcatcaagacgatataacgccacgctaaccttaccctgggcgcaagtgcttaagtcgcgctccagcgtctggcgcacctcatcccagttattaaaacgcgtctggttaaaactgttgagatagagcttaaaactcttcgactcaatcagatttacgctggtgtaatcaagttcaacatgaccgacagcgacctgcggcaaacctttcgcattcagccaggaaagttcatacagcgtccagatatccgtaccgtgaaaaggcaggttatccgctttcagacccagcgggtcgcgattcaggctgcgtggaacgccttgcagtaggctggcgtcataggtatcccggtaatcggttgattttccaagagtcaggcccgcaagtgcctgatggtttgcataagaagacatgtttcaccgtcataaaccagataaactaaacgacaagtgtatctggtttaagtgaagagagaaattagtggacgatttgaccgcacaagccctgaaagattttactgcacgctactgcgatgcgtggcatgaagagcataaaagctggccgttaagtgaggaactgtacggtgttccttcaccgtgcattatttcaactaccgaagatgccgtatactggcaaccccagccgtttaccggggaacaaaatgtaaacgcggttgaacgcgcttttgatattgtgatacaacccacaattcataccttttatacgactcagtttgccggggatatgcacgcgcagtttggcgatatcaaactgacattgctgcaaacctggagtgaagacgacttccgtcgggtgcaggaaaatctgattggtcatctggtgactcagaaaaggctaaaactgccgcccacgctatttatcgcgacgctggaagaagagttagaggtcatctcggtgtgtaatctctccggtgaagtgtgcaaagagacgctgggaacacgtaaacggacgcatttagcctcaaatcttgcggaattccttaatcaacttaagcctcttctgtaatccaaataccccatctggttgtgagagatctcttacagactctgtaggagatcgccaggaaataagcgaatacttaaaaagataagaatcgttattttcatttaaaatcaaaatgttgattgttaattcttaactttcatatgaaattttccttaaggcattgtctgtaagcgccttgtaagacttcgcgaaaaagacgattctatcttcgtcgacagggagtcagacaacgaagtgaacatcaggatgatgacacttctgcaggacacaccaggatggtgtttcagggaaaggcttctggatgaagcgaagaggatgacgcaggacgcgttaaaggacacctccaggatggagaatgagaaccggtcaggatgattcggtgggtcaggaaggccagggacacttcaggatgaagtatcacatcggggtggtgtgagcaggaagcaatagttcaggatgaacgattggccgcaaggccagaggaaaagttgtcaaggatgagcagggagcaacaaaagtagctggaatgctgcgaaacgaaccgggagcgctgtgaatacagtgctccctttttttattcctgctatccttcgcggcagtttttcttattgaggttgctttatgaccactcatgaccgcgttcgtctccagttgcaggcgcttgaagcgttactgcgtgaacatcagcactggcgaaacgatgaaccccagccgcatcaatttaatagtacccaaccgttctttatggacaccatggaaccactggagtggttgcagtgggtgctgatcccgcgaatgcacgatttgttagataacaaacagccgttaccgggcgcttttgccgttgcaccctattatgaaatggcgctggcgacggaccatccgcaacgcgcgcttattctggctgagctggaaaaactggatgctctttttgcggatgatgcgagctaatgctggaaatactctatcaggatgaatggctggttgcggtaaataaaccctccggctggctggttcaccgcagctggctggatcgcgacgagaaagtagtggtcatgcaaaccgtgcgtgatcagattggccagcacgtttttaccgctcatcgtctggaccgacccacttctggtgtgttgttgatgggattatccagcgaggccggacggctgctggcacaacagtttgaacagcaccaaatccagaaacgttaccatgcgattgtgcgcggctggttgatggaagaagcagttctggattatccactggtggaagaactggacaaaatcgctgataaatttgcccgcgaagataaaggctcgcagccagcagtgacgcattatcgcggtctggcgaccgtagaaatgccggtagcgaccggacgttacccgaccacgcgctacggcctggtggaactggagccgaaaaccggacgcaaacatcagcttcgccgacatcttgcccatttgcgtcatccgattattggcgatagcaaacatggcgatttacgccagaatcgcagcggtgctgagcattttggcctccagcggttaatgctacatgccagtcagttgtcattgacgcatccttttactggcgagccgctgactattcacgcgggcctggacgacacctggatgcaggcgttatcacaatttggctggcgcggtctgcttcctgaaaatgaaagggttgagttcagtgcgccatcgggtcaggatggagagataagttcctaatccagggagaaaacggtatggcggaaattggtatttttgtcggcaccatgtacggaaattcgctgttagtggcggaagaagcagaagcaattctgaccgcacagggccacaaagcaacggtatttgaagatcctgaattaagcgactggctgccttatcaggataagtatgttctggtggttacgtccacgaccgggcagggcgaccttcctgatagcattgtgccgctctttcagggaatcaaagatagtctgggcttccagccgaatctgcgttatggcgtgattgcgctcggcgacagcagttatgtaaatttctgcaatggcggcaaacagttcgatgccttgttgcaggaacagagcgctcagcgggttggcgaaatactgttgattgacgccagtgagaacccggaaccggaaacggaatcaaatccgtgggtcgaacagtggggcacgctgttgtcctgatatgttcagcgagcggtaaatgtcgttttagcggtgctgaatcgaatcttttcaggcaaatgccagtaaaaactgcttcatagcgcggatttttactggcgtttgcctggagtcaagcgatccatttcatactcttctttatttcttcgttttaacccttcctttcttgttcttgttttcatttccgtgaagtggattccaccgtccagggctaatgccaaaatcgggcctcattgaacgcattaatgttgtgttgttgcacggtgagccgctatggcgcgctttttatactgctattgccagatataaacacgcgccgtattcggcgaacgacctataaaaacggcaaaaaacaccctacgtcacctctgatttcctggctatgtcgcagtccagagtgagcgtggctaacgcgaattttcaggagtgcaacaatgagttctttaagtcaggctgcgagcagtgtggaaaaacgcacgaatgctcgttactggatagtggtgatgttgtttatcgtcacatccttcaactacggcgaccgcgctacgctttctattgccggttcggaaatggccaaagatatcggccttgatcccgtgggaatgggctatgtgttctctgccttctcatgggcttatgttatcgggcagatccctggtggctggttgctggaccgttttggttcaaaacgcgtctacttctggtcgatctttatctggtcgatgtttaccttgctgcaaggcttcgtcgatatctttagtggattcggcattatcgttgccctgtttactctgcgcttcctggtcgggcttgctgaagcgccatctttccccggcaacagtcgcattgttgcggcctggtttccggcgcaggaaaggggaacggcggtgtcgatttttaactccgctcaatacttcgcaacggtgatcttcgcgccgattatgggctggctgacgcatgaagtgggctggtcacacgtcttcttctttatgggcggtctggggattgtcatcagctttatctggttgaaagtcatccacgagccaaatcaacatccgggggtaaatcagaaagagctggagtatatcgccgcgggtggcgcgctgatcaatatggatcagcaaaacaccaaagttaaagtgccgttcagcgtgaagtgggggcagatcaaacaactgctcgggtcacggatgatgatcggcgtttatatcggtcagtactgtatcaacgccctgacttactttttcattacctggtttccggtttatctggtgcaggcgcgtgggatgtcgattctgaaagcgggctttgtggcttccgttccggcggtttgcggttttatcggcggtgtgctgggtgggattatttccgactggctgatgcgccgcacgggatcgctgaacattgcgcgtaaaacaccgatcgtaatgggcatgttgctgtcgatggtgatggtgttctgcaactacgtcaacgttgagtggatgatcatcggctttatggcgctggccttcttcggtaagggcatcggggcgctgggttgggcagtaatggcagataccgcgccaaaagagatcagcggtctttccggtggcctgttcaacatgttcggtaacatttctggcatcgtcacgccaatcgcaattggttatatcgttggcacgactggctcctttaatggggcgctgatttatgttggtgttcatgccttaatcgcggtactgagctacctggtgctggtgggcgatatcaagcgtatcgagctgaaacctgtcgcggggcaataagatgacgacacaatccagtcctgttattactgatatgaaagtcattccggtcgccgggcacgatagcatgttgcttaatattggtggggcacataacgcatatttcacccgcaatattgtggtactcaccgataacgccgggcataccggcattggtgaagcgccgggcggagaggtgatttatcaaacactggtcgatgctattccgatggttctgggccaggaagttgcgcgcctgaataaagtggttcagcaggtgcataaaggtaatcaggcagccgattttgataccttcggcaaaggtgcctggacttttgaattgcgcgttaatgccgtggcggcgctggaagccgccttgcttgacctgctaggtaaggcgctgaatgttccggtctgcgaactgttggggccaggcaagcaacgcgagactattaccgtcctcggttatctgttttatatcggtgatcggaccaaaaccgatcttccttatctggaaaatacgccgggcaaccatgagtggtatcagttgcgccatcagaaagcgatgaacagcgaagccgttgtgcgtctggcggaagcctcacaggatcgctatggctttaaagatttcaaacttaagggcggggtgttacctggcgagcaagaaatcgacactgttcgtgcattgaagaaacgcttccctgatgcgcggattaccgttgatcccaacggtgcctggctacttgatgaagccatttctctatgcaaagggctgaatgatgttcttacctatgccgaagatccatgcggcgcagaacagggtttctccggtcgtgaagttatggcggagtttcggcgggcgaccggcttgcccgtcgcgactaacatgatcgccaccaactggcgcgaaatgggtcatgcggtgatgctcaatgcggtagatattccacttgccgatccgcacttctggacgctttccggtgcagtccgtgtggcgcagctttgcgacgactgggggctgacctggggctgccattctaataaccatttcgatatctctctggcgatgtttacccatgtgggcgcggcggcaccgggtaatcctaccgctatcgatacccactggatttggcaggagggcgattgtcgcctgaccaaaaatccgctggagattaaaaacggaaaaattgccgttcctgatgcgcccggtctgggcgtggaactggactgggaacaggtacaaaaggcacatgaggcctataaacgtctgcctgtcggtgcgcgtaacgacgcaggtccgatgcagtacctgatccccggctggacctttgaccgtaaacgtcccgttttcggccgtcattgattctgaaaaaggacataaatatgagttctcaatttacgacgcctgttgttactgaaatgcaggtcatcccggtggcgggtcatgacagtatgctgatgaatctgagtggtgcacacgcaccgttctttacgcgtaatattttgattatcaaagataattctggtcacactggcgtaggggaaattcccggcggcgagaaaatccgtaaaacgctggaagatgcgattccgctggtggtaggtaaaacgctgggtgaatacaaaaacgttctgacgctggtgcgtaatacttttgccgatcgtgatgctggtgggcgcggtttgcagacatttgatttgcgtaccactattcatgtagttaccgggatagaagcggcaatgctggatctgctggggcagcatctgggggtaaacgtggcatccctgctgggcgatggtcaacagcgtagcgaagtcgaaatgctcggttatctgttcttcgtcggtgatcgcaaagccacaccgctgccgtatcaaagccagccggatgactcatgcgactggtatcgcctgcgtcatgaagaagcgatgacgccggatgcggtggtgcgcctggcggaagcggcgtatgaaaaatatggcttcaacgatttcaaactgaaaggcggtgtactggccggggaagaagaggccgagtctattgtggcactggcgcaacgcttcccgcaggcgcgtattacgctcgatcctaacggtgcctggtcgctgaacgaagcgattaaaattggtaaatacctgaaagggtcgctggcttatgcagaagatccgtgtggtgcggagcaaggtttctccgggcgtgaagtgatggcagagttccgtcgcgcaactggcctgccgaccgcaaccaatatgatcgccaccgactggcggcagatgggccatacgctctccctgcaatccgttgatatcccgctggcggatccgcatttctggacgatgcaaggttcggtacgtgtggcgcaaatgtgccatgaatttggcctgacctggggttcacactcaaacaaccacttcgatatttccctggcgatgtttacccatgttgccgccgctgcaccgggtaaaattactgctattgatacgcactggatctggcaggaaggtaatcagcgcctgaccaaagaaccgtttgagatcaaaggcgggctggtacaggtgccagaaaaaccggggctgggtgtagaaatcgatatggatcaagtgatgaaagcccatgagctgtatcagaaacacgggcttggcgcgcgtgacgatgcgatgggaatgcagtatctgattcctggctggacgttcgataacaagcgcccgtgcatggtgcgttaagacagaaaaccaaaaccggctctatctggagccggtttgagactgatgctaaacgcaaaatagcctgttgtgctatgtatcaggtctacatcattttttaattcattgaatttaattggttttgtaggccggataaggcgttaacgccgcatccggcataaacacaggcactttgtcaccaatctgaaaccagcgtcataaaaagccgattgctactcgacaagacatccattacccgagaattttgctggcttcgcgcgcgacattatccatctcgtccaacagttccagcagctccggttccaaatcttcttctttagtaccgctacgtagctgttgttcgatcagttggcagagattcttcatacgtggcacaccgctatagccgcaactgccatgcagtttatgaatcaaatcaaccaggccttccgggttttctccaaccagctgttcctcaactttgttgcgaacttcaggcaggaaatcgagtaacatttgcagcatatcgcgcgctaaatcggtttttcctgctgcctggcgtagtgccagttgccagtcgagggtcgcattcgggttcaccacaatttcgttgacttcgggcgtcacgacgcgagaggaaataccgctgccaggcttgtagcgcaacaacaaattatgcaatcgctcttcttcaatcggtttcgccagataatcgctcatccctgcgccaagcagcttctctttttgcccggccattgcatgcgccgttaccgcgataaccggcgtttgttgctgatgcgggagttggtggatgagttcgcaggcccgaatgccatccatgtccggcatttgaatatccattaagatcaaatcgaacggcatctgtttcgcccgttcaaccgcctgatgcccgctatcgcaaagttccacatgttgcaccatatcttccagcaatgcgccgataagtttcaggttagcggggttgtcatcaaccgccatgactgtcattgccagcttactttcatcggttacaggcaaaagcgtgttttgtttgtgatgacaaaattccgtcagggcaggcaacaggcgtgtaggtgttaatggtttcagcagacacgcgccgataccatcttgcttgagtttttcagcattgacttgtgcatggcaaggaagtgccagcatcaggaaatcggtcatcgataccgctttcgctaatcgctcatgttgcattgttagcggctcgcggaaggtcaccgcgatgcctaacaacatcatgtcgtaatgcgcgggaggcagcgcggagaacgttgggctataaaccacttccagcggcgtttcacttaaaatatccagcgtgcattgcgctgctgcggagtttggttcgacataggccaggcgcttacctgcgaggcactgggtggatggcccttcgataataatgttcgggttcagatcgagattaatgtggaaccagaaagttgaaccgcgattcggctggctatggaacgaaatatcgccgcccatttcattaaccagtttttgtgtaatcaccagccccagcccggtgccaccatgacggcgggaaatactggcatcagcctgtcggaaggcctggaataagcgcgattgatcgcgttcaggaataccaatgccggtatcccgaatctgcacttcaatctgcactttggtattactcagcgcacgtttttctaccagaatatcaatgttgccattctcggtgaatttaattgcattccccaccaggttagtgatgatttgctgtaatcgcagcgggtcgccgatcacgttatcaggcacgtcgcttttaatattgagcgtcagttccaaccctttatcgtgagaagaatgtgccagcagagtaacgacttcatccagcgtgctgcgtagtgggaatggaatactttccagaatcagcttacctgcttccagtttcgagaagtcgagaacatcattaataattgccagcaaattatttgccgaacgttcaatcgtattcaggtgatcgcgctgcgttggtgttaattctgttttcagcgtcaggcgggtaaagccaataacaccattcagtggtgtacgcagctcgtgtgacatatttgccagaaactcggatttaatacgcgccgcttcctgggcgcgctttttcgccagatccaactcaacgttctgaatttccatctgctccagcgtttcacgcagatcggacgtcgcctggtcgatattgtgctgcatctcttcgtgataagcagccagcgacattgccatcgagttgataccgtttttcagcatgtccagctcgccgagcataaatccttccacccggctgtcgagttgcccgcgacggatgcggtcgacggtattcaccatgttgcgaatcggaccggttacatcgcgcattaagcgccagccaaaaataagcgcaataccgatacaaaacagcatcatcacgctggaaataaagatctctttatattgctgcaagcgaaccgatttaagatccagctccagcgcaatatatcccaacatattttgactatttttggcatcgctactgggcgattcgtcgggggagtaactctcagaaataatcggcgtgcggaggatcataatatcgccgtcacgagtgacagtgagctggcgaggaaacggcacgttgctgccgagctgcattgatgagggatcaagatgaaaattggaggtgacaaagagtcggttattttcatcataaaccgaaatcgcgcgaacaatatcggaatggcgacgatgcagtacgcttattaactgaccgatagattcgcgattttgcaggctcatgccatattcagtagaaactgcaagcggctcaataatgctggcaccggcatcttccagttgacgctgcaagtcgttatagcgatgcacgacgaaaaagatactcagcaataaaccaataaggacggtcggtgccaggatcagaatcatcatgcgtgcgcgcaggctgtagttggtcatggagttccgttatgggacaattaaggtcacactgttaaattgagaaagtctcgccaatggcgcaattctactctgcaaaacgacgcacgacgacgcgtcagatcataaccgtttcagtcaacgacctcgactcttttggtcagggcgtggcgcgacataacggcaaaacgctatttatccccggattattgccgcaggaaaacgcggaagttactgttactgaagataaaaaacagtatgcccgcgctaaagtcgtacgccggttaagcgatagcccggaacgcgaaacgccacgctgtcctcattttggcgtatgcggtggctgtcagcaacaacacgccagcgtggatttacagcagcgaagcaaaagtgcggcactcgcccgattaatgaaacacgatgtctctgaagtgatcgccgatgttccctggggctatcgccgtcgcgcgcgtttaagtctgaactacttaccgaaaacacagcaacttcagatggggtttcgcaaagcgggctccagtgacattgtcgacgtcaaacaatgccccattttagcgccccaacttgaagcattgcagcccaaagtcagggcatgtctgggcagcttacaagctatgcgccatcttggtcatgttgaactggtacaggcaaccagcggcacgctgatgattttgcgccataccgcaccgctaagttcggcagatcgcgaaaaactggaacgcttttcgcattctgaaggcctggatctgtatctcgcccccgatagtgagatactcgaaaccgtctctggtgagatgccctggtatgactcaaacgggttgcgcttaacttttagcccgcgcgattttattcaggtcaatgcgggtgtgaaccaaaaaatggtagcgcgtgcgttggaatggctggatgtgcaacctgaagatcgcgtactggatctgttctgcggtatgggcaactttacactgccattggcgacacaagctgccagtgtggtcggtgtagaaggtgttccggcgctggtggaaaaaggccagcagaatgcgcgtcttaatggcttacagaatgtgacgttttatcacgaaaatcttgaagaagatgtcacaaagcagccgtgggcgaaaaacggcttcgataaagtgttgctggacccggcgcgagcaggtgccgcaggtgttatgcagcaaattataaaactggaacctattcgtatagtttatgtatcctgtaaccctgcaacgctggctcgggatagcgaagcgttattaaaagcaggatataccattgcgcgactggcgatgctggatatgttcccacacacgggacatctggaatcgatggtacttttctcgcgcgttaaatagttgcgatttgccgatttcggcaggtctggtccctaaaggagaggacgatggttgcggtaagaagtgcacatatcaataaggctggtgaatttgatccggaaaaatggatcgcaagtctgggtattaccagccagaagtcgtgtgagtgcttagccgaaacctgggcgtattgtctgcaacagacgcaggggcatccggatgccagtctgttattgtggcgtggtgttgagatggtggagatcctctcgacattaagtatggacattgacacgctgcgggcggcgctgcttttccctctggcggatgccaacgtagtcagcgaagatgtgctgcgtgagagcgtcggtaagtcggtcgttaaccttattcacggcgtgcgtgatatggcggcgatccgccagctgaaagcgacgcacactgattctgtttcctccgaacaggtcgataacgttcgccggatgttattggcgatggtcgatgattttcgctgcgtggtcatcaaactggcggagcgtattgctcatctgcgggaagtaaaagatgcgccggaagatgaacgcgtactggcggcaaaagagtgcaccaatatctacgcgccgttggcaaaccgtcttgggattgggcaactgaaatgggagctggaagattactgcttccgttatctgcacccgaccgaatacaaacgcatcgcaaaactgttgcatgaacgccgtctcgaccgcgaacactatatcgaagagtttgtcggtcatctgcgcgctgagatgaaagctgaaggcgttaaagccgaagtgtatggtcgtccgaaacacatctacagcatctggcgtaaaatgcagaaaaagaacctcgccttcgatgagctgtttgatgtgcgtgcggtacgtattgtcgccgagcgtttacaggattgttatgccgcactggggatagtgcacactcactatcgccacctgccggatgagtttgacgattacgtcgctaacccgaaaccaaacggttatcagtctattcataccgtggttctggggccgggtggaaaaaccgttgagatccaaatccgcaccaaacagatgcatgaagatgcagagttgggtgttgctgcgcactggaaatataaagagggcgcggctgctggcggcgcacgttcgggacatgaagaccggattgcctggctgcgtaaactgattgcgtggcaggaagagatggctgattccggcgaaatgctcgacgaagtacgtagtcaggtctttgacgaccgggtgtacgtctttacgccgaaaggtgatgtcgttgatttgcctgcgggatcaacgccgctggacttcgcttaccacatccacagtgatgtcggacaccgctgcatcggggcaaaaattggcgggcgcattgtgccgttcacctaccagctgcagatgggcgaccagattgaaattatcacccagaaacagccgaaccccagccgtgactggttaaacccaaacctcggttacgtcacaaccagccgtgggcgttcgaaaattcacgcctggttccgtaaacaggaccgtgacaaaaacattctggctgggcggcaaatccttgacgacgagctggaacatctggggatcagcctgaaagaagcagaaaaacatctgttgccgcgttacaacttcaatgatgtcgacgagttgctggcggcgattggtggcggggatatccgtctcaatcagatggtgaacttcctgcaatcgcaatttaataagccgagtgccgaagagcaggacgccgccgcgctgaaacagcttcagcaaaaaagctacacaccgcaaaaccgcagtaaagataacggtcgtgtggtagttgaaggtgttggtaacctgatgcaccacatcgcgcgctgctgccagccgattcctggagatgagattgtcggcttcattacccagggacgcggtatttcagtacaccgcgccgattgcgaacaactggcggaactgcgctcccatgcgccagaacgcattgttgacgcggtatggggtgagagctactccgccggatattcgctggtggtccgcgtggtggctaatgatcgtagtgggttgttacgtgatatcacgaccattctcgccaacgagaaggtgaacgtgcttggcgttgccagccgtagcgacaccaaacagcaactggcgaccatcgacatgaccattgagatttacaacctgcaagtgctgggccgcgtgctgggtaaactcaaccaggtgccggatgttatcgacgcgcgtcggttgcacgggagttaggcagaaatttgctcgtatctacaatgtagattgatatatactgtatctacatatgatagcggtttgaggaaagggttatgatccactgtagcgtaaagcgttggggaaattcaccggcggtgcggatcccggctacgttaatgcaggcgctcaatctgaatattgatgatgaagtgaagattgacctggtggatggcaaattaattattgagccagtgcgtaaagagcccgtatttacgcttgctgaactggtcaacgacatcacgccggaaaacctccacgagaatatcgactggggagagccgaaagataaggaagtctggtaatggtaagccgatacgtacccgatatgggcgatctgatttgggttgattttgacccgacaaaaggtagcgagcaagctggacatcgtccagctgttgtcctgagtcctttcatgtacaacaacaaaacaggtatgtgtctgtgtgttccttgtacaacgcaatcaaaaggatatccgttcgaagttgttttatccggtcaggaacgtgatggcgtagcgttagctgatcaggtaaaaagtatcgcctggcgggcaagaggagcaacgaagaaaggaacagttgccccagaggaattacaactcattaaagccaaaattaacgtactgattgggtagtgttactaactcacttctattctggtcacaggtttccacctgacagacccgcaattttcaggacaattcaatgaatcaaatcgaccgtttgctcactattatgcagcgcctgcgcgatccggaaaacggctgcccgtgggataaagagcagacatttgccaccattgcgccttacacccttgaagaaacctacgaagtgctggacgccatcgcccgtgaagattttgacgatcttcgcggtgaactgggcgatctgctattccaggtggtgttttacgcgcaaatggctcaggaagaagggcgctttgactttaatgatatttgcgctgctattagcgataaattagagcgtcgccatccgcatgtttttgctgatagttctgccgaaaacagtagtgaagtgcttgcccgttgggagcaaatcaaaaccgaagagcgcgcgcagaaagcgcagcattcggcgctggacgatattcctcgtagtttaccggctttaatgcgtgcgcaaaaaatccagaaacgttgcgccaacgttggcttcgattggacgacgcttggtccggtagtcgataaagtctacgaagagatcgacgaggtgatgtacgaagcgcggcaggctgttgtcgaccaggctaaactggaggaggaaatgggggacctgctgtttgccacggtcaatctggctcgtcatttagggacaaaagcggaaatcgcattgcaaaaagcgaacgaaaaatttgagcgtcgttttcgcgaagtggagcgtattgttgccgcgcgtggactggaaatgacaggtgttgacctcgaaacaatggaagaagtctggcaacaggtaaaacggcaggaaattgatctctaagggaattacgcggtcaagcgccatttgtgtcattttttaaatgacaagcgcttgatttgcgtcaaaaacatttaccccaaaggggctattttctcactcctgatttcaatagtgcgctggcgaagaggagggataatgaaagtttgtggcacaggtcatgttcgggtatactgctttcccgtcctggttattccatcgtcttttcaacctaacttctcaggttcagcatgacaacgaactatatttttgtgaccggcggggtcgtatcctctctgggtaaaggcattgccgcagcctccctcgcagccattcttgaagcccgtggcctcaatgtgaccatcatgaaactggatccttacatcaacgtcgatccaggtactatgagcccaatccaacacggggaagtgttcgttactgaagacggcgctgaaaccgacctggacctggggcactacgagcgtttcattcgtaccaaaatgagccgccgcaacaacttcaccacgggtcgtatctactctgacgttctgcgtaaagaacgccgcggtgactacctcggcgcaaccgtgcaggttattccgcacatcactaacgcaatcaaagagcgcgtgctggaaggtggcgaaggtcatgacgtagtactggtagaaatcggcggtacagtaggtgatatcgaatccttgccgttcctcgaagcgattcgccagatggctgttgaaattggccgtgagcacactctgtttatgcacctgacgctggtgccgtacatggcagcgtctggtgaagtcaaaaccaaaccgactcagcactctgtaaaagagctgctctccatcggtatccagcctgacatcctgatttgtcgttcagatcgcgctgttccggcgaacgaacgtgcgaagattgcattgttctgtaatgttccggaaaaagcggttatttctctgaaagacgtcgattccatctataaaattccgggcctgttgaaatctcaggggctggacgattatatttgtaaacgattcagcttaaactgcccggaagcgaatctgtccgaatgggaacaggttatcttcgaagaagcgaacccggtaagtgaagtcaccatcggtatggtcggcaagtacattgaactgccggatgcttataaatcagtgatcgaagcactgaaacacggtgggctgaagaatcgtgtcagcgtcaacatcaaattgatcgattcacaagatgttgaaacgcgcggcgttgaaatccttaaaggtctggacgcaatcctcgtacctggcggtttcggctatcgtggcgtagaaggcatgattacgaccgcgcgttttgcgcgtgagaacaatattccttatctgggcatttgcctgggtatgcaggtggcgttaattgattacgctcgccatgttgccaacatggagaacgccaactctacggaatttgtgccagactgtaagtacccggttgtggcgctgattaccgagtggcgcgatgaaaacggcaacgttgaagttcgtagcgagaagagcgatctcggcggtaccatgcgtctcggcgcacagcagtgccagttggttgacgatagcctggttcgccagctgtacaatgcgccgacaattgttgagcgtcatcgtcaccgttacgaagtcaacaacatgctgttgaaacagattgaagatgcaggtctgcgcgttgcgggccgttccggggatgatcagttggtcgagatcatcgaagttccgaatcacccgtggttcgtggcttgccagttccatccggagtttacttctactccacgtgatggtcacccgctgtttgcaggctttgtgaaagccgccagcgagttccagaaacgtcaggcgaagtaagtaaaaaagttagagcggcaacgcgtaccctgggtacgcgttgtttgtctggagtttcagtttaactagtgacttgaggaaaacctaatgtccaaaatcgtaaaaatcatcggtcgtgaaatcatcgactcccgtggtaacccgactgttgaagccgaagtacatctggagggtggtttcgtcggtatggcagctgctccgtcaggtgcttctactggttcccgtgaagctctggaactgcgcgatggcgacaaatcccgtttcctgggtaaaggcgtaaccaaagctgttgctgcggtaaacggcccgatcgctcaggcgctgattggcaaagatgctaaagatcaggctggcattgacaagatcatgatcgacctggacggcaccgaaaacaaatccaaattcggcgcgaacgcaatcctggctgtatctctggctaacgccaaagctgctgcagctgctaaaggtatgccgctgtacgagcacatcgctgaactgaacggtactccgggcaaatactctatgccggttccgatgatgaacatcatcaacggtggtgagcacgctgacaacaacgttgatatccaggaattcatgattcagccggttggcgcgaaaactgtgaaagaagccatccgcatgggttctgaagttttccatcacctggcaaaagttctgaaagcgaaaggcatgaacactgctgttggtgacgaaggtggctatgcgccgaacctgggttccaacgctgaagctctggctgttatcgctgaagctgttaaagctgctggttatgaactgggcaaagacatcactctggcgatggactgcgcagcttctgaattctacaaagatggtaaatacgttctggctggcgaaggcaacaaagcgttcacctctgaagaattcactcacttcctggaagaactgaccaaacagtacccgatcgtttctatcgaagacggtctggacgaatctgactgggacggtttcgcataccagaccaaagttctgggcgacaaaatccagctggttggtgacgacctgttcgtaaccaacaccaagatcctgaaagaaggtatcgaaaaaggtatcgctaactccatcctgatcaaattcaaccagatcggttctctgaccgaaactctggctgcaatcaagatggcgaaagatgctggctacactgcagttatctctcaccgttctggcgaaactgaagacgctaccatcgctgacctggctgttggtactgctgcaggccagatcaaaactggttctatgagccgttctgaccgtgttgctaaatacaaccagctgattcgtatcgaagaagctctgggcgaaaaagcaccgtacaacggtcgtaaagagatcaaaggccaggcataagactgactttatctgatttaaaaatgccagcctccgggcttaatgccgatcagttaaggatcagttgaccgatccagtggctgtgtaagaatccggaaacgctcactcgtttccggatttttttatgcacattggacaggcccttgatttggtatcccgttacgatt

SEQ ID NO: 49 - DNA, 50690 bp, Escherichia coli
  source 1..50690: mol_type = genomic DNA
tttacgcacctcttttcctaacaaaacgccagccatctcaaaattagaactagtgttagacatatatccaagcctatctcttattttaagatacatctactgtctggtatttcagggggccagctcaatgcgctcgagaatccctccccacatatcatttagatattcgatatgagccaaaaccttatcaagacactctcgtgtaaaccattcagtatgcccgccaccggcgcttttctcccacggcgcattccaggggaaaaaggttgcgtgtaaagcccgctcaagattaaccattgccaaacgcgtaccacgatagacccgtgaaagcgcaaaatcgggattcacttgtagccctttaaaccgtgccaatggaccacatgaaatgccgattttaaaagtatctccgttctctggcaccagaacgtagaggtagtgttgtttctcttcttgcatatcaataccactgcttgatgagaaccgcgcaaatgttgactatgcgcgaaggttaatgtgaatagttgactatgcgcgatgtgactacagtcaaaagttgactgtagtcgatttaactccaccaaagatcgactatgtaagatattgtcgggagaaacgttgactatacgcgatgaaatgaccctaaaagccatctcaatagcgacttgcagaatattgacgccagcaaaaatccaccagcgtcaacgaatgtcgcctatagtcaacttctcgctatcgcatatagtcaatattatggattgcgcttatggatctggaagccgattttcctgccgttttttatctctgaaaatttaagatattcaatagcttccaaatctttcatggcttttctgataacgctattttgcacgctaacggatgatttgagattaagccttgctctaaggcgctcaatgctgacaggtgccgggttggcgggtagagcctcaaagaatgtatacagtaccttggctgtctctttgcgcccgagcttatccagcatcttcagcttcaggattcgcttatagtcaacatagtaaagttcagatagctgtttctgcggctggatctcgataacatcaagctcggtattcaggctgctatatgccaacaagttgacgttaatgttattgagatgaccttttgccgccgggaagcggaatttgacaactgtctgctgaatgcgtgtcagagagtcatcaatacttttacggaacgcctttgaaaggcgcttacgtggatagccgcatcgatcggcaaactcggagaatggcagggtgattatgccgtcatcatcaggtgcgtagtcaaacaacgcggaggttatgcccacccacaccttaaaatcagtatccatatccaggcgtggaccatgaatttcaattccctcatagccttcctgctcaacaattttgaggcttgatagttcttcggttgcgttcgttgtgtttgtagtaactgacgatccgcgacgtagcgccacattggtagattttaaggttggcacaaacacacctaagcgcaacaaagctatgggttgtatagtgctgttgttattgggcttcaggctgtggatttctcctgtatttcctgcaacttcttcaacgctaaggaagcctttactttcttccgacatcgtggtttctccatgtgtggcgcggcctggcgttaatttagatgactgttatcaacagctgtgaatattcaggctctaaaatcgcgtacagtcaacgtttctgtcgcgtatagtcaacaataaatcgcgtgcagtcaacataaaatcgcacacagtcaacataaaatcgcgtatagtcaatgttgatcccgttttaggccatgaacggcgcggcttacagcgatccgggatcttctttggatcttcctaggttctctttgggatctgtttattggatctatgctgtggataagttgaataaaccggccaacaaagccggttggaaggaaaccgtattattctacgctttcgatgagaagaccatgttcataacatttaagctcatcgccttcatacaggaattggtatccaacaccaccaccttccggcacattagggaataaatcatcacttaccgaagaacaaatcacaccaatgcagcgatcaacgctttctcgttcttcagtgctgaaaaaatcctcttcaataagcacttgattacattgctcatcagcataagttggaaatacatgctcgatacaatctggatgttttaaaccaagctgatcggcaagttcaaaagcatgacggtattgttcagatcctggcttgccaacagtgatttgctcaattttgtagattgaagtcgctttgttgatagtttgctttaccgttactttatcagacataaaaatcccatttagttaccgctgatagcgcggttgtaatcattaacgttgcgattcttcctgttaatccccatcagcatcgtttctgtatcgaggatatacgctggcagatcatcaaaatattcactgctaaactctggcatcctgcacataaatgcacttttgggggcaaggtagttaacctttgtcggcgttaaattcgctgatcgactcccggagcaaccgctgagtgtcagcaggaatacgctggcgaacattacccgccgcaaccagttgtttctgaacttcagcttttcgttccatttgactgtcagcatacttggcttgttctgattcatttttcacttcctggctgtgaaaatgttgctctgctttgttcatcgtctcaatggtctggttaagatccattattgacttatcacgttccttaacagcctgatcaagactgccaattttctccatggcttgctttagctgatgacgttcccatgcaaacccagcaccaacaagtgcgcaaatcagaacaagaacaccagtagcagcaagtttttccttcaaagacaaagctgtttttaacgtagaaaagaatgacatgtcttcctcctgaagaaaaattatcaatgaagtcctttgttactgtgccgctttgtttaattcatcaagaacagaatcaggaaccaaagcggcgactgcgctggctgtgctggccttatttgctgatgcttccgcaagcgcggtaccgatagcatggttataagcagttatggctacgttggcgctttcattcgctcgttcatactgctgttgtaacgcagttgtgggcgctgttgtctggttgaaaacaaccccaaactgttcagttgctactttcagagattcaatttgctcttctgttagtgctggtgggggagtggcagtgccgccgcctgaaccagagcctgacgagcttcctgaaccagtgttaagggtctggttaatctcccccatagcagcgactaaacttgatgtattaagcgcgtttacagcgtcctcaagcgatttagtaatagtcacatcaccaatggcaatagagatcggcagttctgatacttctcgctcattagcacggcagtaaacatcccaaccaatatcgagttgaagcagcattgacagatctgcataaccagccaacaggtccgcgtgcttagttgccagttctccaatgttcgttaagccggttgtggttgttctgatcgttgaaacatagctggtaatagtgtcgggatagacaattgtatccagaattaatccggtcaattcttctgcaagcagttttgctgtgttagcactgtttcgtgccgatgttatggcaccaggtgttttcatcccaccggcggcggccaattttttatatgcggataactggtagtctttttccagcatgatatctcctaacttacctgaaccagaccgtctccggacgctacggtagatccgcatgaaacagggtcaccaacgcatacgatccctttaccattgacggtaaaccatgccctggttgatataacttgcccaccgtgcgtactgtttccatcggtatgctgtgcatattgcttaccatcaactaacacttcgactccgttgactttaagtagtggttcactctctacaggaggcctggatgggaatcctccgtgccccgaacaaatgctgtcttttgttgcaatacttgccacgttatcaccaatgatttgctctgattttcgttattttaacttaggttatttgtggtctgtatggcgtttgcttgttacaaaattgctctaataaatattgttttttatgtcgtgttttcggtaccattcagccatcgcccttcaatgggcatttgtttggagtcgtcagatgcagatggagctaataagccgcaaggagttcgatagccgtgtaaccagcggtgaacttgacaacttgcaggctatcaaggtgaaagaaggcttttgcctcattgggaatcagagcggaacaaatcgcgtttttatgcttcgccgtacggatttgaagccatttgtctggaagaacgaaattggtcccagctcatacgctcaaacgaggggggggcacaacctagcctttttctacaaagacgagctttctgtggttgatattcaagggttacaacatgtttaagcactggaaaaacattactatttataaactttctcgtgaggcggatctgaccgacttagaagataaaaagaaaatgatccttttcacgccatgcggtagtcaggatatggccaagttcggttttgtatctccatttggtgataattccgaagttatcgctatgcatggaaatggttttatccttgttgaagcaaagcgcgaaacaaaaattcttcccccgccggttatccagcgagctattcaagaaaaaattgaaaaacttgagcaagaacaagcgcgtaaactgaagaaaacagagaaggactccctgaaagacgaagttctgcattctcttctgccacgggctttttcaaagttttctgttatccaggcgatctacgacggttcaactaaacgtatctatatcaatgccagcgcgcggcaggcagaggatatgctcgcgcttatgcgtaagtctctgggttctcttcctgttgttcccctgagtgttgaaaatcccattgaattaacgctgaccgactgggtacgtgatggtagtgctccacagggatttcaaatgggggatgcggcagaacttaaggcagtgcttgaggatggcggtattgcccgagtgaaaaagcaggatttgggaagcgatgaaatttccacacacctggaagctggcaagctcgtcactaagttggcactcgactggcagaaccgcattaaatttacactggaccataacttcagccttaccagcgtcaaatttgcggatgaattgcttgatcagaactctgatattgatagtgaagatgtagcgcagcgactggacgcagatttcttcctgttgaccagtgaaatttcgtgcctggttgatgctctggtaaatgcccttggtggagaggctaagcagtgaaagagctgtgctatggatctgtttgcagtggaattgaagccgcgagtattgcctgggaaacgttgggtatgcgtccggcgtggtttgctgaaatcgagccttttccatcggccgttcttgcgctccgctggccccatgtcgccaaccttggcgacatgacaaaacttgccaaaaaagtcttggctggggaaatcgaatcccctgacgtgctcgtcgggggaacaccatgttttaccgcggggcatatggttctttgtaaaaatggttataaaccaatagaagatgtttgccctggcgattacgtagtcagtcatctcgggcggttacaacaagtaaaaagagttggttcaaaaatagctaatacggggttacttaatgccgttgggcagcctttaggtataagaacaaccaatgaccatcccttcctggctgttcggtggaaagcccaaaacacccggaaaaatggcacatattttaagagagagttgttgtctgaaccggaatggcgagcagcatgtgatatgccgggatatcaatggtgcgctctaactaatttcaatattgcatctccagatatttgttctcggttcttgtctgaagaacaggctatgtatcttgcgggcgcttatgttggcgatggatatattaggagatggagaggtaaatctaagaaggcggttgtttttggcataaattgccagaaattgagaaagtttcattgccgcataccagaaaacatattttccgtggcaagcgaaatccgagggagcatcaaagtaaccttgaatgatacgtgttatgccaattggcttaatgaacattttggcgagttaagccatgctaagcgtatccctgcatgggtgatgtcgcatccattgcgtcatgtgtttttacaaggctatcttgatactgatgggacaccaagtggtaaagcgggatttagaattaatagtgttagtcctgcgcttgcttggggcgttgcgggggtgtcacagacttgtggttatgtttcttcggtcagctttattgaagttgagcccaaaaaagtgatcgaggatcgcgtggtaaatcaacggaattattatcaggtaacaatctgcccgcagaaattgtcacgtaaatcaagattggctcatggaatgcttttacgaacagtcaaagagtttaaatcggtaggcctagatactgtatacaacatagaagtcgaaggtgatcattcctatatcctcaatggtgcggtggtccataactgtcaggcattcagtatcgcgggattacgtggtgggcttgatgatgagcgtggcgcgctaactttaaagtatgtggagcttgcaaatgcaattgacgacaaacgggctgagtcatttctcaaaccagccgttatcgtctgggaaaatgtcccaggagtcttgtcatcggcagataacgccttcggatgtttccttgccggattggctggagaagatgcgccatttgaaccaggtgagcgacctgaatcaggaaaaagtaacgcgttctggcggtgggatgtcaaaaccggttgccatgctccaaagtggccgcagtgtggttgtatttatggaccgcagcgaaaggtggcctggagaatccttgatgcccaatacttcggagtggcacaacgacgccgacgcgtgtttgttgtcgcaagtgctcgaacagacctcgatcccgcaacggtactttttgagttcgaaggcgtgcgccgggatattgcgccgagtagaggcgaggggaaggaaactaccagatatacttcaaacatcgctatcagatcttgcgatgatacaaacatagttgccatggcacatgggcaaggaggggctgagataaaaaccgataattcggcaccaactttgacatgtaaccatgaagcaccaattgtattgctcggcgacggtagaatgcgccgtcttacccctgtcgaatgtgaaaggctgcaaggttttcctgattggcatacgttgatccctacgggaaagcgtaaaaaagtttcttcagatgaactggcataccttcgcaatcactatccagatttaagcgaagaagaggccgcgatgcttgcagctgacggatcgcgttacaaagcgatcggcaatagtatggcaataccagtaatgcgctggattggcgatcggattactaaggccgtatgtcggcagaaagaaggaagtgaaacaaaagagcgaaaagttaaaccagcgacagaattcgaacggtccatattcaaatgggctggtggaaaatttggtgttctggaacaaatctttcgctatttgccagaagggaagcgcctgattgaacctttcgttggtggcggagctgtcttcatgaatgccggataccaggaaaatctgctaaatgatgtgaatgctgacctgattaacttttacaagactctgcaacgcgaggcgcattcacttatcactctggcacatcgtttcttccaggactacaacacacaggaaggatacctggcagtacggaatgcgtttaacaaacaagtctatgatgatttacatcgcgcagcggcgtttttgttcctgaaccgacattgttttaacggattgacgcgttacaaccaggccggtgagttcaatgtcggttatgggaagtataaaactccgtatttcccattacaggagatggaagccttcctcggtgcggaagggcggtctgagtttgtatgcggtgattttgcagcggtgattgaagctgccggagaaggagatgtcatcttttgcgatccgccgtatgaaccgctccccaatacagaggggttcacgaactattccggtcatgactttaagtttgaagagcaaaaacgcctggtgtctctgttgacggatgctcatcgccgaggtgcaaaggttctcattactaacagtggcgcgccaaacatcagagaactttatcaggacagtggcttcagagtggaacctctttttgccagacgttctgtgtcctgtaagggagacactcgtggtgttgctcatgacgttatagcaatattgctctaatatatttattagtgtaatatcgcctcaatgaatcgtgatttatagagcgatttagctgttagccgcaataggcgcggcggtaagcatggctgggcctagtcctcccagacaaaccaccgagttgccaggttgaccatgcgcctaagtggcaacgccgaagtgcgttacgagcttccagtttgcccatcttcgggtgggcgtttttttcagggttttcgtcatggttagcgactttgcggcggtttagaaactgaccattaaagtaaatgcaaacgatgatctgatgatggtagcggcctaagaagccaggcgccacggggtatgagtcgtcccccgtcaaaaaatcgaccgcagagtgtccccgtctgtgtattagggaacggggaggcacaacaggtaagggcgctggtgtgattaaccagatgaacgagaaggggccatctgttggtcagcgtcctttcctgttgcgtcttcttttcagcgtaacagcggtgcttaacagcactttgggtacagttccacgaatttacgggtatatcccgtcatgctgaaagcgctaatcacgctggaagccagggttatgcatcccctgttaccgaattgcagccagggcgcggtgcgccgaaaagcatacggaggtggaagccctcgccggagacgtacccggcaagtgatggtgtagctcagcggttagagcagttgactgttaatcaacgggtcgatggttcaaatccatccaccatcgccaatgccggtttagctcagttggtagagcgcctgccttgtaagcaggatgtcagcggttcgagtccgttaaccgcaccaacacaacaggtaagggtattttgcgacgtcggagatcgccgagcttggcagagggttcgaatccctacgaagtacccttaccgttgtgaggaagtgcagctctttgaagcaaccagaagataagcatctggcttcacaacataaaccgcaggaacgaccaataaacggtagtccgtatggagaacaccccgttgaggaagaggcctggccggaaccgtaaccggcactacaacgttgagaacactggcgtaacggggtcatatcccaatctacgaataaatgttgcgttgcagcgtgacaaccagtgttctcaacattgtggtgaatgcacaggctgatgtgccgcaactacagtagtgcgcgctttgcggggcttgctacaaccctgtgtcggagttcagcaccgaccatcacagtttgattctctggcatgagcataacgctgaaataagtccagtctggtgcggcccgatcacccgccgttagctccacgaaacggagcacgtaacaggtaagagcattctcctgtaacgggttcatatcccaatctacaggtccaccaggaatgctctttccgttgcggtgaatgcggctaagcgcacgcggaacagttaaaacaatcctccttaatggttaaacattccggcgttaattattaactggttaacgtcaccgggaggcactcggtaccgcaatctaataaatatgtcacttttattgagggataaccaatgttcggtaaattgttcggcaagaaagtcgcttctgcaaaagtagagctgaaaaaagttgagaatcgcgatctgatggaggccattatcggtggctgtttgttggtgtctgccgctgatggtgaaatcgaaaaagaagaaacagcgaaacttgatcagcttgtccgctctaatccgcgtcttagtcattttggtaacgaaattactgcaacaattacccgctttaccgagcaactggaagctggcttccgtgttggtcgcatgaatatccttcgcgaaattgaagatatcaaaaacgatccaaaagaagcggaagaagtattcgttaacatgctgacaattgcagaagcggacggtgaaatcgagccagcagaacacaaagtactggaagaagtaggccgtcgtttaggtcttcgtgtggaagattatctgtaatggcaagcaaggcacgtatcgcaatcgccattggttttctcttgctgtccgtgctggtggatttcaccagcacaatcctgtcagttttatcggacggggcgttggtggcagtagctgtaacattggtatggccgatattaaaaacagcttctaaggatcagtgatgggcttctgggattttgctgacaagcatccaattgttctcgttgtcattgctggcatagttgtaggcggtattgctggcgtcatagaagcactcaggaaacagtaatccggccctttagctcagtggttagagctggcgactcataatcgcacggtcaccggttcaagtccggtaggggccaccatatttggttgtaacacggcgtctggcacatgcgtcgttagcggtctggtgacgttaaaggggtaacctttcccctagctcaggcaacaaaccaggtagccggaatgtgcaagccccgttcatagcgtcggactgcggattcaccatcctggcgattcggtgtgacagccgggaagagtccggcgcattaatcctgattttctggtgatgactcatatcgttaggagtgatttgagtatgccgattatatctgacattcagcacaccaggatggagtattaatgtctgcatcccctcttgaatccatgccaaattcccttagtgcagaacaagctgtgcttggtggcttaatgcttgataactgccgctgggatgaagttgcagatcgtatagttgctgatgatttttataccagtgctcatcgtgaaattttcagtgagatggagaggttattaagtcatggcaaaccgattgatttgataacacttgctgaagcacttgaacagaacggtaaattagaacgtgctggtggttttgcgtaccttgcggagatgtcaaagaacacgcccagcgcggcaaatatttgtgcttatgcggatatcgttcgtgaacgcgcggttgttcgtgaaatgatttccgtcgcaaatgaaatagcagaagctggatatgcgcaggatggccggggcagcaatgaattgctggatatggccgagcgccgcgtttttgaaatagctgaaaaacgacaaaagagcggtagtggtccaaaagatatcgccagcattctcgatgcaacggtatctcgcatagaagagttgtttcagcgcccgcatgatggtgtaacggggcttgataccggatttaccgatctcaataagaagacggcaggacttcaggcgtccgatctcattattgtcgccgcccgcccatcgatggggaagactacgtttgcgatgaatctcgtcgaaaatgccgcagtccgtaacgataagcccgtattggtttttagccttgagatgccgagccaccagctgatgatgcgctcactggcttctcttgcacgcgttgatcagactcgtattcgaacagggcaacttaacgacgaggattgggcgcgggtttctggcgcaatggggattctgttggacaagcagaatatttttattgatgactcaagcgccttgacacctacagagcttcgttcccgcgctcgtcgtgtttataaagaaaatggtggtttgagcatgattatgatcgactacctgcaacttatgcgcgtccccgagctgcaagataaccgaacgctggaaattgccgagatttctcgctcactgaaggctttggcgaaggaattacaagtaccggtggtggcattgtcacaacttaatcgatcgcttgaacagcgtgcggacaaacgaccggtaaattcagatttacgtgaatcaggagcaattgagcaggacgcagacctgatcatgtttctgtatcgcgacgaagtttatcacccggatagcgaaatgaagggaattgccgaggtaattatcggtaagcaacgaaatggcccaattggcacggtgagattggcttttaacggtcagtattcacgatttgataactatgctggtgctgactggcaagaggattattaatgcaatggaatgaggaaaagccgatgaacatcctgatcattgggcgaaaatttgaagctatcagtgatgtgaaaacatatacggaaatgtgggcttacaacctggcctgcgcctttagtgaggctggggtaacattgcaataccatcgtccatattcccccggcgtcgaaagcccggaggattatgttgaagctgtgttgaccgctgcgacttcgtgttctgcgaaagccattttagcgccaggattgcggtattttactacggtgcccagggaaataggcgtgcatctgcgtcgtcgattcactggatgggtagcccaggtatacgacggttctatgctggactcggcaccagtcgatattacttttactgtccgtgatgatacctggcggtacctggataatcccggcaggttagagcgtcataatcgctttaacaaacatgttggatgggcagcgaatcaggatctgttccatctggaaaccaaaacagacgatgttctgcgtatttttgtagaccacgctgcatttgatgttagtggttttgatcactccttaagtatccttatgaaccttcagcgtctgaccgttccgtatgaggccagaacgttgactgatgacggattggttaccattgatccggggaatatttcggtaacttcatacagacggacgccggtgccagcaaccgaatttgcagctgaattgcgtaagagtgacgtttttatcgttacgcatcccgaaagccttggattaactgttcttgaggcggcaatgtgtggagcgttgatattaacgccgcccgattgccttccgccggatcgcctggagttggtgaaccatatggttatcaagtcgcggattgattgggatgaggttattgctcgcgttgatcgcgtgaaaaatgctgaaaaggtccagtgtcacacctggtcggcaattgcggaaaagatgcttgagacgtttatcacgcagaaaccgtcgtgcggtaacggataaaaattgaacccattataaaagaaaagcccgatcgccgggcttttcttaagccttgtcaacagagacttgagcggcttttatggatagattcccgctggcctctatcgccatacttccccccgccttcagggcgacatccgcgcctgactttatatcgagatttcctgcggaagagatgaatgccggaccttgagaaatggcatataactccccggcctcgttgaacccgattgttgttccacttttcaagtgcgtaacggcccaggctccgcccgccgtccggacctccattagtccgttccgcgacgaaataaagtcttttttggcgctggttgatggttgtgctggtgcaccttcgacttcaggcggtacatagccttcaccttgtcctgacgcttcaggcggcacattgggagcgccaccggatgcatcctgtgcataaccgattatcaatggccatcgagaatccccattgtagggaaattctacccatactttatcgccgggcagaaatggtgaaaacgtgtttgcattggacaatatagcttctgcccacggcaatgaggcatctggtaacccatccatcatgccgacaacgcgtatttgtgtacgcatcagacctttagggtcatcgacgcttaccactacagcccgatacttccctgtcaaactacccatttaccactcctaactgtgcacggctgacaaaacggaagcggtcttcgaaatgagtcacggacatcactatcattttgtcagggatagattcatcgagttctccgtcacctgccgtgttatgcacgacaattttcagcgtcgtacccggagttagcgcggcatttccttccaccagcatatcgaggcgggggagaatgaatttgttgtagttcgccagcgcggtaggatcgggattgctcgtaaatttaatggggtcttcctggttacctgagtaaaccacacctttgctcatgtcataactggccattctgtaattgtggcggcgctggtattcataatcggcattcaggatgttgaactgactaattgtaaatccggatgtgttgggattggcggactcataagtaagcgatggagcggcgtttgccattttttccatacttttaaaattgatcgcccccctggatgcccagcacatagaaccggtatcgcgggctatctcctgcaataccttggtcggtttttctccaacatttaggtggtatgtggatgtttttctgaatgagtcagcatttaccttcagaccaggggcaagagaggaaactacggctgatgggggcttatcaacaaaatactgtgcgctggtggacggaacttttaataaccgcaccgggttactaaacgcgtaaatcagtacagtatcgtccttgcgcggcgctttaagaacaaagaattcttccgagaagaggatgccgccatgaccttccggatcaccaagtgaaactgtcagtattgtcccaaatttcacccccagcttattgaccacgtaagccgttgaatccctgaccatgagcataagctggggaccagatagctccccaggttcgacataggtacatcctacgatcatttcgcgagggatttcgttctgcccaattgaaacagattgcaggaatagctgagtgcgttttgaatcagtttccggggctgtggtggtctttgtggccatctcattcctccagaattttcgcttttaccgttatggtgccggtggtttgctgcatataagccaggataggaagttccgccacaacggtgaggttcaatccaaccgcgaacatcctgttgtcggcggtgccggtggtcagatcctgaaatgcgattgatttttgcccttctatgtaacaggtaaccggtatctcataaccgccgacattggcaatgtgagtgaaagatgcctgcccgaggctggcatacattcgtagccagaatgctaatgcagttgtaaccatcccaagagattccttctcgtcactggctatccatagcgaatattccagtgagaaagggatagtcgataccagggcttcaatctcatcattttcattggtgacatgcccttcatcgtaattatcgcggcacagttcaccttcataaattgaaaatgcgggagaacgagacagattcacaagcggcattgccagcttatttaccgggccagcagaggcagtatctttacgcccggcgcgatcggcttcaaatgacgacaaccactccttcacatcactaaaagtgccgagcgttatgcgatctcttggggtgcgtttcaggaactccctgaatgactggttagtgcgatcattaaagctgacaacttgtgagtcgaacgcttcgtttaaagcctgtgcgagcgccgaatcaatgccatcaatagtggcaaattccagcttaccggttggagtaagaccttttttcttaaagatggccagtagccattcctgattattcagaatcaccgatgaaattcccttcaaaggcgcgtgaaggcacgcaataaaacaaactgcctaccctggcagtgccgtaattgaatattttatggatgtaccagaagcggcgaatggttgtgccgtctgacagctgttccagccattcgagcatagaacccactggcacattgacggcggctaaccgaaggattaaagcactgtcgctaattcccgtattatcactgccgtcgtatagcgcgtagaaggcgtccatctcatccgggcagtcgagggccgttatcagttctggatcctgatagtcatatatgcgttggttcggttctattatttcagatgccgtttcaggtgcatttttgtttctgtaaggtattgcgcgatacagaactgcatcgaatgagtcagggtctagcttgattgctttgagccagtccatccgcacaaggttattaaaaactgcatgaccttgataacggtggcgcacaccagaatcactaagcaggccgtgatccagattgggaaggtgattgtcctccacaggatcaacaatattaccaacgttaacaccatcggtttcgatttcagcatcaatatcttcctcttcaatcagttcagaaccttcgcgtggaatatccggatccgattcggtgtccgggaggttatcaccagtcacttgttgtgatggttctgtgtcctcaaacatgtcatcaaagaaaccagccatcgattatcctttccgtttacgggcttcgttaatttgtgtctcaagaatgcttcgcgcctgcgcggtggcagcggccttgtccattccctgactcatgaaaaactttatgaggttgttcgcctgcgtttgcagggcttttttgagagcgtcggcttcagcgcgagcctgggcttccctcacccgcgaggcttttagttcggcattcttcctgtttgccgtggtgcgagctttttttaacaaccggcgaacgttgtccgtggcgctatctttggcgcgtagttttttgcctaatgcatcctgagatttcagatataactcatactcacgcgcagctttagcctgatccgtcgttgttgtccggttgcgcgcgagcgatttagccagttcgcctttgaaataggttgttgtcttccgcttgtcatcgccgaaggctacctgttcagctgctttttccagggcaataatgatggccttgtgccatgtgggagactgaaaacgcgtcatagcgtgcaacacatgtttgcaggctacaccagtcagatcagggttgcggatcttggggaaggcatactcttttggcggcgcgacagcatagttaccagcagtggccatataacgataccagtattgatggcgtccacaatcacagtcgaaagatacccggcccttgcagagatcggcagcgattcgggcttttttcgcaccgtcttcagcaatatcctcaacggctttatcccattcctcaaatcgaattctgacacggtgatgctggtggaccgactcatccgaggcattaacagatatcaatgcaaggttgtgttttagcccgaggaatgtcgcggctttgatccctgtgccatcagaaactttgttgttagcgcgttttatatcaatgctggtggactgcgccaccaactgagcataggtaatgccgggtaccgtgctcttgaattttgttttatgagcctgccttgaggtgttgaagctgcgtatatcttcgggcgtaaagtaggtgccatctttctttttcccaaggctgaggaatgcctcaagttcgcggttacgcatccccataatccttggggtgagtgtacgtcgcgcgtttcgccgattctgacgctgctgtttacggataagatcgaagaccttgttaaagtcttttgcacttaatccatcagtctgatagcgaccaaggttgtcgcgagcatattcagttggcattcatttcccttacgcaatggataatgtccctattacctggccgtcgtattggaaatggcgaatcatttcgcggatccaggtggcaggtgggagttttaattttttgccaacagtcataccctgagactcatcctcaagcccggcggcgagcgtcacaacccagcgtagctctgctatgccccacatacggtaagccagcaaatccgggcgatattgctcatcgggaagaacgtaataaatcgtcagattcttgtcgttcgattcacacataagcatcacctctttgcgtagctctgccctgagtattggatcggctatgttgcggtcgtcataccgcgacagaggatattgtggggtgctttgggttgtagtgattgatgtagccatagtcagcctgccagaaatagatgatggtgattttactgctagtcatttgttgaaaatttaacttaataaaagaaaattattagtgcaattttgattgtgaaatgtatcattctgcccttaagtaggttcttcacgaggaaacaaaattggcagaacgtgttgatgatgcagagctgagcatgaatcagttagaagctctcaaagacatggccatcgataacatcagaaagcaggcacaggtcgtgagccaggtatttacagggaagtgtcgttactgcaatgaatcgattgaatcaggcatttattgtgacgctgaatgtgcgcaatggcacagggaagagcaggctgcaaaacagcgtaaatatggcatgcgaccggcaggatttgactgattatgttgcgctttactgaggaagagtttcaggcttttagtgagcgtcgaaataaggggcggtccaggccaaaaaccaaaaaggatccattcttatcgcttgcgccggtaaaagaagtttctccacatgcgaaggcacttgcagcactggcaaagaacccagacctgcgcgacggaaattgcgagcacttcgagcaggttttcatttttgattacttcgaacgcaagcaccctgacatctatgagctgttgcatgcaacgcctaacggagggaaacgttcaaaagcaaccgccgggaaaatgaaggctgaagggcagaaaaaaggttatccggacatgagtctcgataaagcatgcggtatttatcacggcatgcgaattgagcttaaagaaccaaatggtaaagccccgacgaaagagcagatcgcctggatgcgcaggcttagagaggaaggctactacgttgttcttgcgtatggtgcagaacaagcgattaccgccatcctggaatacataagccttaaaaagggtgaggctattgagcatgtattgaacggcgataagtggttgtatgccgcttaaaataataaattaattagtgcatatacgctctttgtggtagtgcgctttaacatcgggagaataatcgtgtcatccaaggttaattatgagtttctggcatcggtcatgccgcgtaatgaacaggaaacagatgctgtagtggaccctgtaatcgctgaaatgaatgctcgcctggaggctgaatttgcagctgagaatgaacataccacccagggcgactaggactgttttttgtgtcggtagcggtccgtcactcactcgtgaggactgtgctgctatagaaaaaactggctgttcaatcatcgcagttaacaattcctggcagatgttcgatgacatttatgccttatacgccggtgatttgtcatggtggaagcaatacggatccaccataccgggagggagattccgcaaagtgacagccaacctggcggcggcgaaatcattttcgttggagtacaggcgatattgtggaccggcggaaggggtaaatagcggcgcgcaggctatcagtctggctgctgaatcaggggctgaggtagtggtattagtcggctatgactgttctctgcaaaacggccttcattggcatggcgcgcaccctcaagccctacggaatccaacgcaggtgtctatttcaaaatggcaacagcagttcctggatacccgcaaaaaacacgcagatttacatattttgaatgcaagtaggagcagtgcaattcaatgtttcccaagaataaatttagaggcagtgatcgcgttattatcgtcggcagtggcccaagcgccgcaaactttgttgcgccgcgcggagtgccgattatagcggtcaatggggccatcgactggctgaaccgcgcttcttattttttcacacttgatccatcgccagacaatatgcggcgcgttggtcgtggccgccgtcgccgtggtgtttgttattgcatggcactacccgatgttaaagaacgtgaagtcagagacggcgttctgtgcttccgtcgtgtggctgaacgcggcatggagccaaaaaatacgaattctcccgagtggtgggcgtggcgctggtccgcacatttcggactttgcgaagatgagaatgaaattgccagcggcaatagtgcatatggtgctctgaacctggctttccatatcggattcaaacatgtcgccctggtgggcgttgacgctacacaagaaccacgcgttcactccggcggcacgccaaaaaatctaagtcacctgcctttgttattccagtctgcgcgtgaacagattgacgttgtttcatgcgggaaaatgggaggtattccgcagatgactcttaaagaatggctgaagaatacatgatggcacccacaatttatcaccgtatcgacggtaccaaatacaggaatatctgggttgttggtgatctgcatggttgctacaccagactgatgtccgaactccatcgtgtggattttgaccctgcgcaggatttactgatatcggtcggcgaccttatcgatcgcggcaccgaaaatgttaaatgcctggagctattgcagatgccatggttcagagcggttatgggcaaccatgagcggctgatgattgatgcgttaagtcctgatggcaacgtgaataattggctaatgaatggcggtcaatggttcttcatgctggacgctgatcaggaaatattagccagggcgctggtggagttggtaagacgactgccctatatcattgagttgaacaccgggcaagaaactatcgttatagcccatgccgactatccggataatgaatatcaattcggtaaggaggtgccgcttttcaacgttgtctgggcgcgcgagcgtatcagtgattcgatggatgatattggtggcgaaatttcgggcgcagatcgttttatctttggtcacactccggtgaaaagcccgaagacattctggaatcagcattatatcgacactggtgccgtattttgcggaaacctgacattgatgaaagtgaaaggtgatggtgcagcatgaagattgctttagttcttcgctctggtggtgactataacgcttccgatgtgcagtggctggttaatcaactgccaaaaggctatgaaattatttgcctgacagacctgaagcgtttacatgtacctggcgtcaaagttgtcccgttgatcaaccagtggcaaaagtgccgtggctggtgggcgaaaatcgagttgttccgaccggatataaccgatgatctgttctatctggatttggacacggttattgccggtgatatacgcccaatccttgagaatccaccaaccagcttcaccatgcttagggatttttaccatccacaatatcgtggtagcggtgccctgtggataccaaatagtgtaaaagcgcatatctggagttcattctggcaagatccggaaggttggattgctcgttgtgtcactactgagtgctggggtgatcaggggttcttacggaaggttatgggcgatgatacaccagcatttcaggatctgtatccagaatggtttgtaagttacaaggccgatgttgtggaacctggttcaaaatatgcgagcgcgcgttactccagggggaatggggcattaccaaaggactgccgaataatctttttccacggcaaaccgcgacctcgcgaagtgtcagaggattggcttccccttattagctcgttttttgagcgagaatcagaatgatattgctctaataattccatatttttaaaacatgatgtacactcatcacattttttattagagcaatctacaaggtgcactatgtggccattccgacggaaatatcactactggctgatcgcctttgttacgccgaccggcggtatcaggcatgtcatcaccaggtatcgcaacaagagactcaccttagccagaattttgcaggctgccataggtgagggactggatacaaattgcgtagtccttccaccttcatacttaggaaaaatgaccgaagcacaagctaatacggaactttgaaatgagcacttcagcacaaaaccaatcaatcgaaaatgtatctatccctgatgtcctgaatgccggtatcccggccattatccagaacatccgggccgcgcaacgccgcgttagttgtgatgacctcacagcacgtttttttgataatgcggttcagtcagcggagatgcttcacgcacagcttattgatgtttataacgcagaagctgatagccataactccctggtagatgcagctgaaaatatgcagttggatctcggtctgaagggtaaagaaattgaagagcttcagctgcaaattgaacatttgaaacgccagcaacaggacgcgatcgacgatgcgacgcatgacgccaaccagcgtgctgataatgccgaacgtataagcattgagctggaaacaaaactcaatgaaatgaccgcgatggttgaactgcggaactcacagatttcaacgctaaaatctcaatataaagagatcatgaaacttgatccttttaaccttgagaaacgctataacaaagctaaaagcgagcgacaggaactgcgtaagcaggtcgccgaccttaaccaacagctcaaaaaaactattaaagatgcaagcgaagcgcgcgtggcatttgctaataaaaaagcagaggttaccgcgctggctaatgagaatgccaaatttgcgacgctcaagaaggaaatgtatggcattactgagcgccgtttccctgcaagcaaacttcatccgacgttagggcaaatctccttcttcccgcgcctcctggcttatgggatctcatcgcctaaagagtttaataacgagcgtccttatatcgtttctaagctggactttgcttatcagttctgctgcgacatgggctatgccattgatatccgtatcaacgaatggttgatgccaaacttccagccgttggccattttccgcgagttccagccggaaggttgggtagagttcttccatgaaatgatctgtaaagagatggaaagccgccgcccggaactggtccgccgtgtcgagtgggcgcaagaggttatgttagcagatgcagagctgccgttcgaaccggaattcattgatgatctggcaactaaagggctgcataccctgtttgatgtggttacccgccgtcatgagcagttggttgtcgaattgggtttagaggaaactgcggcaagaagacttctcgatgtttgctatgcacgtagcgatgcatgggaaaaagagaacggcggcactatttacgttcgctgatagttacagtgtcacttttaatgctggtggagtgcgcccaccagcatttttttcgtccaatgaggagggcatttgagtattttcaataaacacgcacaccaggaacgtccgtatatcgtcatagtcgatattgatggaacaatatcagaggcaactgaagacagactgcatttgcttccgccaccaggtaaaggtgcattaacaaaggactggaacgagtttaatctcgcctgtgacaccgatactcccatcactccagttattgatatggtgcgccagttatttaacgtttacacggtctggtttgtaaccgggcgctgtgagatagccagggataaaacacgagcctggttgcgtaagtacgtaacaaatggagcagagcctttgctatctatgcgtcctgccaccgatgacagaaatgacggtccagcaaagattgatctcctgaagaaaattggtataagtaaaattgcgttcgcgctggaagataagattgaagtggcgcgtgttttcaggagtcacggcgtacttacgttaatggtcagggagtatgaaaatgcgcttctccatcaacaataattgctctaataaatcttgatttttaaaacagagagggtgaaaataaaaacatgccgcaaggggcgcggcatatatccaatcaatcacaggagctgaagatatgaacacggcattcaaaatcattatgaccgcgatctatttctggctgttctctatcacttttggcggcatcgtcgcgcatgggtaaggggagtatattagccatttggaaccccacgagctcttgcgggtttaattaagaacccgcaagaaaaacacgaattgggctatatttttccgcctacgcctttaaacttctcaataaacgagacgattttctggaaaactgcctgttttttcgttttatattgcggattcaacggactaagttttggtaatgtttcgtttaattctgtgccattttcggtggcgtattcgcgttttaaagacgtgcgaatatagcgttttgctgcatcttcattgagattttcttcttttatcaatgcttctgcttcacgttgctgttcgcgttgagcaaacgtaaagaatgcctcaatgatactggctttgtctggtaaatcatccaggttcgtttgctgaataaaatcgaccaccaagccctctttcgcccggttccccaggcttgaacgaattaagcgtttgacctcttcaatcatttcgcccttgcctttattttgtctgttgtgttcgaaaatcagtccaaggatataatccaggtttatttcctgagacttcagcaaatcgacctcaaaaaccacgtcatcccagtcagtggttgatttttcttttttatcagcttctttctcgcggcgctgccagtcacgaatatcgttataggcagaacgataatcctgaatcttgcgttcagcagggagacgaatcgtttgcaattcagcgaacttttcatcatccacataatgttcttctttgaatttttctaccgcaacaggatcgctaagatcgatttgttgcagggctttcagcgtggcaaattcatcatagttttgcaggatgttctcggcacgcaggtattcaccaaacagtttaacgaagtctttcttctctttttcactttcaatactggcagggtcagggaaccgttgttccagttctgcaactactgccataaagccgcgcttagcttcaccagtagcagcatcagtaaagccttccatatactctgcataactcttttctaacactacatttttggtgtttttgtcaccaaacagcgttatggcatcgatggttgagcgttccagatcgcggaaagtgacgatattaccgaaggttttagttgcatcataaatacggttggtgcgggaaaatgcctgcatcaagccgtgaaaacgcaggtttttatcgacgaatagcgtgttcaatgttggagcatcgaagccagttaaaaacatccccacgacaattaacagatcgatatcctgatttttaacccgttgggctaaatcgcgatagtagttctgaaaaccgttaccgtcggtgctgaagttagttttaaaatagctgttatactcacgaattgcagcgtcaagaaactctttagcactgctgtccattgcgctggtatcaaaagtttcatcggaaatttcaccaatggcattttgttcttcattagcggcaaaggagaagattgtcgcaacacgcagcggtttataagttgcagatttattagcggcttcctcttgtaaccgtttaaacgccgcgtaataggcttttgcagcatccacgctgctcactgccaacatagcattaaagcctttggagcctgggaaggtacggtgggttttctggcggaagttgttcaggatatattgcgtgatttcctgaatacgcatgggatgaagaaacgcctgctgattttcagccgcacttagttttttctcgtcagtttctgtctctaaagacttaaactgtggccgcacatcgttgtagtctaccttgaatttgagcactttttcgtcacgaatcgcatcggtaattacatacgaatgcaattcacgaccaaatacgctggcggttgtttctgagcctaaggcgttttccgggaaaataggggtgccggtaaaaccaaactgataatagcgtttgaatttcttcttcaggtttttctgcgcttctccaaactggctgcggtggcattcatcaaatataaacaccacttgctgattatatacaggcaggtcgctttctgctttcatcaggttattgagtttctgaatagtggtgacgataattttgttatcgtccttatccagatttcgtttaagacctgcggtattttccgagccgttgacgctgtctggcgaaaaacgctggtattccttcatggtctggtaatcgaggtctttcctgtcgaccacgaagaagactttatcaataaagtccagttctgttgccagacgcgcggctttaaagctggtcagtgttttaccagaaccggtagtgtgccagataaagccaccgctttcggggttagaccagtttttcgctttataggagctgttgattttccataagattcgttcggtggcggcaatctggtacggtcgcatcaccagtagcgtctgactactgtcaaaaacgctgtagttcaccagaacattcagcagagtatgtttctggaaaaaggtagcggtaaagtctttgaggtctttaatcagcgtgttgtctgatttcgcccaattcatggtgaagtcaaaactgtttttatcgcgctttgttgtgttggcaaaataacgggtatcggtgccgttagaaatgacgaacagctgcagatacttaaacagggaattttcgctgttaaaactctccttgctgtaacgatgtatctggttaaaggcctcacgaatcgccacgccgcgctttttcagttcgatttgcaccagtggtaagccattaaccaggatcgtgacgtcataacggttagcgtgagaacctgcctgttcaaactgctggataatctgcaccttgttgcgcatgagattctttttatctatcagatagatattctcaagacgcccgtcatcaaaaataaagtcgcaaatatagtcgatatggattttacgggtcttatccagaatgccatcgctcgggttgtccagatactgctccgtgaaacgccgccactcgctgtcattaaataccacaccattgaggctctgaagctgttcccgaacgttggccagcatcgctgactgtgattttacggatataaattcatagccctgatttcgcaggtcctgaatcagttcccgttccaggtccgattcgctctgatagctgtcgcctgtttgctcagctttgatgtacttatcaagaacgataaagttattggattcagcaatggtgtgtgtttgatgagtcatagcgcatcctttgtgccgtctggcaagggctggaagggagttaatggtgacttccagcgtgtaaaaaatagtctatatactgaccgggtgttaaggtggcccggtcggtagcaatggtcaattaattactgacagtttcaggttttgggaaactgaacagtaaatcacgatagtactcgtattgtttctggcgtaactcgatttcacgcgggagaccttcggtgatggagttggtcagggtgtcgaatttatcgagtattgcgacgatacgagcttgctcttgtaaagggggaaccaaaacaataggagcatttaatatgttatatgaaacaaaaggctgtgatgcactattagattttgaaccgaaatcttgtaaaagtaataaatagtaggcgtatttttgaagaacttccttcgatttgtgcctacaaataactccgttgtatgtaacaaaatgcttaccttggccccagttaacgattcctgcgtaagcacctatatgaccaataacaggcgagtcttcgctgttatatttgtcatgggagcctacaatcccgttgctaccataaacaggatattgccctccagatttaggaattgtattgcctgttccatactgaaaatcataaatatcacctatcctcatttctcgagtattttccctgccctcaagattcagtaactggtcgcgatagtagttgtattgttttttacgcatgctaagctctgctgtaagctctgctgtaagctcagtaaatttatccagaattcgaacgatttcagactggatggcaagggatttttccggattatccgggcaggggattgggattaatgtttgctgtgctgtggaccaatgtcgtttgtagctcaattcctttttgtaaaatttcaggaaggcatggtagatatacttggcattagctgaaatggggcttagaatttttagtccatcagcaccttgaacaaaaggaaagtctacgtactttatatgttcagaatggtcaccaaaaattatgtacttcccagcttcaatgggagttacatcttcgtcagtgtagccagcaatgaattttataccctgatctacaattggcagttttcctgaagctctataggcttggcttttaagttttgaggatgcggtaacagttttgatcactgtacccagcgtcttccactcaacctcaaccccatccagcaatttttccagataacttaactcgctcatttctgcacctcgcagccttcaatttcagccacaatcgcatcaatatctttgcgcaactggtcgattttgctgaccgtggttttcagctcagcattcagctcagcaatatcgataatttcgcggttatctttcgcttccacatagctgctcactgacaggttatagtcattcgctacaacggtctcaaacgtgacagatttcgccagatgagcaacatcttccttgctggcgaatacctgcataatttgttcgatatgggcatcggtcaggatattgttgttggtctcttttttgaacagttcgctggcatcaataaactgaacgttggtatccgttttatgtttggacagaaccagaatgtttacggcaatggtggtgccaaagaacaggttcggagccagtgaaattacggtttcgacatagttattatcgaccagatactgacggattttctgctctgcgccgccacggtaaaaaatacccgggaagcagacaatcgcagcacgacctttggccgaaagatagttcagcgcatgtaatacaaacgcaaagtcagctttggatttgggggccagaacgccagccggggcaaaacgctcatcgttaatcagcgtcgggtcatcgctgccaatccatttcaccgaatacggcgggttagaaacgatggcatcaaacggtttttcatctctgaagtgcggttcagtcagcgtattgcccagcttgatatcaaacttgtcgtagttgatgttgtgcaaaaacatgttcatacgcgccaggttataggtcgtatggttgatctcctgaccaaaaaaaccttcttcgatgatgtggtcatcaaactgctttttagcctgcaataacagagaaccggaacctgctgccgggtcgtagattttgttaacgtgggtctgcccgtgcatagccagttgtgcaatcagcttagagacgtgctgcggtgtaaagaactcgccgccggacttaccggcattcgcggcatagttagaaatcaggaactcataggcatcgccgaacaggtcaatctgatgttcgttaaagtcgccaagctttaacccttcaacccctttcagaaccgcagccaggcgggcatttttatccttaacggtattccccaggcggttactggttgtatcgaaatcagcaaacaaacctttgatgtcagcttctgaagggtaaccgtaagcagagctttcgatagcaacgaagatactatttaaatctgcattcagtctgtcattggtatttgctttcgccgctacgttgcagaaaagctgactggggtagatgaagtagcctttggttctgatggcatcgtctttaatgtcatcagtaataatgccgtcatcaagtgccgcataacagatgctgtcatcaccattttccatataactggaaaaattttcgctgataaaacggtagaaaagtgcgcccagaacgtattgcttaaaatcccatccatcgacagaacctctgacatcgttagcaatttgccagatttgacgatgaagctctgcacgttgttgaatacttgtcattttcatccacttatttcaggcttaagtaattggcggtgattctacagcaactctgatgctttagtagttcggatattaggcaacgaatgacctgcctagagttttgttaagccgcaaagtgctggtgctttatgcctatgaagcatataattgtgtacacataacgagtacatgaggtgtttatgcaatccattaacttccgtaccgcgcgcggcaacctttctgaagtgctcaacaatgttgaggccggggaagaggttgaaatcacccgcagaggccgtgagccagcagtaattgtcagcaaggctactttcgaagcctacaaaaaagcggcgctggatgctgaatttgcatccctgtttgacaccctggactccaccaacaaggaactggttaaccgataatgaggcatatatcaccggaagaacttattgcgcttcatgatgcgaatataagccgctacggcggcctgcctggcatgtcagatccgggcagggcagaggccattatcgggagagttcaggccagagttgcctacgaagagatcaccgaccttttcgaagtctccgccacctacctggtggctacagcgagagggcatatattcaatgatgccaataagcgtaccgcgctaaacagcgcgctgctatttctacgccgtaacggggtgcaggtatttgattcacctgaactggcagaccttactgtaggcgctgcgactggcgagatatctgtatcttctgtcgccgacacgttacgtagattgtatggttctgcggagtagattaatggcacgcaaatacaacaaattgtcccgtgaagcgttaaagatgcttcttgatggcgtgagtcgccgcgaggtaaagcaatacctggttggtaagcaaattggtgccaggaccgctattgctgtgttatgccgtcaggaaatggttgtgcttaaacagagaatgccgggcagcagataaagcccaatcagtgatgaaaggtgtgatgtgaaagccgtaattactccctttgtacaaaaagagcttggcgtcgccacattcaaagtggatcaggaagtcagaaagctggtggaggctggccgtaaatttattatggagccggtaccgcgtgagttaatcgagcacatggacgacggcctcgttgtttccgagcaaactatggcaacaaatgaggcgttgcagccgttttttaacagcgatgaactgtttcgccgtattggtggaattgactcgctggtggcgtggttgtgcaggaaagaggggcaatgccaggccgcagatcgtagttggtgtgacaaccatattgtctacgctgaacgagacaatagcgcggtgttgttgtgctggcatcacgataaccattaccggatgcgtggttttaatgagctgaaagaaacgctgcataataatcgcgttaactggatactggatgtcgcccgtcaggaaatggggctttcagatggccatgatttaagtattcaggaactgtgctggtgggctttcatgcgcaacatgatgcacctgatgccggaagaagtttgccgtatatcaataaataagatgaaagccgcaacgcaggatagcggacctctgaaagaggcggatattcgcctgtatgacgatcgcgctacagcatatgttcagatgatggaagaacgcgccgcgccgatgcgtgcaaaagtatgccctgtggatgttgactccgaccctggcatggcgcatttcaaaataccaaaactgcaatcgctaaaattacctgagtacatggactttgttgcttcccgtccatgctgtgggtgtggagctgcgggagctggcgctcacattacgccttatatcgttcgtcatagtcgattatgcgcgcatgacatttacgcaattcctctgtgccagtcatgccagcgtgatattgagcgtgaccgcgataattgggagaagacgcacggcaggctggcgatgcatcaacgattgttctttgattacgcgcttggagtcggcgctatcacaagtcactcgtcgagcgttagataaaattgctctgatgtattgctatttctttaatctagggtattatattcgtcgttgattagttgacatgggctaatcagtaggtgacaggatgttacttaactggcagggacgccacttcatggaaataaatcactcacgaattacatcgtatgagattgcggattacatgattcgcactaaatctcttctatcagcgaaagaactcgcagtaatccttgaaaaggaatacccgcatctggatgtcgataagcgcgatgtttatctgcgcttaaaggctatcgctgtgtctaagtattcgtctgttttgattgatgacagtacacgcccacgtagatttcagatccactctctgaatcctgaattctttcgccgcagccgcgctccgcgccggtttgatgaaaaactccagaacgaactctatatgacgcaggacgaaaaggaacgccgggagcacctgccttgggtaatggcgcgtcaacttttcaataaggtggcccgtcagcaccgtcattacggtaatgccacatccgcacgtatctgattgattgcttgcccgttccgggccttttgacatgtaactttcgttaccctcgcgtcaaaaagagttttatacgaaaggaagcataagtgacctgggacgatcacaagaagaattttgctcgcctggcgcgagatggtggttacaccatcgcacagtatgccgccgagtttaatcttaaccctaataccgcacgtcgttatctccgtgccttcaaagaagacaccaggactgcggacagccgcaagccaaataagccagtcaggaagccactaaaaagcatgatcattgatcactctaatgatcaacatgcaagtgatcatattgcggctgaaatagcggaaaaacagagagttaatgccgttgtcagtgccgcagtcgagaatgcgaagcgccaaaacaagcgcataaatgatcgttcagatgatcatgacgtgatcacccgcgcccaccggaccttacgtgatcgcctggaacgcgacaccctggatgatgatggtgaacgctttgaattcgaagctggcgattacctgatagataacgttgaagcgcggaaggccgcgcgcgctatgttgcgtcgttccggagctgatgttctggaaaccactcttctggaaaagtctctttctcatctccttatgctggagaacgcccgggatacgtgtattcgcctggtgcaggaaatgcgcgatcagcaaaaagacgatgatgaaggtactccgcctgaataccgtatcgcgagcatgctaaacagctgttccgcgcagataagcagcctgatcaacaccatttacagcatccggaataactatcgaaaagaaagccgggaggcggaaaagcacgctttatctatggggcaagctggcattgttaagctggcatacgaacgaaagcgtgaaaataactggtcagtgctggaagcagctgaattcatcgaggcgcatggcggaaaagtgccgcccctgatgctggagcaaatcaaagccgatctgcgtgctcctaagaccaataccgatgatgaggaaaggcaaacagccgtcggtggcccttctcttgaagatctggacaaagttgcgcgagaacgggccgccaaccgccgcgccgatgccgcattgtggattgagcagcgtagggaagaaatcgccgatatcgttgatacaggcggttatggagatgttgatactgaaggtgtatcaaacgacccatggctggaacaagacctggacgaagacgaggaggaagacgaagaagttacccgcaagctatacggggatgatgattaatggccagaagttgcgtaacggatccacgttggcgcgagctggtggcgctatatcgttatgactggattgcggccgctgatgttttgttcggcaaaacacctacctggcagcaggatctgattattgagtctgtgcaggaacagggtagcaagacatctgtttcgtctggtcacggtaccgggaaatcagacatgacttctatcatgatcatgttgttcataatcatgtatcccggtgcccgcgccattatcgttgcgaacaaaattcagcaggtaatgaccggtatattcaagtacatcaagataaactgggctactgccaccagccgttttccatggcttgctgattattttgttctgacagaaaccgctttctatgaggttactggtaaaggtgtatggactgtagtaccgaagggctttcgtctgggaagtgaagaagctctcgccggtgaacacgcagatcatcttctgtatattatcgatgaagcctccggtgtcagtgatagagctttcggtatcatcaccggtgctcttaccggacaggataaccgcatcttattgctgtcacagcctacacgcccaagcggctatttctacgatactcaccataaactggccaagcgtcctggtaaccctgatggcgtttatacggcgatcacgcttaacagtgaggaatcaccgctggtaacgccagcatttatcaaaatgaagctggcggagtacggcgggcgtgataaccctatgtacatgattaaggttcgcggactattccctaaatcacaggatggcttccttcttggacgtgatgaggttgaacgtgcaacgcggcggaaagtcaagattgcaaaaggatggggctggcttgcatgtgtggacgttgctggtggtacgggacgggataagtccgttatcaatatcatgatggtgtccggccagcgaaataaacgccgtgtaatcaactatcgaatgctggaatacacagacgttacagaaacgcagcttgccgccaaaattttcgcagaatgtaatcctgagcgattcccaaatatcaccatagcgatagacggcgatggcctgggtaaagcaacggcggatctgatgtacgagtattatggtattaccgtacagcgcatacgctggggtaaaaagatgcatagccgtgaagataagagcctgtactttgataaacgtgcttatgccaacgttcaagccgcagaggccgtaaaatctggtcgtatgagactggataagggtaatgaaactattgaggaagcgtcgaaaatccctgtagggattaactccgcaggtcaatggaaggtgatgagtaaggaggatatgaagaaaaaactcaacctgcactcaccagaccattgggatacatattgtttcgctatgctggcggattatgttccccaggatgaagtgcttagcgtcgaagacgaagcgcaggttgatgaggctctggcatggcttaatgaatgaatatttgctctaataaattgtgttttttaactaccgatgttacattgagcctgacctcttgcgccttgaggcattttcggtttatgcttatcaggcacctcattaaaacgggtgccgggattgagaccccggataatgtcaaaggcgacacagacgccgaaagcgtctttttttgtgtcatgccatcgcacagccatacgtagcgtttagctccgaaatcaatggtagtgctggctgggctgccgaaaggcaggccggttccctttgacgccggtagtctcaacccagtcagtgctaccgccattgagattgagacctcacgcggtagctccttaacttagtcaaaggaggctgccattatggctactgtccctaccccaattcatcctgaatttatctggcgcttttactcctgccaaaaacgtcactatcacttcgttattgcaccgacagaagatgaggcccgttctcagcttcctgacgctccctgcattttctctgcccgcttttcaaccgatttgcgcaattctctcagttactggtgcctccctgttaacgcttctgctcaggagggactatgagaacgtcattagttacccgtgaagagatgatcgaggcaattgaacagcacactgcctgtatcagtaccagggatataccgggcgttattgccaactacttcatgatcaccaaacaactttaccggagaaaggacaagaacgcagttcaccgcatcctgctgtctgatatccgcgaatacctgctcgaacaggggcatctgaattacgcaaccgtcgcagccgaagcacgcaaggaggcacacagaatgaaagctactaacgttaaatcagaaaaagttcatgcaccttcagttcaggaatcagagctggtggttgttcaaaatcagtcggatgaaattcccgttctggagtggcagggagtgcgtgtcgtaacaaccgaaactcttgctaaggggtatggtacagaagcgattcgcattcgccagaatcatcatgagaacaaagtacgctttgttgaagcgaagcactttttcaaggttattggcgatgagctgaaaaatttgcgggtagctttaaactactcacaaaatccagtctcccccaaagcgcgctctctcatcctctggacagaacgaggagctgcccgtcacgctaaaatgctcgaaaccgatcaggcatgggcattctttgaaaaactggaagacagctacttccggcaaaaagaacagcaaccggttgcaatcccccagacgcttccagaagctctgcgcctggctgccgaactggctgaacaaaagcagcttctggaacagaaagcccaccagctaaatcagcagctggtggccgccgctcctaaagtcgattttgccgaccgggtatcagtagctaaagggatcctgattgggaattttgcaaaggttgttggacttaagcaaaacgcgctgtttgcctggttacgggagaacggcatcctgatagcgtccggtggacgtaaaaatgtgccgttccagcagtacatcaatgcggggtatttcacggtgaaagaagtggtgctggatgatgaagatggctaccagatacggttgacgcctcaattaacgggtaaaggccagcagtggttgacgcgtaaactgctcgatgctggcttgttaaaaccggtggcggctgaataatggaagaatgcccggttgatgccgggcataatttattgcgcgctttcggggttgtcgtttactggctgccccttcttggttttacggctgcgcgtaactgatgcggctgacttaacctttttctcttcgcgagtgatggcaatttgtttttttacattttcaatatctgccaggcgatatatttttgcttgtggccagcggtcgcagatgatcggttctatggagtcataaaggctaaattttgctttttcgaattcaccgttgatgataattccatcacggagagtttcatcgcagataaacacgccacacagtggcacatggtaactaactgatttaccatcattgtagttagggctactggaaatgtagtggacgcgcagcattgtttcgctaaagccgtgtacgcgcatacggaatttttcatcctccgggtactgcttcattagctcttttgttgcttccaggttctctatgtatttcgcactgtgctcattgatccccgcgcttttttggatgcgaatgtccttatcaatcagatgaataatgcggccagcggtcatgttgacgctgttcacagcttctgtctgataagttgtaaccttacgcacaccgcgaaggatgttaggcactggatataaaatagtctttgggatattgaggtctgggtactgttccagttcccgcgccattaaagtccatttatcaatttcagcctgaatgctgtcagtttctttgaacggtagaacgacaaccgggcgtacaggacgaccgtcgctggctgtatcaacgtgttgggcgcgtgcaacagctttttttagaaagagatccctgaagctgacgaactcctggtacagttgttcgccgtagacataatttatcattgatcctcctccagaattgacatggtcaataacgcccggctgagaaaaccggtcattactgacctatattatagagggatcaaacaaaaataatagatttattagtgcatttattgtgagtctaactggttagttgccatgagatattcgattgtgtcagtgaggtcatccaggtcgtcttgggtgatgcggtactcctgattggatatctttgagtagtgttcagcaatggcgcgggcagcgtcggtttcggcagggtctacagataaagcgttagagcaatgtctaacgtcgtcgatggttggttgaatgaaagccataattatgcctcactgtattgacaacacagagcctgaagctctgacctactgtttcacccatgatccatgctggggtaatctaacaacattgcgctgtgtgtaagatgagcaatgcatagctgtaatgccgttgtataaggtttccctgtttgctcatttccttctgagccgctctacaacgctgaagacacattaaatagtgaatccaaagtcgtattacgtaacggcggcaaaactataatttattagagcaattgtcaaacaactatgaaaaacaatccagtttttagctggtggagtgggatttttctctcaaaatttattgttctaataattcttgatttttgtgcgcagctggacgtaaactcctcttcggacctgataacttcgtatagcatacattatacgaagttatattaagggttattgaacatgatcaatttacctgtaaatccatacagttcaataccttatcaggtcaaatagtgatcacttgatcatttgatcaagtttgcgctacgtaaaatctgtgaaaagttggcagtgttagtgctccagatttcgcgtagcgcacttagcaccaccaatcaatcagaggtgaaaaatgggatattcagctgctaaagtgtccactcatcttgagcttgagaaaaaccgtggttactggcgggcaaaagggtttgatcgtgatagttgccaactgtcattatcgcgcggtgaagagaaaatagtacgcacgcgcggtcgctggcgtttctatggcgagaaccataaacaggtaaaggcagagccgatcctgtacactttacttaaaaccattatctgagtgttaaatgtctaatttactgaccgtacaccaaaatttgcctgcattaccggtcgatgcaacaagtgatgaggttcgcaagaacctgatggacatgttcagggatcgccaggcgttttctgagcatacctggaaaatgcttctgtccgtttgccggtcgtgggcggcatggtgcaagttgaataaccggaagtggtttcccgcagaacctgaagatgttcgcgattatcttctatatcttcaggcgcgcggtctggcagtgaaaactatccagcaacatttgggccagctaaatatgcttcatcgtcggtccgggctgccacgaccaagtgacagcaatgctgtttcactggtcatgcgacggatccgaaaagaaaacgttgatgccggtgagcgtgcaaaacaggcgctggcgttcgaacgcactgatttcgaccaggttcgttcactcatggaaaatagcgatcgctgccaggatatacgtaatctggcatttctggggattgcttataacaccctgttacgtatagccgaaatttctaggatcagagttaaagatatctcacgtactgacggtgggagaatgttaatccatattggcagaacgaaaacgctggttagcaccgctggtgtagagaaggcacttagtctgggggtaactaaactggttgagcgatggatttctgtctctggtgtggctgatgatccgaataactacttgttttgccgtgtcagaaaaaatggtgttgccgcgccatctgccaccagccagctatcaactcgcgccctggaagggatttttgaagcaactcaccgattgatttacggggctaaggatgactctggccagaggtacctggcctggtctggacacagtgcccgtgtcggagccgcgcgagatatggcccgcgccggagtttcaataccggagatcatgcaagctggtggctggaccaacgtaaatattgtcatgaactatatccgtaatctggatagtgaaacgggggcaatggtgcgcctgctggaagatggtgattagccgtcaatatataagaaattgctataattatttgatatttatggtgacatatgagaaaggatttcgacatcggcggaaaatatgtagtgctgtctgtaagcactaatattcagtcgccagccgtcattgtcactgtaaagttaagcgatagaatggctgatattgactcaatatctgttgcgttccctgtcaaaagtattcgtagtgctgaacatttcgtgatgaatgccaccgaggaagaagcacggcgcggttttgccaaagtgatgtctgagtttggcgaatttttggggcacgttgacaaagccctctcaatcagttcagcaaggtccaaagcgttaacagcttccatgctgaaataaaaaaaagcctggcaaggagccaggctgcacaaaagagcgggtttgtattccgcatccaatcaatcaagaaggagtatagcacacaggtactgaagtgaaaaaatgtgattcgcgattaacaaaatatctatcaattgctctaattgattgctataattgagccgcagtttttgtcaactacgaagacgttgccattacttcactccttgacatcattggcggccattaggccgccttttttttgccatatgaaaacaatcgaacaaaaaattgaacagtgccgcaagtggcagaaggcagccagagaacgagcgatcgctcggcaacgggagaagttggctgatccggcctggcgagaatctcaatatcagaaaatgcggaatactatcgatcgccgtatcgctaaacagaaagagcgcccaccagccagcaaaacgcggaaaagcgcggtaaaaataaaatctcgtgacttgaagggacgaacaccgacggcggaggaacggcgcatagccaatgctcttggcgctctcccctgcattgcctgctatatgcatggagtaatatctgaagaggtgtctctgcaccatatctccggtcgtaccgcgcctggttgtcacaaaaagcaattgccactttgtagatggcaccaccagcatgcagcaccggctgaagtaagagaaaaatacccctggctggtccctgttcatgccgatggtgtggttggaggcaagaaagaattcaccttgctgaacaagtcagagatggagttgctggctgacgcctatgaaaggggtctgacgctcagtggaacgaaaactcacgttaagcaacgttttctgcctctgacgcctcttttaatggtctcagatgtcctttggtcaccagttctgccagcgtgaaggaataatggccgagcatattgatatgtccgtggcaaagcggggagaggcgtgcgatatcttcatcattcagtgtttcaccctgcgcccggagatgatccagggctgcctgcatataaatagtgttccataacacgacggcgttagtgaccagccccagtgtgcccagttgatcttcctgaccgtcggtatatcgttttcttatctcacctttttgaccgtgacagatggctctggcaacggcatggcgactttctccccgattaagctgggtcagaatgcgccggcggtaatcttcatcatcaatataattaagcagatacagcgttttgttgatgcgccccacttcaatgattgcctgagtcagtccggaaggacgttcacttttcagcaatgaacggaccagcactgaaacctgtactttgcccagcttcagggagccagcggtccggatcatttcgtcccactgaaggactatttttcggggatctgattgccctctggcaatatcattcagcacgccatagtcggcatcatggtccattcgccagaaaaccgaagcaccggcatcagccaggcgtggagaaaactggtatcccagcagccagaaaaggccaaagacaagttcgctggcacctgctgtatcggtcataatttcggttggattcagcccggtctcctgttccagaagaccttccagcacaaagatagagtccctcagcgtccccggtataacgatgccatgaaagccggaatactgatcggacacaaagttgtaccaggtgatccctctgttattaccaaagtatttgcggttcggtccggcattgattgttctgactggcgtaacaaagcgcattccatctgcagatgccacttctcctccaccccatatctgtgccagtggcagcgttgcctgaaaatcaaccagtctggcattagcgctggtgatagtttcagcccgcagatagttcgcttttgtccagttcagccggtgtcgggtcagtgcaggaacatttgatctgatcagtggttccagaccgatattgcaggcttcagccatcagcacggcgctgatgctgacgggcagatcatcaactctggcactggcttcactagcatggaaaaactcatcagcaaatccggtatgggcgttaatttcgagcagcaactccgttaaatccaccggagggagtagatcactgatcattttgctcagtcgtttcagactgtccggctcatcaagactggcgaggggagaaattgtcaaccggggcttcgggccagaaacatcgagttcgacagcctcattttcgcaaagacgtgcagcaacctgtctgtaacgactatcaagctgatgacccagagattttattgcttcctgcgggtctgtcgggtgccccaaagaacgataaaccttaatccggtttgcctgccagtcagcaccctgtagtaatcttgcacgaggatctccccaccggttactgccggtaacgtagacatccctccgcctcagactatcctgcagtttactgagaaagcagagcgtgtatcccctgcgggtgatatgtttttccttgttaatcaccagccgtttccatgaccgactgataatttccgttggtgcgtcgtcaaaaaactgccgccgtgagctgaactcccggctgaggtagtcacaggcattcagagtggtaaccccggcaggtgcggatgaaaatttaacggtattcagcagatggggcaggaaacgacgaacgcgcccgtactgctccaccatttcttcatgaaaattatcgtctgagggccgggcaatttcacggacaagcgtgatgatttcagccagcttttgccttgggatgtagctgaacacctcagcacgaatcgattcgtccggtgtttcttctttcagcaggtacgaacatgcgctggcgagcgccaatgcagatttatccagatccttcagcgagcggagccgttttttctgcccaatctttctggcgtcacggatgataacggccagcatggcgtccagaacgtccaatgcatcatccagcgccagcgtttcccatgcaaggacaaaggcaaccagaaccgccatccttttctgcggtgacatcctggcaatattgaacaccgaagtcataccagcataacgtgcgagatttttcaggcgcacagccgggagtgtactcaggttttcagcatgcaggccaaaatcgttcagagttttccagcgttcaattgcttcattaaacgccggaccactgatggtcacagggccctttttcagtgattccagtaaagacaggcggctgcaatcagttggccccagcagcatctccagctgtgaacgctgttcggctgacggtatcagtgccagtttgttccacaggcgcaacgtcgccttttcccttacctctgaaatcaaccgggtcagcgtagtggctccggggagaataatacgatgttgcataagccaccctgtcgccagatcgaaaagcaggccaggacgttcgttgcttatccagctccgggtatataaaagacgggtaaggcgaaatgtccagggccaggcaaattcacgatactgatagtgctgacgtatcagcgctgcatgctcacggcgggtattttccctctgaccgtattctgcaagaacggtgatatcacgaatcccgagctgtctggcggtaaaatgccggacgccggaaggaatatgattcatatcggtgaggaaggtgcccagaaaacggacacatccaatttgcagggcaatgcccagacggttgtgatcacctctgctttttccgataaattccttgtctgcttcatcaaggtgaaaatatcgtgccagctgaagctcatccggttcaccggtgaatctgccatagctttcagtctgctcagtggtcagaaagtcaacgggcatatcggcctccctgcctgacgggcatttagtaacatttttccaaccgtacgaaatgttataaattatcggacatcgtaaaactgttacattaatatgtctattaaatcgtaaatttgtaataatagacatgagttgtccgatattcgatttaaggtacatttttatgcgactttttggttacgctcgggtctcaaccagtcagcagtctcttgatcttcaggtcagagcactcaaagacgcaggtgtgaaagcaaaccgtatatttaccgataaggcatccggcagttcaacagaccgggaagggctggatttgctgaggatgaaggtggaggaaggtgatgtcattctggttaagaagctcgaccgtcttggccgcgacactgccgatatgatccaactgataaaggaatttgacgctcagggcgtggcagtccggttcattgatgacgggatcagtaccgacggtgatatggggcaaatggtggtcaccatcctgtcggctgtggcacaggctgaacgccggaggatcctagaacgcacgaatgagggccgacaggaagcaaagctgaaaggaatcaaatttggccgcaggcgtaccgtggacaggaacgtcgtgctgacgcttcatcagaagggcactggtgcaacggaaattgctcatcagctcagtattgcccgctccacggtttataaaattcttgaagacgaaagggcctcgtgatacgcctatttttataggttaatgtcatgataataatggtttcttagacgtcaggtggcacttttcggggaaatgtgcgcggaacccctatttgtttatttttctaaatacattcaaatatgtatccgctcatgagacaataaccctggtaaatgcttcaataatattgaaaaaggaagagtatgagtattcaacattttcgtgtcgcccttattcccttttttgcggcattttgccttcctgtttttgctcacccagaaacgctggtgaaagtaaaagatgctgaagatcagttgggtgcacgagtgggttacatcgaactggatctcaacagcggtaagatccttgagagttttcgccccgaagaacgttttccaatgatgagcacttttaaagttctgctatgtggtgcggtattatcccgtgttgacgccgggcaagagcaactcggtcgccgcatacactattctcagaatgacttggttgagtactcaccagtcacagaaaagcatcttacggatggcatgacagtaagagaattatgcagtgctgccataaccatgagtgataacactgctgccaacttacttctgacaacgatcggaggaccgaaggagctaaccgcttttttgcacaacatgggggatcatgtaactcgccttgatcgttgggaaccggagctgaatgaagccataccaaacgacgagcgtgacaccacgatgcctgcagcaatggcaacaacgttgcgcaaactattaactggcgaactacttactctagcttcccggcaacaattaatagactggatggaggcggataaagttgcaggaccacttctgcgctcggcccttccggctggctggtttattgctgataaatctggagccggtgagcgtgggtctcgcggtatcattgcagcactggggccagatggtaagccctcccgtatcgtagttatctacacgacggggagtcaggcaactatggatgaacgaaatagacagatcgctgagataggtgcctcactgattaagcattggtaactgtcagaccaagtttactcatatatactttagattgatttaaaacttcatttttaatttaaaaggatctaggtgaagatcctttttgataatctcatgaccaaaatcccttaacgtgagttttcgttccactgagcgtcagacccctgaaatggcaaacatcatgcactaataaatatattatttttaatcttaaatgattgacaactgacaagtgacttgagtcagaatcatcacacgcccggtacggatggatcccttttcaaatattccatggacggcacagtctgagtaccgggcgctaccttctgttgtattgctaagccgccgctggtggcttttcttttttgtagggggcgctatggataagaaaatatgcgttgtttcaatgagcgtcggcaaaccggcgtcaatgactgctgcatggatcaacaatgagctgataatggctgagcggaccagctaccctgaacgccgccgcgatatggaactccagctgctgcgcgaattgcgagaaaaagaggaaaagggttttatcgtgctggtggaagaggaaaacagctttattaccggtcgagttggccagcgtgtaaggttgcgtgatcccttcatgaacggtagaccggtactgattgaagcaatgcagatttacaaggaattggaacgccagaaagcgatcaagttaccgcgcaaggaatccggcaaatacatcctccaccaaagcatcttcgattccgaacatgacaaaaaaggcgatgaatttttcaacatcaactggagcgaaataacgacagagcacgttctgacgttgttatgctgcttcgcaacggaatacaacaacgttgcaaactccgactacatcagggcaatggctggagaagttgagccacgccaggaaccatcgttactaagcccactgattaacataattcgcggcacacagagacttgcggaaaaaagcgttccacatggaatcttaactggaaagggaaactatttttaacgacctgagcgccacttctttcaggtcgtgttggatgtcataaaaaggaggttttcacctccttttaaactggaattatggtaatgcgctcttgattaactgataaatatcatcattagcaaactgcgttttgaattcaactttaacagactgacttatttgattgaaaagcgcctgggcatgttcaattttctttttttcttcaagccgtaaactatccttactatctacgttttttgtttcaatgataaagttaagataatcaccttctgctgtttttacaacataagcaaaatcgggtgagtaagtgtatccaccagctaccgggatcttaatagaattcttcggtatctttgaaaaaacaacaacagactggatctctctatctgttatattacgcctttcaagctctgaatcataaaaaacctcttcaaaaagataagtatctaatggtgcttttgaattatcctgtaatacaccaagatcacttgataatacctcgtctagaggcttaccatcagcatttgtgaactttgtgggatgaattgaacccgaaatcaaattatatccgaggctgaatttgttaaacgaattgttcaacaaatacttactaaaaccagatttaatttttctgattgtttgaatattcaggtattcagtgatattaatagtgtcttttatatcacaaaaaactttatgtaaagtatcgtgtttaacaaaaatagtctgtgataagttatcgagaaactctcgataactcattgtgtttagcttagcaaagtcatcgtcatcactaacaatgcttttcgacattgccatatcattgtggatgtaaattttatcaatgcgagtatgaacgcctgatttggtaaatcgttctgtttcttcgagcatgaatgacttgaaaatggataaaaactcattttcactgtttattttgtactcaatcaccgctttttgattgattaattcccatagttctttcagctcactgaacttaccaacacgcattttagtgcgtctttttccatcagtagcttttttgattttacctggtttcactcctatagggaatgctgctggatatttggattttaagcggctgtaggcatctgaatctttgaaattatcattttcatcaatgatttcatcattgaaaagttcattcattagtgctctggatgaaagctcaggatactgagccctgattagttccttaaactcttgagtaaacttacttggaaccctttctttgaaagaactctcattgacctctttaacaagtgagtcaacaaaatccttttctgtaaaatcgacataatatttaagggtaaaattgcggtctttcactcgacacatgtattcattcacaggaagacgcaaaccgcgccctacctcttgaagcttggatgtggtactaccgctcgaacggagcttacagatctgaaagacattaggattatcccatccctcacgcaacgtccattttgagaaaatgaaacgacgtggattatctaaagacagcaaaagctctttgtcatgaaggatttcgttgatttccttctcgattttatcatccttatcactgttatcttttgaaaaataaccgccatgaacggaagatatatctttaactgttttttcaagatagttactataaaactcatctttttctatttttaacagttcattagcttctgccaaaacatattcttcgaacttagctttcaaacttccggcaatattattaccgtcacgataaccttcaatatcatcaataaagaaaagagtaagaggctttatgcgtggcctttgtgtcagaaactctttttctaacttaaagtgttctttgatagctttcctcatcatgctgtcagcaagtgtctgatcgtaagaataggggtttattgagcaaccaatttttagctcaataccattactcaacactactgtattcttgcctaaggcatcaagagttaaatcgtgaatagcactatgtgtcttagatagagattcaccttttgttaacttaaataaagttttcttgttattttcatttagctcaaatgtaacttcttccccatcagatttaatgaactttaggttggcgtcaccatcaccaacaatatcctcaatgtacgcatcaatacctttaacaaggtcttcattaaatgcatccacagctgtaagtcgataaactaaattcttatagccttcactaaaggtcgcaccgtagcggataatatattgagcattaaacttctctatattttcccatgtcttcttaccagtaggaaatttatgtggttcatcaatgataatgaatggttttaccgcaccaagagctgaaaagggagaatcaaaatgattgtcaagcaagccaacatcataagtggaatttaaattcttagagtgaatcattcccgtgttaataacaagaacgtgtatatatttcttattgaaattactagcttcaacaaaatcatgtatagcttgaggcatatacgattttgtgcttttaccggcatttttctgactttcaacaacgtaagtctttatttcacgctcataatcatctctaaagtgttcttttaacgcatcgcttttcaaaaagttcactgttccagctttgatcgatagagtaggaacaataatgataaacttattaatgccaaatgatttgttcagatcaaaaattgttttagtgtaggtatacgttttacctgtacctgtctccatagaaacatcgattacgttgcttccagcatcgtaattattttttacatgttcaataccattgagttcctgaactttttttatatttttatagtattgctgttcagtaagccgtaattctggattaactaacaggcgaatagaaacattatcctcctgatgagatgtcgcggaaacaaaaacgttcatcaccgcatcgacacctgctttctgatgcggtaagttcttttcgaatgtgaacccttttgacatgattagttccttaccactaaatctaactcaatagattttttgttagcataactttttagcgcctcattaagctccctttgttttgcactttcaaagttacaaccataaaacacgactttgtttggggcaaaatcttcatctgaatccagcttttggagcaacgctttcaatgcttcgctctgagagatcccctcataatttccccaaagcgtaaccatgtgtgaataaattttgagctagtagggttgcagccacgagtaagtcttcccttgttattgtgtagccagaatgccgcaaaacttccatgcctaagcgaactgttgagagtacgtttcgatttctgactgtgttagcctggaagtgcttgtcccaaccttgtttctgagc

SEQ ID NO: 50 - DNA, 49536 bp, Escherichia coli
  source 1..49536: mol_type = genomic DNA
ggtgcttttgccgttacgcaccaccccgtcagtagctgaacaggagggacagctgatagaaacagaagccactggagcacctcaaaaacaccatcatacactaaatcagtaagttggcagcatcacccaatttatttaaaaatgaattattaattattatcgtgttgataatggtacgacaaggcaacacaacaccttacctacaaaacagaaaatcaacattacggcaacaataagggttctcggtgtttttcctggaacatggtaaagtaaggacattcttaacccccactttgaggtgcccgatggaaaagaccacaacgcaggagttattagcgcaggctgaaaaaatctgcgcgcagcgtaatgtgcgcctgaccccacagcgcctggaagtgttgcgcctgatgagtctgcaggatggcgctatcagcgcttatgatctgcttgatttactgcgcgaagctgaaccgcaagccaagccgccaacggtttatcgcgcgctggattttctgcttgagcaaggttttgtgcataaggtggaatccaccaacagttatgtgctctgtcatctgttcgaccagcccacccatacgtcagccatgtttatttgcgatcgctgcggcgcggtgaaagaagagtgtgctgaaggcgtggaagacatcatgcatacgctggcggcaaaaatggggtttgccctgcggcataatgtgattgaagcacatgggctctgtgcggcatgcgtggaagtggaagcgtgtcgtcatcctgaacagtgccagcatgatcactctgtgcaggtgaaaaagaaaccgcgttaagagggcgtacatccttgtacacgtcgggcaggagggattaattaccagcgatattcattgcgggtttcccaatccacgacctctttttctgcctgatctttctgataaccataacgttcctggattttaccgaccagttgatcacgtttaccttcaatgatcgtcatatcatcatcggtcagtttgccccattgctctttcactttacctttaaactgtttccagttaccgccggcttcatctttattcataatcaagacctcatcgttaggttgtgaatgagagtacgttcacttttcttctgaacgtgagattaagtgtagtcagcaatttggcttaggataatttattcagaatttttaaccgtcacgttgcggcaaaccaggtaccgttgcgccagtgacgccgccagatagccgccagagaaagcccgcgcaacgccagaaagacggttaatgccagccacaaaccatgattacccagccacggcagcgtaaggagcgtcagcgcaaaacctgcggcggccaccgccatactgttacgcatttcggcggcacgcgttgcgcctataaacatgccgtccagcagataacaccagacgccaaccaacggcaaaatcacctgccagataagatagcggtcagccagctgctgaatctgggttaacgacgtcagcaacgcaatgatgtgttcccctgccagcaaataaaccaccgaaaacagtaacgctacaatccccgactggcggcacgctgcccgccatacatccagcaactggctaccgtcgcgcgcaccgtatgcctgaccggagtgcgcttcaaccgcgtaggcaaaaccatcaagcgcataggcggtaaaggtgagtagcgtcatcagaaccgcgttaacagcgacaatgtcactccccagtcgcgcaccaagtacggtgatcgcgccgaaacagagttgcaacaacagcgaacgcagcatgatatcgcggttaagcgccagcaagcgacggaagtttcctcgccaggcagttttcagcatttcgccggaaattccgcgtagtttgaggattttacgcaccattagcagaccaatcagcaatgttgcatattccgcaataaccgtcgccagcgccgcgccctgcacgttcatatgcagccccatcaccagccagacatccagcacaatgttgaggatattgccgaccactaacaaaattactggcgcacgggcatattgcacgccgagtaaccaaccgagtaataccagattcgccagcgacgccggagcgcttaaccagcggatttcaagaaagcgccgcgcctgttccaggaccgcttcactaccgccaacaatatgcagcgccagatcgataatcggtgtacgcagcagcgcaattaacgccccagcccccaacgccaacagcaacggttgcaccagcgcacgggctaatgcctgaggatttttggcaccataagcctgcgcagtcagcccggtggtgctcatgcgtaaaaacagcaacagcataaagagaaagctggtcgccgttgcaccaaccgccacgccgcccaaataaaccgggctatcaagatgaccaattaccgccgtatcgaccagtcccagcaacggaacggtgatattggagaaaatcatgggtaaggcgagatgccagagtgctttatcagatgaagtgaggaatgccatgcagacaagcctgatgaagagagatgaaaaacaaaccgcgacgcctggcggcatcgcggtctcagagatatgttacagccagtcgccgttgcgaataaccccaaccgccagcccttcaatggtgaagctctgctgacgaaggtcaacgacaattggtttaaactcgctattttctggcaacagttcgactttattgccctgttttttcaggcgcttaacggtaacttcgtcatcaatacgtgcgacaacgacctgaccgttacgtacatcctgagttttatgcactgccagcaagtcaccatccataatgccgatatctttcatcgacatcccgctgacgcgcagcaggaaatcagcattcggcttgaacaaggaaggatcgacctgataatgaccttcaatatgctgttgcgccagaagcggttcaccggcagccacacgacctaccagcggcaacccttcttcctcttcctgcaacagacgaatcccgcgtgatgcgccggaaacaatttcaataacgcctttgcgtgccagcgccttcagatgttcttcagccgcgtttggggaacggaaccccaaacgctgcgcgatttccgcacgcgtcggcggcatacctgtctggctgatgtgatcacggatgagatcaaacacctcttgttgcctggccgttaacgctttcattccgccccctgggtgtatatacagttatactgtgagtatatacagcaaaaggcgattttggaaccataaactgcacaataaaccagagatttatcgaaatctggaagggttatccaaaatgcgaccataacagaatgcaccaggtaatcacggcgacgataatggcaatcagcaccgcggcggatcccatatctttagcgcgtccggaaagctcatggtattcagagccaattcggtcaaccactgcttcgatggcgctattgagaatttccacaatcatcaccagcatcacggagctgataagcagcacgcgggtaattgcgtccacatccagccagcaggcgatgaccaccgccaacaataccgctacgccttcctgacggaatgccgcttcgttgatccatgcagcgcgtaaacctttccaggaatagccagcagctttgataattcgggtgaatccagtggtattattggccattgaaagaacctttttacattatgagcgtcaatatcagtgtaccgttaaatccgatgattcgggtttgcgtaacgccgcgcgaaacatgagcggataccacagaatttcccatgactttctgctatccttgccgcgcatttgcattattaaccagaggctttacatcgtttatgtccggctggccacgaatttactacaaattactgaatttaccattaagcatcctggtaaaaagcaagtctattccggcagatcctgccccggaactggggctggatacctctcgtccaattatgtacgttttaccgtacaactcgaaagcagatttgctgacgttacgcgcccagtgtctggctcatgacttgcctgacccgttagagccgctggaaatcgacggcacgctactgccgcgctatgtgttcattcacggcgggccgcgtgtattcacctattacacgccgaaagaagagtctattaagctgttccacgactatctcgatttgcaccgtagcaacccaaatctggatgtgcagatggtgccagtatcggtgatgtttggtcgcgcgccggggcgtgaaaaaggcgaagtaaacccgccgctgcgtatgcttaacggcgtacagaaatttttcgccgtactgtggctcggtcgcgacagttttgtgcgtttctcgccgtcagtttcgctgcgccgtatggcggatgaacacggcacggataaaactatcgcacagaaactggcgcgcgtggcgcgtatgcactttgcccgtcaacgtctggctgctgtgggcccacgtctgcctgctcgtcaggatctgtttaataagctgctcgcctcccgcgccattgccaaagcggtagaagatgaagcgcgcagcaaaaaaatctcccatgaaaaagcgcagcagaacgcgattgcgctgatggaagagattgcggcgaatttctcttacgagatgatccgcctgactgaccgcattctgggcttcacctggaaccgactttatcagggcatcaacgtccataacgccgagcgcgttcgccagctggcccacgacggtcatgagctggtgtatgtgccttgccaccgcagtcacatggactacctgctactttcttacgtgctgtaccaccaggggctggtgccgccgcatatcgccgccgggatcaacctgaacttctggccggccgggccgattttccgccgtctgggggcgttctttattcgccgtacttttaaaggcaataaactttattccaccgttttccgtgagtatctcggcgaactgttcagccgtggttattccgtcgagtacttcgtggaaggcggtcgttcccgcacggggcgtttgctggatccgaaaaccggtacgctgtcgatgaccattcaggcgatgctgcgtggcggcacgcgtccgattacgctgattccgatctatatcggttatgagcacgtcatggaagtgggtacttacgccaaagaactgcgcggcgcgacgaaagagaaagagagcctgccgcagatgctgcgcggtttaagcaagctgcgtaatctcggtcagggttacgtcaacttcggtgaaccaatgccgttgatgacctaccttaaccagcacgtaccagactggcgtgaatctatcgatcccatcgaagcggtgcgtccggcctggttaacgccgacggtcaataatattgctgccgatctgatggtacgcattaacaacgcaggcgcggcaaacgccatgaacctgtgttgtactgcgcttctggcatcacgtcagcgctcactcacccgcgagcagttaaccgagcaactcaactgctacctggatctgatgcgcaacgtaccttactccacagactctaccgttccttcagccagcgccagcgagcttatcgatcacgcgctgcaaatgaacaagtttgaagtcgagaaagacactatcggcgacatcatcattctgccacgcgagcaagcggtgctgatgacctactatcgcaacaacattgcgcatatgttggtgctgccttcgctgatggcggcaattgtcacccagcatcgccacatctcccgcgacgtattgatggagcacgtcaatgtgctttacccaatgctgaaagcggagctgttcctgcgctgggatcgcgacgagttgccggacgttattgatgcgctggcaaatgagatgcaacgtcaggggctgattaccctgcaagatgatgagttgcatatcaacccggcgcattctcgcaccctacagctgctggccgcaggcgcgcgcgaaacgctgcaacgttatgccatcaccttctggttgttgagtgccaacccgtcgatcaaccgcggtacgctggagaaagagagccgcaccgtcgctcaacgtctctccgtgctgcacggcatcaacgcgccggagttcttcgacaaggcggtgttcagttctctggtgctgacgctgcgtgatgaagggtatatcagcgatagcggcgacgccgaaccggcagaaacgatgaaggtttatcagttgctggcggagttgattacatcagacgtgcgtttgacgattgagagtgcgacgcagggcgaagggtaatcagagagaattgccggatgcggcgaaaacgccttatccggccttccataatctgcaaattcaataaattgcgatgtgttgtgtaggccagagaagcgccgcgcataaggcaacccagaagaaagccggatgatcatccggcttttttacatcatcagaaatgccagtaactcattgccagtcctaaaaacagtaccagaccaacatagttattattcataaatgctttaaagcaggcttcacgctcgcggttggcaatcagtttttgttgataaacaaacagcgcgccagccaccacaattgaccagtaatatccccagcctaagccatttaactcaccgatgatcgccatcagtgccagtacgccaatctgcaaaataccaataatcaatttatcgtattggccgaacaggattgccgtggatttaatgccaatcttcacatcatcatcgcggtcaaccatcgcatactgcgtgtcgtaagccaccgcccagagaatattggcgaggaacattaaccagcaactcaatggcaccgactcactcacagcggcaaaagccattggaatcgaccagccaaacgccgcgcccagcaccacttgcgggagatgggtataccgcttcataaacgggtacacccacgccaacgccagagcggcaatcgacaacagaatggtcatcgtattcagcgtcagtaccagtaaaaacgaaatcagtaccagcactacaaacagcgcgcgcgcctctttctctgttaccgcgccgctgggaagtggtcggttcgccgtgcgcttaacatgaccatcaaactttcggtcagcataatcattcaccacacatccagcagcgcgcatcagccagacacccgcgacaaataccgccaggatccagagctgaggaacgcccggtgtcgccacccacaacgcccataatgttggccagagcagcagtaacgcgccaattggcttatccgtacgcattaagcgatgaaacgccagcagcttattctgcgtcagactccactccatatttttttcctcttagtacaacggtgacgccggtaaaaacagttctgttagcaacagcggtttaccgcttaatcgcaggcgggaacgtcgcccccacagtccggcatcacggcctatctcaataaagtcccgggttaatgtcgatgatgtgaacagatagcgtcctaacggcgttttacccaatttttgtaacgccagctccggcccgcttaacgttgacacaggaacgacggtacgaccggcaagccacggttcaccatcggcacataacaaaatttcacgtaaccagtaacgagactctttcggcagcagcggcagttcttcggggatttcattctgctcgacaaacccttcgcggatcatcgtcacgcttaccgtttttccctgctgttcaaaacgttttgtcatggaatcctccagcaacagccagtcgagcagttgcggttccagggcagggatctctttaaaatagcgcagcgcacgcagttgcgttaacgcggggtgtgacatgccgaactctccgttacataacgtaaaggcattgtatcgcagaaaagtgtttacgggagatgtaaagcaaattaagtgatctaatacgcaacaaaaacgcaacaatcgcatgaagtggtaaaacgctgttgaaccttacgctttgccgatgcccgcgctggagagggcaaccataggggcatcaccgcccaggatgccaggaacggtgatgttttcctttacttaaacacccttattcattatacgatgagctcgccaactcgcagtaaaaatggggaaaagcgcatatttaccatgagatttggagctgaaaagtgtttcctgagtaagattaacaggcaacatctcatgtctggatttgtagatatacgtggaattccaattggtatcttttgtaggattcaacatatcatgtaagcgctgggagcttaccaccataacaggcccatcatcgacagaggagaacaggataaatatattatcgtttcgtgttaatttattagtgttaaaggttcttaacttttcttcagtttctataaatataggtgaaacatcatcactacgaatccactctttataaagataccaggcatttgctttgatcatatcatccgttgatcgtaaggcctgatcgataagttggataaaaaaattgttatttttatcaatcagccctttattcatattaaacctgttaataaaatggatcatctgttgggtatcgaaatccaccttgctgaatcgatgttgacgcataaaatcatcgaacttgttatcttcaccagaatggatataactgcgtataattggatcttttatataaggacaatggctaaatgttttcttcatattctcaataaagtttttattaacaatattaagaatttttaattgcataaccagttttactgccagaacggatttcaatatcattgcattatctggcaatgtatcaatcatttttataatgttattgatataaccatcgagatcttcattcccaaatatatctgaataatcaatagttaattccaattgttctgtaatgcaatctttaaaattccctgtcgatattcgcacatgatcaaacataacagctgtcatattcgatttaataaatgatatttctttggcagacagaaactctgctctggtgaagtgcgaagcgtaaagataacaattatcgaagtttgaatttctaatctgatattcgcgaaaattactctgagtaagttgactctgcgagaagtcaactgtatcaagaatatttttgctgaaatcgacacattcaccactcgctttgataaaaatcacattgtgtaaacgtcgacatctaaatatgacattatcaactattgcagtagtaaaattgcaatccccaatttctttacattcgaatgttacatgttatagatttgatgataaaaaagacaccttcgatataacgtcacctttaaaatgacaacttgttaaatccaaatcagacaggtcgatatacccctgcgcatctttatccatcagaaaattgcaagcgcattcaatttttttcatttctgtagaattttacacttatagtatcattactgattgagacttcacgaaacaaatttattgcatgattttttcgttccgttattttatatttgaaaaaaatattgctgatataaataaagttatctctgtttaaacctggcaccccattgaaattacgtagtaaatcaagatctactatattatttccttgcaccacatcatgtttcatcaaagagttattgccgccagaatttgggatatgacttatcataaaacctctgcataacagaaataaaataacatggaaaagtagcctgaatgtccagacactaccggcgaaaggaaaagaatctctgataaggcattgagataatggatattcttagtgaagaagaagtgagttactataaaaaatcgctcatatcccaggaaggaagcataaaaaaaggtgcgccaggagacgcaccagttgttgcaaaatcagcactgtggggcgtaattaccccttgccttttacactgctgataaaggtggaacgggcagatgtcgatcccaggcgttcagcttcatcaagcagttttaacgccttatcaacatcacctttcgcgacagcgtttttgatcgcggtattaaaataactttccgtgtcgttgagcatcggctcgcttttcttcaccggtgccggagcgggtgcagccacagctggtgccgccgtgttacctaccgtaaccggagctggagcggaagaaccaaataaaggtcctaccaacacgctggagctggagttcgttttcactttcagtttcagtaagccatcggtggtatgacgagcaaccggatcggggatatccgggatcgagttaccgacgcccttggcataggctttagccgggtcgagcagttgggtcgtctgctggagatctttttccgtggtaaagaccagaacataaagtttttgctgccccaacgccggtgtcaggcgcataacgccttccagccgatctgcactcatcacgcctggttcctggtaggtgaaataactgctggggaagaaggctgatggggtcatgttctgatcaagaatcagcacgttcggcgcaaaaacgctggtttgtttgttcacttcgctggtcagcgtcagggtcagttcgccaatgtttgccgggacgctgtacgcagcaaccggaccactgatgccgggaacgttcagttgttggccgccggtcgccagttgggtggtctgggttttagattgatcgaccggtgtccaggtgagttgttgcagcgcagcagatggaatggctggcgcgtcgctggtgttttgcggtacgtagttaacatcggcaaggctgattccaggcgcgcttgccagtaaccctgctgataaacagagggcgatgagacttttattcattttcattgttttcacctcaaaatctggagctcagcggtagccaggcaatagcgcgctaaacccgataatcagaggggctttcgcccctttcagataatgacaacctgtttttatgccggatgcggcgtaaacgccttatccggcctacatttgacagccgttgtaggcctgataagacgcgcaagcgtcgcatcaggcgttggttgccgaatgcggcgtaaacgccttatccggcccaggttttgctattaccaccagatttccatctgggcaccgaaggtccactcgtcgctgtcgccacgaccgaagctgccgccgttgaaatcagcaggaacggctttgccgtagttcgggttaaccttgctatcgccgttgtagtcataaccccatttctcatcccacttggcgtaggttgcgaagacacgaatagccgggcgtgaccagatgctgtcgccagcctgccattgttgtgcgagggtaattttgtactgattgttcttgtcgccggtgcgctgggattcgacgttgtcgtagccgatttccatcacggtgctcatgattggcgtccacttgtacatcgggcgaataccaacggtccaccacttggtgccgttgtcgttatcccagttgatatcctggtacatacccacgtacatcatgtcccagttgtcgcccatggagatcgcaccgtggtcgaggatacgcagcatgtgaccgttgttgttgatattgtaggcaaatttttcgttatcaaacgcgacgccagaaccctgcgacagacctttaccctgcgaggtcatcgagtcagtagcgtactgaacaacaaacttgttaaagcccttcaggacactctgagtatgttcagcagtgaataaccagccgtctttcgatgcgccatcaaccagacgatagttatcacgcaggttggcacgaccgtagtcgacacccagttctaatgtgccgcccgggttgatttccatctgcgctaaacgcacatcgaaaacgtcgttcgcggtttcgttggtatagtcataaatattgttgctggcaaaagaggaagaaccaccagcttcagaggagcgggttgctgccagagagagtttaccgaagccaacatcgatgttttccagaccggcaccaggaccagaaatatcccagtagtagaagtcgatcatatgaacgtcatgacgttggtagaagcgcttacctgcccagatggtggaacctggcagccattcgatcaggtttttaccctgcacgtttgcttcacggaaggccggatcggtagcttcccagtcattctgttgcgcgacggaataggccacgttagtgtcgaaatagaagctcttatcgccctctttccacacttcctgacccaattttaattcagcataagtttcacattcgttgccaagacggtatttactttgagcaccggtagtctggaaacactgttgttcaccgccgctacctgtccagccaataccggaacgtgcatagccgtggaaatcaacagccattgcctgagcagacattacgcccgctgcgacggcaaccgccagaggaagtttgcgcagagtaatcatcattctatctcctgagtcattgcttttcttttttcacatcacctgtgacaggctttgtgtgttttgtggggtgcttaaacgcccggcgccttatgcagtcgacgacatgcagtgccatcctcacggaacagatggcaacgctctggcggcaggccgatagcgaatgtggcaccttcttctaccaacaccacgtcgttctggcggtacaccaggttttgacgaatggaagggatctggatatggatttgggtttcgttgccgagttgctcgacgacctgaacttcaccctcaaggatgacgtcagcgatatcactcggcagtagatgttccgggcgaatacccagcgacatattggctccaacctggacatcacggctttcaactggcagccagacttgctgacgatttggcatcggcagctccacctgcacttgatcgattgcggtggcggtcacttttaccggcaggaagttcatctttggcgaaccgataaatccggcgacaaaacggtctgccggatagtggtacagctccagcggtttcccaacctgcgccacgcgaccggcgtccagcaccacgattttgtcggccagcgtcatcgcttcgacctgatcgtgggtgacgtaaatcattgtgcggcccaggcgtttatgcagacgggagatttcgatacgcatttgcacacgcagtgcagcatcgaggttggagagcggttcatcgagcaaaaatacgcttggctcggccaccagcgtacggccaatcgccacacgctgacgctgaccgccagagagcgctttcggtttgcgatccagcaaatgcgccagttgcagcacttccgccacctggttaacgcgttggttaatcacctctttttttgcgccagccagtttcaggccaaatgacatgttttctgctactgacaggtggggatagagcgcgtaagactgaaacaccataccaacgccgcgttctgctggcggagtgtcattcatccgtttctcaccgatgaacaggtcgccgctggtgatcgtctcaagcccggcaatcatgcgcagtaaagtcgatttaccgcagccagacggtccgacaaacaccacgaattcaccttcatggatatcgagattgatatctttcgataccacgacctcgccccaggctttcgttacattttgcagctgtacgctcgccatgcccttctccctttgtaacaacctgtcatcgacagcaacattcatgatgggctgactatgcgtcatcaggagatggcttaaatcctccaccccctggcttttttatgggggaggaggcgggaggatgagaacacggcttctgtgaactgaaccgaggtcatgtaaggaatttcgtgatgttgcttgcaaaaatcgtggcgattttatgtgcgcatctccacattaccgccaattctgtaacagagatcacacaaagcaacggtggggcgtaggggcaaggaggatggaaagaggttgccgtataaagaaactagagtccgtttaggtgttttcacgagcacttcaccaacaaggaccatagattatgaaaataaaaacaggtgcacgcatcctcgcattatccgcattaacgacgatgatgttttccgcctcggctctcgccaaaatcgaagaaggtaaactggtaatctggattaacggcgataaaggctataacggtctcgctgaagtcggtaagaaattcgagaaagataccggaattaaagtcaccgttgagcatccggataaactggaagagaaattccctcaggttgcggcaactggcgatggccctgacattatcttctgggcgcacgaccgttttggtggctacgctcaatctggcctgttggctgaaatcaccccggacaaagcgttccaggacaagctgtatccgtttacctgggatgccgtacgttacaacggcaagctgattgcttacccgatcgctgttgaagcgttatcgctgatttataacaaagatctgctgccgaacccaccaaaaacctgggaagagatcccggcgctggataaagaactgaaagcgaaaggtaagagcgcgctgatgttcaacctgcaagaaccgtacttcacctggccgctgattgctgctgacgggggttatgcgttcaagtatgaaaacggcaagtacgatattaaagacgtgggcgtggataacgctggcgcgaaagcgggtctgaccttcctggttgacctgattaaaaacaaacacatgaatgcagacaccgattactccatcgcagaagctgcctttaataaaggcgaaacagcgatgaccatcaacggcccgtgggcatggtccaacatcgacaccagcaaagtgaattatggtgtaacggtactgccgaccttcaagggtcaaccatctaaaccgttcgttggcgtgctgagcgccggtattaacgccgccagtccgaacaaagagctggcgaaagagttcctcgaaaactatctgctgactgacgaaggtctggaagcggtcaataaagacaaaccgctgggtgcagtggcgctgaagtcttacgaggaaaagttggcgaaagacccacgtattgccgccaccatggaaaacgcccagaaaggtgaaatcatgccaaacatcccgcagatgtccgctttctggtatgccgtacgtactgcggtgatcaacgccgccagcggtcgtcagactgtcgatgaagccctgaaagacgcgcagactcgtatcaccaagtaatgctgtgaaatgccggatgcggcgtgaacgccttgtccggcctacaaaactgaaacgcatgtaggcctgataagacgcatcagtgtcgcatcaggcagttgttgtcggataaggcgtgaaagccttatccgtcctggaatgaggaagaaccccatggatgtcattaaaaagaaacattggtggcaaagcgacgcgctgaaatggtcagtgctaggtctgctcggcctgctggtgggttaccttgttgttttaatgtacgcacaaggggaatacctgttcgccattaccacgctgatattgagttcagcggggctgtatattttcgccaatcgtaaagcctacgcctggcgctatgtttacccgggaatggctggaatgggattattcgtcctcttccctctggtctgcaccatcgccattgccttcaccaactacagcagcactaaccagctgacttttgaacgtgcgcaggaagtgttgttagatcgctcctggcaagcaggcaaaacctataactttggtctttacccggcgggcgatgagtggcaactggcgctcagcgacggcgaaaccggcaaaaattacctctccgacgcgtttaaatttggcggcgagcaaaaactgcaactgaaagaaacgaccgcccagcccgaaggcgaacgcgcgaatctgcgcgtgattacccagaatcgtcaggcgctgagtgacattaccgccattctgccggatggcaacaaagtgatgatgagctccctgcgccagttttctggcacgcagccgctctacacactcgacggtaacggcacgttgacgaataatcagagtggcgtgaaatatcgtccgaataaccaaattggcttttaccagtccattaccgccgacggcaactggggggatgaaaagctaagccccggttacaccgtgaccaccggctggaaaaactttacccgcgtctttaccgacgaaggcattcagaaaccgttcctcgccattttcgtctggaccgtggtgttttcactgatcaccgtctttttaacggtggcggtcggcatggttctggcgtgtctggtgcagtgggaagcgttgcgtggcaaagcggtatatcgcgtcctgctgattctgccctacgcggtgccatcattcatttcaatcttgattttcaaagggttgtttaaccagagcttcggtgaaatcaacatgatgttgagcgcgctgtttggcgtgaagcccgcctggttcagcgatccgaccactgcccgaacgatgctgattatcgtcaatacctggctgggttatccgtacatgatgatcctctgcatgggcttgctgaaagcgattccggacgatttgtatgaagcctcagcaatggatggcgcaggtccgttccagaacttctttaagattacgctgccgctgctgattaaaccgctgacgccgctgatgatcgccagcttcgcctttaactttaacaacttcgtgctgattcagctgttaaccaacggcggcccggatcgtcttggcacgaccacgccagccggttataccgacctgcttgttaactacacttaccgcatcgcttttgaaggcggcgggggtcaggacttcggtctggctgcagcaattgccacgctgatcttcctgctggtgggtgcgctggcgatagtgaacctgaaagccacgcgaatgaagtttgattaagggagataacaaaaatggcaatggtccaaccgaaatcgcaaaaagcacgtttgtttattactcacctgctactgctactttttatcgcggcgattatgttcccgctgctgatggtcgtcgctatctcgctgcgtcagggaaacttcgcgaccggtagcctgatcccggagcaaatctcctgggatcactggaaactggcgttaggttttagcgttgaacaggctgatggtcgcattacgccaccgccattcccggtactgctgtggctgtggaactcggtaaaggtcgctgggatttccgcgattggcattgtggcgctctccaccacctgcgcctacgctttcgcccgtatgcgctttccaggcaaagcgacgctgctgaaaggaatgctgattttccagatgttcccggcagtactttcactggtcgcgttgtatgcgttgtttgatcgtctgggtgagtacattccattcattggcctgaatactcacggcggcgtaattttcgcgtatctgggtgggattgcgctgcatgtctggaccatcaaaggctatttcgaaaccatcgacagttcgctggaagaagcggctgcgctggatggtgcgacaccgtggcaggctttccgccttgtcctgttgccgctgtcagtaccgattctggcggtggtattcatcttgtcgtttatcgctgccattactgaagttccggtcgcgtcgctgttactgcgtgacgtaaacagctacaccctggccgtggggatgcagcaatacctcaacccgcaaaactacctgtggggtgactttgccgccgctgccgtgatgtctgcattaccgatcaccatcgtcttcttgctggctcaacgctggctggtcaacggcctgacggcaggtggtgtgaaaggttaaagatgttgttctgccaatgttatgccgctgcaccctcaacttacgttatcccaacttgtgactgttattcggcgctccacggagcgcctttttttctttcgtctgcaatctgaatcgttcgccggttaatattcccatcatagaacttattatttttacgttatttgttttcccacttacgataattctctttcgtgctctgagtcacggtaatagtattgttttcatcaatttttgataattatcacaattaagatcacagaaaagacattacgtaaacgcattgtaaaaaatgataattgccttaactgcctgacaattccaacatcaatgcactgataaaagatcagaatggtctaaggcaggtctgaatgaatacccagtataattccagttatatattttcgattaccttagtcgctacattaggtggtttattatttggctacgacaccgccgttatttccggtactgttgagtcactcaataccgtctttgttgctccacaaaacttaagtgaatccgctgccaactccctgttaggattttgcgtagccagcgctctgattggttgcatcatcggcggtgccctcggtggttattgcagtaaccgcttcggccgtcgtgattcacttaagattgctgctgtcctgttttttatttctggtgtaggttctgcctggccagaacttggttttacctctataaacccggacaacacagtacctatttatctggcaggttatgtcccggaatttgttatttatcgtattattggcggtattggcgttggtttagcctcaatgctttcaccaatgtatattgcggaactggctccagctcatattcgcggaaaactggtttcatttaaccagtttgcgattattttcgggcaacttttagtttactgcgtaaactattttattgcccgttccggtgatgccagctggctgaatactgacggctggcgttatatgtttgcctcggaatgtatccctgcactgctgttcttaatgctgctgtataccgtgccagaaagtcctcgctggctgatgtcacgcggcaagcaagaacaggcggaaagtatcctgcgcaaaattatgggcaacacgcttgcaactcaggcagtacaggaaattaaacactccctggatcatggccgcaaaaccggtggtcgtctgctgatgtttggcgtgggcgtgattgtcatcggcgttatgctctccatcttccagcaatttgtcggcatcaatgtggtgttgtactacgcgccggaagtgttcaaaacgctgggggccagcacggatatcgcgctgttgcagaccattattgtcggagttatcaacctcaccttcaccgttctggcaattatgacggtggataaatttggtcgtaagccactgcaaattatcggcgcgctcggaatggcaatcggtatgtttagcctcggtaccgcgttttacactcaggcaccgggtattgtggcgctactgtcgatgctgttctatgttgccgcctttgccatgtcctggggtccggtatgctgggttctgctgtcggaaatcttcccgaatgccattcgtggtaaagcgctggcaatcgcggtggcggcccagtggctggcgaactacttcgtctcctggaccttcccgatgatggacaaaaactcctggctggtggcccatttccacaacggtttctcctactggatttacgggtgtatgggcgttctggcagcactatttatgtggaaatttgtcccggaaaccaaaggtaaaacccttgaggagctggaagccctctgggaaccggaaacgaagaaaacacaacaaactgctacgctgtaatcttcctgtccagcacgccgcgccagttcggcgtgctgtctttttactcccgcttcagccgtttcgaattacacaaccacagagtgatcaccagtaacaggatcgcagccgagtagatcaacacatccagtggcgatttatgatcgacgatgatcaagcgcacaatggcggtgatcccaatatagacaaagtaacgtagcgggaagtgaaaaccggactgaaagtatttcacaatcagcgcgataaattcgaaatagagaaagtaaaccaccagtccttctaccagctcatatttgctggtttgttctggcgcgaacagcacatctgccagatgcaccgtttctttgccgaggaagacaaccaaaatcaggccgaggcacaacaggccaagattgagtacggtctgcaaaatggtggagataaactccacgcgcggacgagagagtgacgtcatagcagtacctccttcacagtggcgagcttcctgtataacgcaaaaatgtgacggagatctatattttttgtgtatgttttgttcagcttgattaagtgggcatctcccatcaacgtcgcatctggcaaaacacacagccccaaaaaatcacccattcaggtgattcccagccaccagcaatgcgcgaaaaatcgaccatgttcctctggaacaaatgaaacgtaacctgataaaggtggtaaaaatgaagccttattttgctgctttgatgttatcagtctctgttcttcctgcttatgctggtccgctcggtactgctgataaagccgacctaccgcaaagcaatgtctccagcccaatgatggcccagtcgctcaggcaaccagatctgcaaccgatatcgacggacaggaagacagaatgttttcgcctttacacaccagatcgcaaaccgggggtgaactgcgttcctgatggctcaacaggccattaagaatgagggtgccagtgattgcgaaaactggcacctttcccatgacttagcggaaattgacgctacggtcgctggtcatgtcatacaactggaacttacgcccaagttgctgaccaccgtcacgcgtcagcggcgtccagccaatcgccgcacggctgcgtgtcgggccagacgagaagagatccaacggtaccgagacatacacgcctttggtgaagtccccttcgccgtactcctcttttgaaacattagtgatcgtggcatagccacccaccaccacgccgctatcaaagcgtttggcgatctccagcgtgccgcctttatcccctgccagatactgcccgacgctggctttaactaacacatcctgagcgaaagatggcgtccagtaggcggtcagatgtccggttttcacgctgtagtcggtgaatttcatcatatcttttgcactacgccagtcgcgctgtttaacgtagttggcatccagaccaaacgcccagttgctgtccagcgggcgatacaacacttctgcccccgcaccgccaaacatggtttcgagataaccaccgtagacctgaccgtagaagccgttgcccagatgctggaagtagttggcttgcaggttattcacatagacatcgttctgcacatactcgcgcacatgggtacgcacgcgcggtaagtgcgagtcctgcggaggattagtgtagttaaacttgtcgtagttgttggcaagatttgcaaacaggctgccggtcgtcagcagatggtccgtcagccacaaatctgccgttcccatcacgcccagctgatacatgtaaaagttttccgggccaccgaccgactggttcagcaccggatcgatatggaaatcaaagcgtgatttgtcgatataccatccctgctcggtggactgcggaaccactggctcgacgcgtttttgcgccagcgtcgtttcgtggcccaacggctctccggcgagatgatttttcaggctggcgacatcggtttccgtcgtcacctgcggcatgttaaggcgattttccgtaacgcggatcgttttgatcccatccggcagatcattcatcacgatccgattagcacggatgatcccttcgcgcgaatcacgatatttcacctgctcgccggtaacatacagcgtatcgcctttcgcctggatctgcggatcggcaagtccggcattgtatttcaacagcgttaactgattcgccaccaccgaatgctgcaaaatggcatcctgcggctgcggttgatattgcgggcgggcgttatcgttgtaagacgggcgcagatcgttaaagttggtgcgcagcgtgacgccaaacataaaggtgttgccacgttcatagctaaggttaacgtcggcccaatcggtaacgcgataaatcgcaccgacgttaaacttacttttttgctccagcttcccggcaaaatcctgctgataattattgccttcatactccagtttcaggcgcagcggttgccagggcgtctggtattccacgccgccaaacagtgaggcaggaccgtggaacatctggctaccgtcgatagatcccgcctgtttgtagctgttatcgcgatagcaatatttatcactggctgaacagagcggattttttacattaccgctggtgcccagatatccccagcccaggccgagcgtaaaatcgaacggcccccaggctttgctggcaacaagatattccgcatcaaacagccccgtaccgccgatatcccgcgcaccaaccgccacttgcggcagccagtaactctcttcccacaaacgcagtttgagatcgaaggctttatctttatacgtttgatcgccagagaacgcttcgacgctgctgtactgccgggtgcgcacgtcggtgtagcgcagcgttgtttccagccacgggaagagttgcactgaagctgagtaataacggtactgatcgttatcgcgatagttcagactcaactccccttcccgtgccatacgcgcggtgggcgtttgtaataatcctacgccaccgaaatccgactgcgacggaccaatgggcgcaggatatgtttcgccgtagcaagctgtgctaatgcccagcgccagtaagctaagcagatgtctttttttcattattgaggtatccgctgcgtcagagtctgaagaatgtcggcgttaagggcatcaggcgtctcactccagacggagtccgcgaggccaacataaataatgctgccgggcatcggctctacgtgacgcttgttccagtaagccaccggcgctttttgcgtgcgtccgtccgggtaaaccacccacgcgtagctgcgatccgcaccgctgagcaggctctggtcagagagatagctcgccacgtcgcgacctggagtgaatggctgcttgccaggacggctgataagcccgaacaacgtgaccgtggacggcggtggtccgacccacagcgtgtagttgccctgcaacggcgggttaccgcgttcggcaacgcggacgatatcgggatcaagattgattttttgcctgcccgtcactttcaacgcctgaatttgctggcgtaaggcgttaatcgcagcggcatcgtcggcgctggaatctgcgccctgttctgccagccgtgtcagcaacgcctgctgctgccgcaatgctgccgccgttgccagctcttcgctgatcaccgcaccgggccaccagctgtttgccagccgcggttggcctaccagatcgattaaatgctctgcgcctgttagtgttttggcctcactgctgccattgctgaacaccttgacggttcctgccgcgaagaccgatgacgctcccacactcaaaagcaacgcgacaaaagtttgtttaatcattgttttgccgccttgatgagagtggttttcaccgggaaataatccgcgccgagatactgttccgactggcgaatttgcccttcgctgtcgatccaatagcggttatgccagcgcgcctggtcggtggagacttcttcgtccagcacgcgaaccggggtttcatcgctgccgaccttgacggtatcggtgccatcccatttgaagactgagcgtgcggtggcgtagcgtacctgctggtactcggtccagcccatcgtgcgcgtccatgttgcaccatcaacaatttgtgctggtttaatcagcgggtcggcggcaaggttattcacttcaaccaggttgtcgccgccaagcaaagtcttcaccagacgaccatgttgtgtgacgagagtggcctgatcctgagtaacccatttttgttgcccatcctcggcaaaggccagcactacaaacaactgcggcccgccattaagctgcatatactggctggcgtagggcatattttgaatatcatcatccgtcagctgtacgcctggcgtaccgaacagactgtcccacagtgaattgcccagctctttagtcgtggctgaacaggcctgtaatagcaggcagataagaatgagtgcaggtcgcttcacgactcttctccagaggggcagaataaccacaccggagtgtggttatggtaaatcccttcatacttcaagccacagatgcgatgactcgaattattttggggatacatactttattactgggtactggtggtcgtggttgttgtggtcccggtattagaaccatcaccgccaccggttgccgcgagcgcgacacccaccgccgagcttacggtgctgacgctggtcgcggaggaactccccgccgaaaccgacgttgctgccgaccctgccgcttcgcccacctgtacaggtgcagcccacgcagaagtcgccgcaagcgcagatatggcaaaaatgccatacagaacttttttcataacaatttcccttcattgaatgaatggagatttacccaaaaacatttcgggcgggatcgagtatacacaactaaagcatgcgaattacggcgcggggaattagagatggggttttaggataattggaatgaatatcaaatataagctacaacttatatataaataacattaaaaatcataatgttaaaataaaagtaaaagtaattaatctgagtattttccgaaatcaatcacgattaaaaatctattttaggattaacctcacggtatgatttccgttaaatcacagacaaggggatttatctgataaaacaatgccgacataacgtcggcattgttattaaggtttttaaattaaccgcgccacgctttatagcggttaatcagaccattggtcgagctatcgtggctgctgatttctttatcatctttcagctctggcagaatacggtttgccagttgtttacccagctccacgccccactggtcgaaggtgaagatgttcaggatcacgccctgagtaaagattttgtgctcatacagcgcaatcaacgcacccaggctgaacggagtgatttcacgcagcaggatggagttggtcgggcggttaccttcgaacactttgaacggcaccacgtagtcaagcgttgccggatctttaccctgatcacgatattcctgctcaaccacttcgcgggatttaccaaacgccagcgcttcggtctgggcgaagaagttagacagcagtttctggtgatgatcagagagcgggttatgggtgatagccggagcgatgaaatcgcacggtaccattttggttccctggtggatcagctggtagaacgcgtgctgaccgttagtgcctggttcaccccagataatcgggccagtctggtaatccacaacgttaccgttacggtcaacatacttaccgttggactccatattgccctgctggaagtacgccgcgaaacggtgcatatactggtcatacggcagaatcgcctcagtttccgcaccaaagaaattgttgtaccagatgccaatcagcgccagcagtacaggcaggtttttctcggcaggcgtggtggagaaatgcttgtccatcgcgtgtgcgccagaaagcagttcaacgaagttatcaaagccgatggagagaacaatcgacaggccaatcgctgaccacaaagagtaacgaccgccgacccagtcccagaactcgaacatgtttgcagtatcaataccaaactcgccaacggctttggcattggttgagagcgccgcaaagtgtttcgcaacgtgtttttcatcacctgccgctttcaggaaccagtcacgcgcgctatgggcgttggtcatggtttcctgagtggtgaaggttttagatgctaccaggaacagcgtggtttccgggtttacttttttcagcacttcagcgatgtgagtcccatcgacgttagaaacaaagtgcatgttcaggtgatttttgtacggacgcagtgcttcggtcaccatgtacgggccgaggtcagaaccgccgatcccgatgttcactacgtcagtgattgctttgccggtataacccttccactcaccggagataatcgcttccgagaaggttttcatcttctccagcaccgcgttgacttccggcattacgtctttgccatcaaccaaaatcggggtattgctacggttacgcagcgctacgtgcagcacagcgcggttttcagtgcggttgatcttctcgccagagaacatcgacttaatcgcgcccgccagatcgcactctttcgccagatcttgtaatttcgccagagtctcttcagtgatgcggtttttggagtaatccaccagcatctgatcgccgaaggttgcggagaacttagaaaaacgatcgccgtctttagcaaaaagatcggcgatcgtaacgtctttcatttcatcgaagtgtttctgtagtgcctgccaggcagcggtctgcgttggattgatgtttttcattagcaatactcttctgattttgagaattgtgactttggaagattgtagcgccagtcacagaaaaatgtgatggttttagtgccgttagcgtaatgttgagtgtaaacccttagcgcagtgaagcatttattagctgaactactgaccgccaggagtggatgaaaaatccgcatgaccccgtcgttgacaaccgccccgctcaccctttatttataaatgtactacctgcgctagcgcaggccagaagaggcgcgttgcccaagtaacggtgttggaggagccagtcctgtgataacacctgagggggtgcatcgccgaggtgattgaacggctggccacgttcatcatcggctacaggggctgaatcccctgggttgtcaccagaagcgttcgcagtcgggcgtttcgcaagtggtggagcacttctgggtgaaaatagtagcgaagtatcgctctgcgcccacccgtcttccgctcttcccttgtgccaaggctgaaaatggatcccctgacacgaggtagttatgtctgaaattgttgtctccaaatttggcggtaccagcgtagctgattttgacgccatgaaccgcagcgctgatattgtgctttctgatgccaacgtgcgtttagtagtcctctcggcttctgctggtatcactaatctgctggtcgctttagcggaagggctggaacctggcgagcgattcgaaaaactcgacgctattcgcaacatccagtttgccattctggaacgtctgcgttacccgaacgttatccgtgaagagattgaacgtctgctggagaacattactgttctggcagaagcggcggcgctggcaacgtctccggcgctgacagatgagctggtcagccacggcgagctgatgtcgaccctgctgtttgtcgaaatcctgcgcgaacgcgatgttcaggcacagtggtttgatgtacgtaaagtgatgcgtaccaacgaccgatttggtcgtgcagagccagatgtagccgcgctggcggaactggccgcgctgcagctgctcccacgcctcaatgacggcttagtgatcacccagggatttatcggtagcgaaaataaaggtcgtacaacgacgcttggccgtggaggcagcgattatacggcagccttgctggcggaggctttacacgcatctcgtgttgatatctggaccgacgtcccgggcatctacaccaccgatccacgcgtagtttccgcagcaaaacgcattgatgaaatcgcgtttgccgaagcggcagagatggcaacttttggtgcaaaagtactgcatccggcaacgttgctacccgcagtacgcagcgatatcccggtctttgtcggctccagcaaagacccacgcgcaggtggtacgctggtgtgcaataaaactgaaaatccgccgctgttccgcgcgctggcgcttcgtcgcaatcagactctgctcactttgcacagcctgaatatgctgcattctcgcggcttcctcgcggaagttttcggcatcctcgcgcggcataatatttcggtagacttaatcaccacgtcagaagtgagcgtggcattaacccttgataccaccggttcaacctccactggcgatacgttgctgacgcaatctctgctgatggagctttccgcactgtgccgggtggaagtagaagaaggtctggcgctggtcgcgttgattggcaatgacctgtcaaaagcctgcggcgttggcaaagaggtattcggcgtactggaaccgttcaacattcgcatgatttgttacggcgcatccagccataacctgtgcttcctggtgcccggcgaagatgccgagcaggtggtgcagaagctgcattttaatttgtttgagtaatatttccctactggcgtataacgctcaccgattgttatacgccatcctcactgaaaacatagattaaataatatctgaaaagcaaaatcactcctgtagaacagtattataatcaccgaaaaatatcatttaacaggagtgttaatggctactttaatggaaaaagatgcacttttaaacggagccagtcagtgcatcgcgtttttatcaaatatcattgataattgctcagtttcgtcgcatcaggattcaggcgatgctctcaagcgattagtcagctatcgcgattatctttattctacccccgctgaacttgttgattttacacaaggtaagattctccttcagcaggtaagaactcaatatcagcatgaattcaacaatactacgcattcagaaaataaagcatcttttgattctatttggcagcgtctgacaaatcatgaagtcacaccgcaacagcatcccattggttttgttttaggtgggcaacccggagcaggtaaatcatctctgattgaattagccaaaagagagacaaaagataatataatgattattaacggtgatgattttcgatttctacaccctgattttaattatatctaccaaaattatggggatgattttgttacccatacagcgaaattttccggcgaaacggtcgaacgtgcaattgagagagcgatagtcagtaaactcaacattgttgtcgaaggaacatttcgtaatgccgcgacgccgttacaaacattaaaaaaactcaaagatgcaggctaccaaacagaagtcatgataaaaacaacctcagcggcattaagctgggaaagcaccaatgaacggtatagtaaggacaaagaggcgggaaatattgcccgaaaagtggataaaaaccaccatgatatcgtcaccggtttgctggcagaaaatgcccgcaaggtgtttgcttcgaacctgtcagataagtttgcggtgtattcgcgtgagaagatgatatttagttcacaagcggcaacgaatgacgatattgcaacacttatacagaatgaaatcagcgggaatacacaataataataagagctgatggcgtgaaataacgccgggctttatgcccggcgcattaccgtctggtacattaagctatccagttccttaacgtccccttctctgctatccggtaacagcggtggaatttccccacgcgccagttccgcacgaataaacgcatgtaacaatggacggcgcggaccatattccgcttctcctgcgcgctgtttacgttccagtaattcgtctatttctgcacgtaacggcgcatcaagttcgcttcccgccagtaactcagcaaagcgcattggcggtacgcctttacccgcttcgacccagcgcacggccagcagcggacgcagcacgtaaaagtattttttcagtcgaacttcgtcgccctgcaaatatccggggaagtttttctgcgccatcgaatagtaatgccagcgcgcacgcagcggagaaaaccacattgggaccattgccttaaacgccgttatcgtttcttcatcttgttgataaatcaccggagaatccagccattctatcagcgtcgggttcgcgcctttcaataatcccagcgccttacgccactcccaaccggaaacatctaactcgtcgtcgatgggcagctcaataacatcgcgcggtgactctactcgcagataccattccagcgggtgaacatacaaaaaccgtacatcgtagtcgctgtcgggcgaggcaaatccccagccgcggctccctgattcacaggcgtacagtactttcacatcataccgccgttcaatttcttttaactgctgcgataccctttcgcgcatcgcagcactgactccatttaatggcatgttactcaccctttgatattaaccaacccatgcagaacctgatccagaccgccaaatacagagatgttatcgatccgctcagccactctctccagcgtttctagctcttttaaacgcaacgctaccggattgttctccatgactttggcggtgttcagtaacgagcgcgtcgctgccgtttcttcacgtcggcgaatcacattcgcctgcgcagatttctctgcctcaaccagctgcgcgaggatatttttcatatcaccaggcaggacgatatctttcacccctaatgaggcaatctccataccaaatggcaacatgcgcgatttcacctgttcgctgacaacgtcatcaatgacctgtttatcttccagcagttcatccagcgtacgagtacctaccgcttcacgcagggcaaattgcaattcccgatacaaatgatcaatcggcttcgttaactgactaaatgccagcaacacgtcgctgtagcgccagttagcggcgaggttaatccgcagattgaccttatctttcgttaagatttcttgcccgctgacttccagtacctgcaagcgggtgtcaaccacttcagcgtcaaccagatggttaattttccagtatgcggtcagccccggcggtaacagcgcctgcgtttcaccatcgattttcagcacgcctacatgccaggccggaacctgcaccgttagtattgcatcgcggcctttaactgcccctttgcgccgtggttgcaataccgcattcatcacctccgtttgtacctggacttgctgcgtattcatccgcaccagtgtcaaatcatcctctacacgccagtacaaacggcgcgttgatggcggcaggatctcctgcaaaataccgtccatatacaacgccccggcttcaatctccgacaagtctgccaccaggcaatatttctccccccaatcaggctgaaagcggcgcaaataatccggcagcacgtcgggaacttcgctgccatcgagcgtaatcagcaagacttctggcgtatttaaccagggtaaaagatgctcgcctgcatgtagcactttgtagtaatcgccgtttctggagagtaatgccagctgatcttttcttacgcttatttttttaatcattatctattccttgcttaacagccgtcgcggaagcagacacgaagcgacaggggaattcccttttgcctgttacccggcatctttatcggcgacgttatcggggatcgctgactgcgcaatccctcactttttatttaataagttaaaaccagtattcatttcaggaatgaatgtgggaatcgaacccataattggcgtcaaaggctgacggaacacgcccggaaaacagcctggccgttcctggtgtgccgacggggtttgaccccctttgtaattcagtttcaacgcgtacgagatattgcgagaagcgtgccagaattgagaaaaaattattaaccaaatgaaaaataaagatttaataaattatttttgtttgtagagggaaaacttttcgctaaatttgtatctgtatttatcgtcaattatcaagaaagataaatatttaagaagagaacaaaggaatattatcagttcagctcgcaaacgaattcccgtacactgaactctctggctcactgagggcaccatcatggcactcccccgtattacccaaaaagagatgactgaacgcgagcagcgtgaacttaaaacactgctggatcgggcgcggattgcgcatggtcgcgtactgaccaactccgaaaccaacagcattaagaaagagtacatcgataaattaatggtcgagcgtgaggctgaagcgaaaaaagcccgccagttgaagaaaaagcaggcttataaaccggatcctgaagcgtcatttagctggtcagcaaatacgtcgacgcgcggcaggcgctgattagcgccccttctttttacgccccggagaggtaaaacgcttaccgttggacgccgggcgaccgcctttttccgccgttttttccatcttaacgactggacgtttgatgcccgctgttttcggtttggccttcactttaggttttgcctcggaagaggaattttcgatgagcttaaagaggtcgattaactcatcatcagttaaatcgcgccactcacccagcggaatgccgcttaaactgacgttcataatgcgcgtacgttccagctttttcacttcatagccgaaatgctcgcacatgcgccggatctgacggttcagcccctgcaccagggtaatgcggaagacaaacggcgcttcttttttgactttacactttttagtcactgtcccgaggatcggcacccccgcccccataccacgaataaattcatcggtaatcggtttatcgaccgtaaccagatactctttctcatgatcgttacccgcacggaggatcttattcaccagatcgccgtgattggtgaggaaaatcagcccctgggagtctttatccaggcggccaatcgggaacacgcgtttgctgtggttaacgaaatcgacaatgttatcgcgctcgccatcttcggtggtgctgacaataccgacgggcttgttcagggcgataagtaccaaatcttcggcttcccgaggctcaatcaactgaccgtttactttcacaacgtcgccgggtttcacctgatcgccaatggtggctcgcttgccattaaggaacacattgccttgctcgatatagcgatccgcttcgcggcgtgagcaaattccgctttcgctgatgtatttatttaaacggactgatgagtcgggcagcataaattctcctgtaaaaaacggaatataccgtacctttgggttgataaaaaatagtcatgagcgaactatttgttatttccattggcttgaattcgttacctgctcaaatcactttccagaagcaatgtgcgacatcgtgagccatgtcagtaagtggttaaattcgcagtggtagcatgcctcccgtgatttcttactaaccggagaagtaatggaactgcttttattgagtaactcgacgctgccgggtaaagcctggctggaacatgcactgccgctaattgctgaacagttgcagggtcgccgctcagcggtgtttatccctttcgctggcgtaacgcagacctgggatgattacacagcgaaaacggctgcggttctcgctccgctgggtgtttctgtcaccggtattcatagcgttgtcgatcccgttgccgcgattgaaaatgctgagatcgtgattgtcggcggcgggaatactttccagttgctgaaacagtgccgcgagcgcgggctgctggcaccaattactgacgtggttaaacgtggcgctctgtatattggctggagcgcaggcgctaaccttgcttgcccaaccattcgtaccaccaacgatatgccgattgtcgatccgcaaggtttcgatgcgctaaatctgttcccgttgcaaatcaacccgcacttcaccaacgcgctgccggaaggccataaaggtgaaacccgtgagcagcgtattcgcgaactgctggtcgtcgcgccagaactgacgattattggtctaccggaaggtaactggatcacagtgagtaaaggtcacgctacgctgggtggcccgaacaccacttatgtgtttaaggctggtgaagaagcggtgccgctagaagctggtcaccgtttttaagtgaattgccggatgcatgatccggcatcttgttcatagtgcctgatgcgacgcttgacgcgtcttatcaggcctacaggattcacaatattaatactcgtcccgtccttcatcttcatccggctgttccagcacactgtaagccaccgaacaaaacagcgagttcaggcgctgcatatctcccagtaagcctaaatgtagcgaactggtttcaatgctctgcacgttttgctgatgcaggcgatcgacgtgggcgtgggaatagcggcgattaagaatgcgaaagcgatgcttactacggcgcaaacgacgagcgctggtgacatcgccagagaagaacaccgacattgccagttttaaattactgagcaattgctcatagagcgcatccagttccttcaagccatcaagcgaaaatgcccgccgtgctgccagcgatttatcggcaatttcgctgcccatgcgctcgacgatatcggaagcctgttcaaggttgagcgacatttcaataatctccgcccagcgacgcgactcttcttctgccagttcctcttttggcatccgcgccagatacagcttaatggcggtatagagaacgttgatatcatctgccagcttacgcagctctttctcctgccgtggctcgccgtgcatcactttattcagcccttccatcatctgttccatggcgtcgccaatgcgcagggtttcgcgcgcggcgttcgccagagcaagcgtgggcgtatccagcgcgctgacatccagatgtttaggccgtagctgggtatccagttccggttcatcgcgaataatcgttttgcaaaaccgtgccatcgggtcaacaaatggcagcatgaccaggcaacgtacaaggttgtagaagacgtggaaatagatcaccagttccgcttttggcaatgacaacttccccattgtctctgccagcaaatggacaaacggcaggataatcaggctacccaccagcttaaacagcaaactacccagcgcgacacggcgggctgcggcattggcggcactgttgttgagcatcgccagcaggccggaaccgaggttagcaccaatcaccagacagagcgccacggggaaggagataatgcctgcggcggtcagagtcgcagtcagcagtacagcagcaaggctggagtagctgataatggcgaacatcgcgccaatcagcgcatccagcagaatatcgccggtcagcgaggcaaagatcacctgaacgccgtttgcctgggtgatcggcgttacggcctgcacaatcaactccagcgccagcaaaatcagcccaagaccaataccgacgcggcccagttgcccggcgcgtgactgtttgcgtccgaggaaaaaaatcacgccgataaaaataagtaacggtgacagccaggataagtcgaaggtgagaatacgcgccattagcgccgtcccgacatctgcacccagcacaatgaccagagccggtgcgagggctaccagatcctgagcgacaaacgaggtcaccagcatggtggtggcattactgctctgcaccagtgcggtaacgccgatccccgcgcaaaaggcgagcggctttttttcgacgctccggctaaggacagtacgcaaacgcgcgccgaagacgcgcattacgccggttcgaacaatatgagtcccccagaccagcagggcgacggcagaaagcaggtgaagcagcgttaacacgagttcaggttctccttatcgttatatgtgcctgaagcaattgaatgaccaaaggaccggaaacacgctgactggcatctttactgtgccttttgactttcgtttttccggctaagattattccagcctgtttccagtataagtgtttcatattaataaagagacagggcactcattgagcgccctgtttgttgtaaggaaaagtgacagatttgtgaatcagtccgcgtcataccccagattcggtgccagccagcgctcaacttcggtaacgctcatacctttacggcgggcataatcttcaacctgatcgcgctgaatttgtgctacagcgtagtacttgctgtccgggtggctgaagtaccaacccgaaaccgatgcaccgggccacatggcgaaagattctgtgagtttcatgccagtgtgtttttccacttccagcagctcccagatggtggctttttccgtatgttccgggcaggccggatagcccggtgccggacggatgccctggtagttttcgcggatcagttcttcgttgctgaggttctcgttcggcgcatagccccagtagactttacgcacacgctcatggagatactccgcaaaggcttccgccagacggtcggcaagcgctttcaccatgattttgttgtaatcatcgtgctgcgcttcaaaggcatcagccagtgcgtcctcttccagcccgccagtcacggcaaatgcgccgatgtaatctgctttaccagaaagcttcggcgcaacgaagtcagcgagacagtagttagcgaatcccgttttttcggtctgttgacgcagatggtggctgacgttgatcacatgggtgcgcgtttcgtcacggtagatttcaatgtcatcgcccacacggtttgccgggaacaggcccaccacgccacgcggattcagcgttttctcggcgcttaatttatccagcatgtcgttggcgtctttaaacagccgctgcgcctcaacgcccaccacttcatcttccagaatgcgcggatacttcccggccagcgaccaggtcataaagaacggtgtccagtcgatgtaattacgcagagtttcgatgctggcttcaacttcctgcacgccgagacggtgcgccaccggcggcgtgtaagcctgccagtcaaaagcgaaatcgttatcgcgcgccgcttccagcgtgaccggtggtgtgcgcggtttcttacgcccgtgctgaatacgtacggtttcgtactccttgcgggtacgagcgacaaaatcatcacgctgagtatcggaaagcagcgccgccaccacaccaacggtgcgcgatgcgttctgtacatacaccgtcgggccgctgtagttctgctcaattttcaccgccgtgtgcgcttttgaggtcgtcgcgccgccaatcaatagcgggatggtgaagccctgacgctccatctctttcgccacgttaaccatctcgtccagcgacggcgtgataagccccgaaagtccgatcagatcagcattcacttctttagcggtacggagaattttttccgcaggcaccataacgccgagatcgacaatttcgtagttgttacattgcagcaccacgccaacgatatttttaccgatgtcgtggacatcgcctttcacggtggcgatcaccatcttgccgttggttttaccctgctctttgctggcttcaataaacggttcgagatacgccactgcctgtttcatgacgcgcgccgatttgaccacctgtggcaggaacattttcccttcgccaaacagatcgccgaccacgttcataccgtccatcagcgggccttcaatcacttcaatcgggcgcgtagcctgctggcgggcttcttcggtatcctgctcgataaactcggtaatgcctttaaccagcgagtattccagacgtttattcacttcccacgagcgccactccgcctgctgggcgttagcggtgtcgtcggttttgctgccgcgatatttctcggcaagctccagtaaacgctcagtgccatcgtcgcgacggttaagaatcacatcttccaccgcgtcgcgcagttcagcgggcaggtcgtcgtaaatcgccagttgcccggcgttgacgatccccatatccatgccattgcgaatagcgtagtagaggaacaccgcgtgaatggcttcgcgcaccggatcgttgccacggaatgagaaagaaacgttagatacaccgccggaaatcagcgcgtgcggcagttcgcgtttgatatcttcacacgcgccgataaagtcctgcgcgtagttgttgtgctcttcaatgccggttgcgaccgcgaagatgttcgggtcgaagatgatatcttctggcgggaagccaacctcttcggtgaggattttgtacgcccgacggcaaatctcgattttccgtgcgcgggtatcggcctgtccctgttcgtcaaaggccattaccaccactgccgcaccgtaacgacgcaagagcttcgcgtgatggataaaggcgtcgacgccctctttcatcgagatagagttaacaatgcctttgccctggatacacttcagacctttttcaatgacatcccattttgaggagtcgatcataatcggcacgcgagcgatatccggttcaccggcaatcagattgagaaaacgcaccatcgccgcttcggcgtcgagcatcccttcatccatgttgatatcgataatctgcgcaccgttttccacctgctggcgggccacatccagtgcctcgctgtatttctcttctttgatcaggcgcttgaacttagcggaaccggtgacgttggtgcgttcacccacgttcacaaacaggctatcttcgccaatgttcagcggctccaggccggacaaacggcaggctacggggatttccggcagtttgcgcggcgctaatccttctactgcacgactcatcgctgcaatatgttgtggcgtggtgccacagcagccgccgacgatattgagaaaacccgcttgcgcccattcacgtatctgctttgccatcgtgtcggcgtcgagatcgtactcaccaaaggcgttgggtagcccggcgttcgggtgcgcggtgacgtagcattccgcaatccgtgacagctcctgcacgtactggcgcagttcatcgggccccagcgcacagttcaggccaaaggtcagagcttcggcgtggcgcaatgagttgtaaaatgcttcggtggtctgcccggagagcgtgcgcccggaggcgtcggtgatggtgccggagatcataatcggcagctcaacgcccagcgcttcaaactccgttttcaccgcaaaaaccgccgctttggcgttaagggtgtcgaaaacggtttcaatcaggatcagatccgcgccaccttccaccagcgctttggtggactctcgataagccgccaccagcccgtcaaaagtgatattacgaaatgccggatcatttacgtccggagaaatagacgccgtgcggttggtcgggccgagaacaccggcaacgtagcgcggtttctccggcgtgcgcgcggtccactcatcagcacaagctcgcgccagtttcgccgccgcaaagttgatttccgccgacagggattccatctggtaatccgccatcgcaatggtcgtggagttgaaggtgttggtttcgatgatatccgcgcccgcttcaaagtaggcgttgtggatagcggcgatcacttccggtttgctgagcaccagcaggtcgttgttgcctttgagatcgcatggccagtcggcaaagcgttcaccacgaaaatcggcttcgttcagtcgatagctctggatcatggtgcccataccgccgtccagcaccagaatacgttcatttaactgcgcacgcagttgttccactttgctgctcacacttgctcccgacacgctcaacccagatttaataaaaattcaacaaaccatactggcataaacgcatctgtggtaaaagcgaccaccacgcaacatgagatttgttcaacattaactcatcggatcagttcagcaactattgcattagctaataataaaaatgaaaatgatttccacgatacagaaaaaggagactgtcatggtcgcacccattcccgcgaaacgcggcagaaaacccgccgttgccaccgcaccagcgactggacaggttcagtctttaacgcgtggcctgaaattactggagtggattgccgaatccaatggcagtgtggcactcacagagctggcgcaacaagccgggttacccaactccacgacccaccgcctgctaaccacgatgcaacagcagggtttcgtgcgtcaggtcggcgaactgggacattgggcaatcggcgcacatgcctttatggtcggcagcagctttctccagagccgtaatttgttagcaattgttcaccctatcctgcgcaatctaatggaagagtctggcgaaacggtcaatatggcggtgcttgatcaaagcgatcacgaagcgattattatcgaccaggtacagtgtacccacctgatgcgaatgtccgcgcctatcggcggtaaattgccgatgcacgcttccggtgcgggtaaagcctttttagcccaactgagcgaagaacaggtgacgaagctgctgcaccgcaaagggttacatgcctatacccacgcaacgctggtgtctcctgtgcatttaaaagaagatctcgcccaaacgcgcaaacggggttattcatttgacgatgaggaacatgcgctggggctacgttgccttgcagcgtgtattttcgatgagcaccgcgaaccgtttgccgcaatttcaatttccggaccgatttcacgtattaccgatgaccgcgtgaccgagtttggcgcaatggtgattaaagcggcgaaggaagtgacgctagcgtacggtggaatgcgctgacttttttctggcgggcagaggcaatattctgcccgtcatacctgagtggcaatagaataagggtgtctgttaatcgcattgacgccaaaataacttattgtcatacacttcgcacacttttattaactcagaattatttttaaacatcaaaccacttaattattaacaaaatcgcaagatctcattccaccgaaacttttacggctgcattatgagattgagcgatttatgatatttctttacttgttatcatattaaattttttcactgttctgatagttaaaattcaagacatcaataaacaatgagatatttaaatgattactcgtattcctcgcagttctttctctgtaaatattaataatacagcccagacaaatgaacaccaaaacctgagtgaattgttttataaagaactcgaggataaattttctggcaaggagctggcgacacctctattaaaaagcttctcagagaactgtagacaaaatggtcgtcatatctttagcaacaaggattttgtcattaaattttccacgtccgtcttacaagctgataagaaagaaattacgataattaataaaaacgaaaacacgacacttactcaaaccattgccccaatatttgaagaatacctaatggaaattttacctcaacgctcagacactcttgataaacaagaattaaacctaaaatcagatagaaaagaaaaagaattcccaagaattaaacttaatggtcaatgttattttccggggcgaccccaaaaccgtatagtatgccgacacattgctgcacaatatattaatgatatttatcagaatgttgattacaaaccccatcaagatgattactcttcagctgaaaaatttctcacgcacttcaacaaaaaatgcaaaaaccagactttggcgttggtttccagccgtcctgaggggcgttgcgttgctgcctgcggtgatttcgggctagttatgaaagcatattttgacaagatggaatcaaatggcatcagtgttatggcagccatattactggtggataaccatgctttgacggtccggctaagaataaagaacacaactgaaggatgtacccattacgtggtttcggtttatgatcctaatgtaactaacgataaaataagaattatgagcgaaagcaaagaggatattaaacactattctctgatggattttatgaatgtagattatagcctcctgaaatggtcaaatgatcatgttattaaccaatctgttgcaataattccagcacttccgaaagaacagctattgatgttaaaaggatctgtggatgaaataacccctccattatcaccagcaacgatgaatttgctaatggcaattggtcagaatcaccaacttacgcaactgatgattcagctccagaaaatgccagaactacatagaacagaaatgttgactgcctataatagtggacatatgaacgttattaatactatttttaacgcattacccactctgtttaatacgtttaaattcgataaaaaaaatatgaagcccctcctcctggcaaataattctaatgaatatcccggtttgttttcagcgatacagcataaacaacaaaatgttgtagagacggtttatcttgctttatctgaccatgcacgcctgtttggatttaccgctgaagatattatggatttttggcaacacaaagcgccacaaaaatactctgcctttgagttggcttttgaatttggtcaccgggttattgctgaattaatccttaatacattaaataagatggctgaaagctttggctttacggataaccctcgatacattgcggagaaaaattatatggaagctttactcaaaaaagcatctccccataccgtacgctaaatctttgcctgcgccgatacgcataaacatcttccacatgcccttcacgtatgcggttttgtagtgcgcgccagtaatcagcgcggaacaggtcggcgtgcatctcttcaaacagcggaccaatacgcgggtcggcgcatagccagtggcgaaactcttccgggaaaacatcgcccggcgagacgctgtaccacggttcgctggcaagttcgtcttccggatagcgcggcggcgggatgtcgcggaaattcacttccgtcatgtagcaaatttcatcgtaatcataaaaaaccacacgcccgtgacgggtgacaccgaagtttttaaacagcatgtcgccaggaaaaatgttagcagcggcaagctggcgaatagcgttaccgtattcttcaatggcgtcgcgcaactgctgaccttccacttgttccagccagatattgagcggcaccatccgccgctcgatatagagatggcgaattacaatctgctcaccaagatcggtgattttttccgctgcttcctgaagcagtaattccattaatgccggggaaatatgccgcttctccagcacaaagttttcaaactcctgggtgtccgccattcggcccacacggtcgtgctctttcaccagttgatagcaggcacgaacgtgagcggcagacatctctttctgcggcgcgaacttgtctttgatgactttgaatacccgatcaaagcccggcagcgtaaacaccaacatcaccattccacgaatacccggcgcttcaatgaactgctcattacagccctgtagataaacgagatattcgcggtagctttcggttttggcgtgcttctggcagccgatagccatatacaattcagcagtggttttacctggcagaatttcccgtagccactcgaccagcgctgcgggcagcggtgcataaaccataaaataagaacgcgcaaagccaaaaacaatgctcgcttcggcggtcgtcgtcaggcaggtatcaataaataactcgccgtcgtccgtctggtggatcggcagtaagaagggcaacgtgccggaaggcgtgatcagtttgcccaccagccaggcggctttattgcggtaaaacagttcgttcgccacctgtaaatgactttccgcgaggttgtctgtccccagcgtttccgtcagatggcgaatgatgtaatgaatgtcacggcttttattctgccagcgcaggcgcagcggcaggtcgctgataacgcgcatcagtagagattcccagccgtgatcggggtgaaagtctttcgccagcgggcggggaatggtacgaaagcggcgctctggctgagagctaaagataaaaagccgctcgggagtaagcgagcggtggtcaaataaccgacagtacacggagttaaaaaagctctccgcaatctcgaagcgcgggtaatccggcaacagccgcgtgtaatgctctttaacgcgcagtaaaaatgccgcgtccgtactttggccgttagtaatgcagcgcagttgctccacgaccagaccaacgtgatgatcgtaaagatggatacggtttttcatcgcctgctggacagcatgccagtcggcctgttcgaaacgctgctgcgccccggaagtcacttcgaggaatcgaccatactgagcgtcgaagccttgcaaaatggtttgagcaatcagtaattccaggccacgcggcatttagcgccctcatcaggagcagagaattgccggatgcggcgtaaacgccttatccagcctacgttcggcaacggttgtaggcatgataagacgcgcaagcgtcgcatcaggcatcgtgcaccgattgccggatgcggcgtaaatgccttatccggcctacgttcggcaacggctgtaggcatgataagacgcgcaagcgtcgcatcaggcatcgtgcaccgattgccggatgcggcgtgaacgccttatccggcctacagtcagcaacggttgttgttgcttagaactgcgattcttcagtggagccggtcagcgcggtgactgaagacgtgccgccctgaataatagtcgtcactttatcgaagtaacctgtacccacttcctgctggtgagatacgaaggtatagccatctttcgcggcggcaaattccggctgctgcactttctcaacgtagtgcttcataccctcgccctgggcataggcgtttgccaggtcaaacatgttgaaccacatgctgtggatacctgccagggtgatgaactggaacttgtagcccatatccgacagctgctgctggaagctggcaatagttttgtcgtcgaggtttttctgccagttgaacgacggcgagcagttataagccagcagtttgcccggatatttcgcgtggatagcttgtgcaaagcgacgcgccagttccagatccggcgtggaggtttcacaccagaccaggtcagcatatggcgcatacgccaggccacggctgatcgcttgctcaatgcccgcatgagtacggaagaagccttcactggtacgctcgccggtaataaattcgctgtcatacgggtcgcaatcggaggtgatcagatccgctgcatcggcatcggtacgagcaaccagtagggttggaacgcccgtcacgtcagctgccagacgcgccgcgaccagtttctgaatagcttcttgagttggcaccaaaactttgccgcccatgtgaccgcatttcttcactgacgccagctgatcttcgaagtgaactgccgctgcaccggcttcaatcatcgctttcatcagttcaaaggcattcaggacaccgccaaaaccggcttccgcatcggcaacgatcggcaggaagtaatcgacatagcgcggatcgcccggctcaatgcccgcggaccattggatctgatcggcacgacggaaggtgttgttgatccgctccaccacagctggcaccgagtttgccggatagagcgactgatccggatacatgctggccgccaggttagcgtccgccgctacctgccatcccgacagatagactgcttcaatacccgctttcgcctgttgcagcgcctgaccgccagtcagtgcaccgaggctgttgatgtagccttttttcgactcgccatgcagcagacgccacattttcgccgcgcccagttgcgccagggtgcattcaggattgactgaaccgcgtaatttcaccacatcttccgcgctgtatgggcgagtaatgccttcccaacgcggttgagtccactctttctgtaattcttcaatttgttgtgtacgggttttcatgtgcagatgctccatagttatgtggtggtttacgctaacaggcggtagcctggcagggtcaggaaatcaattaactcatcggaagtggtgatctgttccatcaagcgtgcggcatcgtcaaaacgcccctgggagaaacgttcttcgcccagttcgctggcaatgactttcatctcttcacccagcatctggcggaacaaggctttggtcaccggtttgccattgctcaacgttttttgatgatggatccactgccagattgaggtacgggaaatttcagccgtcgccgcatcttccatcaggccataaatcggcacgcagccgttgccggagatccatgcttcgatgtactgcactgccacgcgaatgttggcgcgcataccttcttcggtgcgttcaccatcacaaggtgccagcagctgatcggcagtaatcggcgcgtcttgttcgcgcatcacttcaagctgatttttacgggagccgagaatgtcgttgaataccgccattgccgtatccgcaaggcctgggtgagcaatccatgtgccatcgtgaccgttattggcttccaacgctttatccgcttttactttgttgagcacctggttattgcgctcttcatctttgctcggaataaacgctgccatgccgcccatcgcaaaagcaccgcgtttatggcaggttttaatcaacaggcgtgagtaagcattcaggaatggtttatccatcgtcactgcctgtctgtctggcaggacgcgatcgggatagtttttcaacgttttgatatagctgaagatgtaatcccaacgaccgcagttcagaccaacaatatggtcacgcagcgcgtgaaggatttcatccatctggaacacggcgggcagcgtttcaatcagcaacgtcgccttgatggtgccgcgcggcagattaaagcgatcttctgcatagctgaagacttcgctccaccaggccgcttcctgccaggactgggttttcggcagatagaaatagggaccgctgccctttgccaacagtgcctgatagttgtggaagaaatagagcgcaaaatcaaacaggctaccggggattgcctcaccacgccaggtgacatgtttttccggcaagtgcagaccgcgtacccgacaaatcaaaaccgctggattgggcttgagctgataaattttgcctgcttcattggtatagctgatggtgccgttaaccgcatcgcgcaggttaatttgcccgtcgatcactttgttccagtctggtgccagtgaatcttcgaaatcggccataaagactttcacattggcgttcagtgcgttgatcaccatcttgcgctcaaccgggccagttatctcgactcgacgatcttgtaagtccgcgggaataccacgaattttccagtccgtatcgcgaatggaagctgtttccgaaataaaatcaggcaaagttccgttatcaatatcttgctgctgctgaatgcgcgctgccagaagtttattgcgttgtggcgtaaaatgcgtcaccagctcagtcagaaattctaccgcttcggcagtaagaatttgcttctcctgctcgccatacggccttatgaaagccagttcatcggttgttgttgcctgttcagtcatcgtgcagctcctcgtcatggatccgaaaacttccccactgtgaacgaaggatcgttgtgcgcttttcgttcagcacaactaagactactcatttaaaatgcaaaatcaaaaacaatttccattttaattaaaaatacttgataacttattgataacaatatgaataaaatttattcacctcctgaggtgcgtttcggaaataaaaaaggcacccgaaggtgcctgaggtaaggtgctgaatcgcttaacgatcgactatcacagaagattaatccagcgttggattcatgtgccgtagatcgtatggcgtgatctgatagacgtaatagttgagccagttggtaaacagcaaattaccgtgactacgccagctcgctcgcggtgtattttgcggatcattgtgcgggaaatagttatacggtacttccgggcctagtccggcttccacatcgcggaaatattcctgcgccagcgtttgcgcatcatattcgggatggcccgtcacaaaggcaatgcgcttatctttgctggcaaacagatatgcatccccttcttccgtctctgccagaatttccagatcggtgtaatcacgaatcaacgctgccggaaagtcagcatagcgcgaatgtggtgccaggaatgaatcatcaaagccacgcgtcagaagcgcatgaggatggagaatatgatgctcgtaaacgccagagagtttgtcggtgcgagtttgcttaggaatgccgtagaggatattgagcgcggcctgtaccgcccagcagacaaacagcgtcgaggtgacgtgatctttcgaccactccagcacctgtttgatctgcggccagtaagcgacatcattaaactccaccaggcccagcggcgcaccggttacaatcagaccgtcaaagttctgttcctgaatatcttcaaagttacagtagaagttgttcagatgctctgcgggcgtgttgcgcgattcacgggaatcgatgcgcaacagctgaatatcgacctgcaaaggtgagtttgaaagcaggcgcagaaactgattttcagtttcaatcttcttcggcatcaggttaaggatcagaaccttaagtggacgaatttcctgaccagacgcacgagaagttgtcatcacaaagacgttttcttcacgcaagaaattgacggcgggtagctcgtccggcacacgaataggcataacctgattacctcactacatacgcttatacgtttagacatccagatagctgaagataaccagaaaatttgccaatgtcgagcctgcatgttgaaggtgagaaagtttcaaggaaaaggctacgttagaatataagaatgacgaaaaggagagaaaatggttattagtattcgccgctcacagcatgaggaaggggaggaactcgttgcgatttggtgtcgatctgtcgatgccacccacgattttttatcagcagagtatcgggccgagctggaagagctggttcgttcctttctgccggaagcaccgttgtgggtcgcggttaatgaacgggatcagccggttgggtttatgttgttaagtgggcagcatatggatgcgctgtttatcgatcctgatgtgcgcggctgcggcgtgggtcggatgctggtggagcatgcgctctcgatggcaccggaactgacaaccaacgttaatgagcaaaatgagcaggcggttgggttctataagaaggtgggttttaaggttacgggacgctctgaggtggacgatttggggaaaccgtatccgttgctgaatctggcgtatgtgggggaataagccgcccctgccgtgcctgcccaggctggagaagacgcgccagcgtcgcatccgacctttttctgcaccagcgcaaaaaggcccagtcttccgactgggccttctgcttaatttgatgcctggcagttccctactctcgcatggggagaccccacactaccatcggcgctacggcgtttcacttctgagttcggcatggggtcaggtgggaccaccgcgctacggccgccaggcaaattctgttttattaacccgcttatgcgttctaatctaatctgtatcaggctgaaaatcttctctcatccgccaaaacaccttcggcgttgtaaggttaagcctcacggttcattagtaccggttagctcaacgcatcgctgcgcttacacacccggcctatcaacgtcgtcgtcttcaacgttccttcaggacccttaaagggtca

SEQ ID NO: 51 - DNA, 49177 bp, Escherichia coli
  source 1..49177: mol_type = genomic DNA
acaggaatgcagtcgctgtattttgcgtttctgcttctgccagttgttgctgaatttgaccttgcggcttaactgtcgctgaagtctcgccagcgtcttctggtttttctgaaaactgtttacaggctcaaagactgtgccatctgacagcgtggcgagtttagccacgccagcatccagcccgaccattgatgctgaagggtgaaccggagtggatacttcactttctgtctgaatactgatgtaccacttaccgcaggactggctgacagtgacatttttcacaacacccgtgacctgacggctgttccggtagcgcatccagcccagtttcggcagaaaaatacggctgttttcctgatcgagcttaacgccctgcgggtagcggaatacatcattctgtccccgctttttgaatcggggaaaagcagcccgattctggaagaagtttttgtaagcccgctcaaggtctttcagtgactgttgcaatggctgtgacggggcatctttaagccattgcgtttcagtggcatttttccactcaaccagccagaaagccattttcccgtaagggatgtatttattaccgacctcatgattctcattctgacgtgccagagcacgattgaaaacgaaacgacatgcgcctgcgaagcgcctcatttcacgctcctgttgaccaccgggtcttaactggaatttaaatgcctgtaatcgtttcacaggccaaatgatactttggtctgtgaaaaaagaaaccgatatccggcgtggaaggcattgtgttttcctgatgcatgttcacctggtctttgtcaccaaataccgacgtcagatttttgaccatgacgcgacagaaaaactacgcacttacttttcaaatgtatgtgctgattttgaagctgaactggttgaaatggatggcgaaccagatcacgtccatttgttaattaactatcctcccaaactggcgatatccagtctggtaaacagcctcaaaggcgtatcgggtaggtgactgcgacgagatcgaccagatattgcagtcaggtattactacaaaggcgttttgtggagtcctggctattttgccagtagctgcggaggtgcgccaatatccgtcatccgccaatacattgaacaacagcaaacacctggtcaggtggaaaaccgcgccttatatccccgccctgaaggatggggttttacggcgcaccggataaaaagcgccatctaacgatggcgcgtctggaactactttttgttaacgtcaaacatggtggcatcggtcgccatgtcatcaataacttgtttaatattttcgaaagccattggcgtactttcgttattcaggtctttaccttcgccctgacgaacgactttgataaccggtttattagtcgctgcatcaatcagctcaccttcaaaatagaggcgagtatccatggtacggtggcctgtagccatttgcgtccccgcaaccactaatgcaacaggaaccacttcatagaattgcagcccttctttgctggtatctacaccggtaatggccccacggaaaatcagactacgcggcccagcggtggtaaccactggtttacgctgcgctatcgcttctttcatttcggtgttggtatagttcaaaattttatccagaactttctgccctacctgggtagaaggttttggcaccggataataagtgattgggttccagacgatgctgtcatatttgctttgatcaaaactcgggtctacccaacgtaaaacaggtttacctgttgctgaggttgtttcttttaaatcagagtaattgtttaaaaaaccagaatatttatctggctgggtgattttagaggcacaaccagacagagccaacaagccgcataaagctgcaactttcgcaaatgatgtggtacgcatgaatagtttcctgagatgattatattactttttaagttatagcaaaaagcgccgcttcgtgttgtggcaaaaaaagtgttggtgaaaataaatttttcagccccttttcagacgacatagtcaatgccgaaaaaggggctaagtcaatcatcagtagttaaatttcagtaagttaagctgctaaaaaacttcgactactgtgattaatttcacatcccttcgataaaaaatatgcttaccgaaaagaagaacagtaaatcatctcagcgtggggaattttcacgcgccttattcttagcgggtcattttttacgtgccagcatcgtggcgaaacgcagtttaatacgattaccgttggcgtcggtgcggtgcagctcgccgacgtcttcattgtatttcaccctctcccagccttcgtaatatcgacgtaattctccctctttgaaggcaaacgggaagccgacggtacatggataatcagcggtatccatcgccgccacaatcaggttgtaaccaccaggtttagtgcaacgttgcatattggcaatcaacccggggatggttttagcctcaaggaacatcagcaccacagtcgaaagaataaaatcgtactgtccatcaaatgtgaggttattcagatcaacgacccgggtgtgtaaattatccagattttcaatggatttaatgcgctcgacgttggcgatactcatggcatttttatcccatgcgtcaacatcataaccattggctgccaggtaaagactgttacgaccattgccacagcccagatccagcgttttacccggtttaaccactttcaccgcttccagtacttcagagtgtgtgcgggttaattcatatttatcagtaaaatagttttcgtcacgaatgatcattctttgtcctctgctttcattaaaacggcgcgctcggttctgactaacaattttccctgcatcagaagcgcgaaagtacggatgagcagtattgcaataataaaattggtaaagataaacagcggcaccgccagcgtatggaaaaatccattatcgctgccactccccagatgcaaaccggtggttgccagtgcagatacgccgaacgagaaactccagaatgaagcattaaatggctgggagagataccatggcatcagacgtagcataaacagcagttgcagcagtccataaccaaaaagcattttcgccagcgtatcaccctcgccgccgttgacgctcaaccaggcactacaggccaccagcgcaggagcgagctgaatgccgagtgatgtccgcagtgccgtgggtaattctcccgaactgcgcagacgctgcaagatcacaggttcaaggcttagccatgagaaaacgcctgcgcctaaaaacaccagaccggcgtcggtgtagcccaacgcaccacaggccattgcgctgataaagttgttggcaactgtcggcagatacagtccaggcgtggtagcttcttcagggtgagatccgcgccataatcccgcagtttgccaggcggcataagccaactgaaccacgacaccaaaactgaacaggcacaccgccagtgggcgaaaccacggaacaaaaccaatcgccaccagcatcgtcgttgccggaaacaaactcacaaaactgctcagcactggatggcgcacttctgccagcacgctatgcggaaagcgtataagtcgggtaataaatgcgctagttaacaatccccagatgatcatcgccagaatcaccagcccatcccctaaccagtggctgacctgccaaacctggctggcatagcgccaggcaaatcccatccctatcgtccccaacacaataccaaagtagcctgccggcaaattgagcactttatcgctctgcatcttcttactcattttgtttaatttataaagtatatttgaaatgcattttatggaattttctcgagcatagccagagccgcagaatttgctacggttatagtaagtcacctgtgggaaaacgctatgcgcaaatatcgtctaagtgaagaacagcgagcctttagttatcaggaagatggcactaaaaaaaatgtgttattacggcagattatcgccattagcgattttaacgatgtgatagcaggaaccgctggcggctggatcgatcgcgaaacggtgttagcacaggaaggaaattgctggatttacgaccagaacgctattgcgttcggcggagcggtgatttccggtaatacgcgcatcaccggcaccagcgtgctgtggggagaggtttacgcaacggataatgtctggatcgataatagtgaaatcagccagggtgcatatataagtgacagcgtcaccattcatgactcactggtttgcgggcaatgtagaatatttggtcacgccttaattaatcaacattctatgatcgtcgccgcacaaggcttaacgcccgaccatcaactcctgctccaaatttatgatcgcgcaagggttagcgcctcgcgtattgtccaccaggcacaaatttatggcgatgccgtcatccggtatgcttttattgaacatcgtgccgaagtttttgattttgccagtattgaaggtaatgaagagaacaacgtctggctatgcgattgcgctaaagtctacggtcacgcgcaggtgaaagctggcatagaagaagatgccattccaacgattcattacagttcgcaggtggcggaatatgccattgtggaaggtaattgtgtgttaaaacatcatgtcttgattggcggaaatgccgtggtacgtggtggaccgattctgctcgacgagcacgttgtaatacaaggtgagagccgtattacaggtgcggtgataattgaaaaccatgtggagttaaccgaccacgccgtcgttgaagcctttgatggcgacacggttcatgtccgtggtccaaaagtcattaacggcgaggagcgcattacgcgaacgccgctggcagggttattatgaatcgataatacgcgcgtataagttcacatcatcataggcatcattcaggaactcagcctgtttcaggcaaccttcaaggataaaaccattgcgcaaagcgacctggttgctttgcggattgtccacccgacatttgatcacgaagcgtctaagttcaccagactgggcgtaatgatgaatcaatgcctgcagcgcctgagaaatgatcccctgcccctgatgagattcgtccagccagtagcctatttcagcggttttattcagtggttcaatacgattaaacgagataacgccgataagttcatcttctttgaaaatcatgaacattttggcatagccgcgttgatgcaacatcacattaccctgcaccgtttttcgcgtgtcctcttcactctgaacgaactgcggccagtttagcgactgctgtaaccaggttttatttttacagattaactgataaagaggagtgacgtgattttctgcaacagcatgtaattcaagtgattcgcttacttttatcgtttcagtcatcttatctccagtcaatccatgcagttgttaaaaaagccgcctggctggcggcttaggaaagtttatacctctttgacgctctcctgctgcaggattttgagcatctcatcttttaactgtagcttttgttttttcatgcggaccacttccgcattgtaccctcgaccgtcggaaccttcctttctggcaatttcatgatcaagtttattgtgtttatcgaacaaggacataaagcgaggattttcgtttttcagacgggatattaaatctcgatattctggaaacatacgcactccctgttagtggctgacaaggtgtatctgaaatacacaccatcagattactcatttaacttagggaaaaatgcgagcgggatcgtgtttaaccagacggcacctcccgaagaaggtgccgaagaaaaaacgattaactcatcacgcggtcgtcaacatactgacgtttatccggcgctggcgggaaatactgatacagccatgtttcactgatagcgtcgccctgacaacgcagatacatccgcatatcgaccggatcagtggagtccgaagtcggataccagtcaaactgaatacgataaccatcaatgggttcaatatagagaatttcgatttgcttcgcttccccactggaaagcgtaatcaccggctcaatgccttttggtgcggcagctttcagatcaccaccaacgaaatcgacggcaaaacgacgcgcccatttttcgggatagtgttcacctggtgcccaaccttccgggaaaccgcccatgccggtacgcgtcgccataacgcgcgctaatgggcaatgaacaggcggttgcgcactccagtacagacgatactggaatgcaaactcatcacccgcctttacagctttttctggctgccagaagcagacaatgttatccagcgtttcgcccgttgttgggatttccatcaggccgatggtgcccttaccccacttgttacgcggttccacccacagacttgggcgtttgttataccagcccataatgtcctgataatgggagaaatcacgatccagttgcaataaaccaaaccctttcgggttgttgtcggtgtaagcattgaactgcaatttttgcggattattcagcggacggcaaatccactcgccgttgccccgccacatggacagacgatcagagtcatgaatttgcggatgaatggtgtcgcacatccgacgttcattagtaccgcagctgaacatactggtcatcggcgcaatgcccagctgtttaatgtctttgcgcgcatacaggtgattttccacatccataatcacctgacttttctcacaatggatagtgaacttataggcaccagtaatgctggcgctatcgagcaacgcataaacggtaaaggtagttgcccccggttttaccgtatcaaaccagaaggcggtaaagtcggggaactcttctttactgtcggtgtaagtgtcaatcgccaggccgcgggccgacaaaccgtattgatatgtgtcatcaacggcgcggaaataactcgctccgaggaatgatactacatcacggcgcgccagttcgggggctttaaacacgcgaaaaccggcaaagccgagatcgctttgcccttctaattgtttggtatcaacacctgcatcgttgtatttgaacaactccgggcgaaagtgaatttcacgcgccagatgtgttgctggatctacagaaaacatacgaacgcggcgacggaatcccattcccatatggaagaactgagcgtccagttgacggttctcaacgttatgccagagcgatttttcggcgtcgtattgaatactgttataagcctgcggcgtcattgtcgccagcgtgtcaggtaacggacgaggcgcaccacgccacgctgtttgcgctaagtcgtgcgccattgactgtagaatggagaagtcaaaacgctgggtttgcccgtcggcaatatcagaatctgccgcgaatgccgcctgagaaaaaagagaagcaatgccgctggtaccgcacacggcggccatagccattgaacctttaataaatcgtctacgatccatacctgaaagtgagtccttctggtgttgtgaatggtcccgcgctggtcgttttcagcggcaagaaagtgcttatttatgaccgctcactctagacaatatttattaataatccaattgttgaactcagagaatatgcataaatcggcaatttttttatgtcgatgggatgagcctgattcgtttgtaaaatcaggcaaatttttgcaaaggcggatggtcagaatttaaagcaaaccacagcgacgtttactgcgttcttccgcttcctgataaagctggaactcatccaaaaccggacaacccaacgcctgctcaaatgcctcgcgactggcattaccgtgattgcgtgcctgcgtttcattacccagatttgactggaagatccccgccgcgctaacgggcaagaaatcttcataggtaatgggttgcgccgcgacccaaccacgttcaattaagggctgtggatcgtctccgggatgaatcgcctgacgatgcgcctcacctgaaggcgtcagacggtaccggaaccatgccagcccttgctgacgcattaaaaactcactgtcaggaaaagtgcggaaggtttcctgtaaatgcatttggtgagtgagattatcctgcccggttccagcgttacgcagaagatcatcatacagttgtcgccctttcggcgttaatgccacgccacgctgctcaatttcaccaaagcgcgcggtatgcgtgccctgtttctgccccgcaaacaacaccgtctcttccagtgctttaaagctggtctggcgtagtaaaatcggtacctcgcggcgcggcggcccctcgatgagaattttgggttcaattccgcattcaggcatcatcgactgcacccggtcaatatccagcgtacgtggcgtcaggtggttgatatggcatccaggaaaacagaccacatcagcaatcaaccgatgttcgttgtgcaaggcgcgataggtttcttcatctaccgttgctgactggtgccagcgaaacgtttccagggcttcctgcacaaactcctgtgcctgtgtttcgttaaaaccgccctgctgctcatattcctctaacagttgtcgacaacgtggggtgaagatatcgcgctgacgcagaatctccgccgctttctggcgcaaaatttcgttctcgataagctcaaggcggagtaaggaggtaaaaacgcggaagggattacgcgccagagaagcatcatcaatgggccgaaatgctgtcgaatgtaccggcacccctgcctgcgagagatcgtaatagctcaccgggtacatccccataatggcaaacatccgccgaagagtagcaagctcttgtgcagtcccaacgcgaatcgccccatgacgttcaacattcagacgcgccagctcgtctgcatttaccattttttcgtgcagttgaggattgttttccagcacagccagattcacatcagctaccagttccagcagcgtgccatattgcggaacttcttgctggtacatggctgacattgcctgcgaaaactgttcccgaatctcatccgccgtgatgctgttcgccatagtgtctgcctccagtggtcagtaatctggagtgtaggtaaccgcattcactcttgcgggaagaatttacaaactgtgatctcgccgcgaaaacatcaatattatccattttgctgtaacacaattgctttaattgttaataatattttgcaatcaagttatcataatcaaacaacttcacttgtcagcgacaccgcttcgtttttaacatcgcttatggaaaaaaatagtctgtttagtcagcgcatccgtttgcgccaccttcatacattcgtagctgtcgcacaacaaggaactttggggcgcgcggctgaaacccttaatttgagtcaacctgcgctctctaagacattgaatgaactggagcagctgactggcgctcgcttgtttgagcgtggtcgtcagggggcgcaacttaccttacccggcgaacaatttttaacgcatgcagtcagagttcttgacgccatcaacactgccggacagtcgcttcatcgtaaagaaggtcttaataatgatgtcgtcagggttggtgcactacctactgcggcactggggatattaccttcggttataggtcagtttcatcagcaacaaaaagagacgaccttgcaagttgcgacaatgagtaaccctatgattctggcgggtttaaaaaccggggaaatcgatatcggcattggtcggatgtcagatcctgaactgatgaccgggcttaattacgaactgctgtttcttgaatcgttgaagctggttgtccgccctaatcacccgctacttcaggagaacgtaacgctaagccgggtgctggaatggccggtcgttgtatcaccagaaggcactgcgccacgccagcattcagatgcattagtgcagagccagggctgtaaaattccttcgggttgtatcgaaacgctgtctgcttcgctatctcgtcaacttacggttgaatacgattacgtgtggtttgtcccttctggcgctgtaaaagacgacctgcgtcatgccacgctggtggccctgcctgttccgggacatggtgcaggcgaaccgattggaatactgacccgcgtagatgcgacgttctcttctggttgccagttgatgattaacgctattcgaaaatcaatgccgttctgaaaggtgaagggatctgtcgatccctccttgaacattttcacaccgtagcgaaactaactggttcacccgctccgcgaggttctgccgacacagaatgtttgtgcagacggaatacatccaccgcctcagttaatcgtgccgcctgttcttcaagggacaccgccgccgctgaggcctcttctaccagagaagcattctgttgcgtcaccttatccatttcagaaatcgcctggctaacctgcgttatgcctctactttgttcatccgaggcggcggcgatttcctgcatgatatgtgtgacactcgcgacggcatcaacaatagtgctcatggttttccctgccgttgccacctcatccgaccccaggtcaattaacctgactgattcactgatcaagccttcaatctctttcgccgcttgggcgctgcggcttgcgagtgtccgtacttcgctggcgacaacggcaaatccacggccttgctcacccgctcgcgcggcttcaacggcagcattcagtgccagaatattcgtctggaaagcaatactgttgatgacggcggtgatctcggaaattttcttcgaacttgtagagatagcgcccatcgtttttactacaccggaaaccgtctgcccgccatcgctggctttaatagaagcctcttgcgccagtttgctggcatgatgcgcgttatccgcattctgtttcaccgtcgcagtgagttgctccatgctagcggcagtttgttcgatagccgccgcttgttcttcggtgcgagatgacaggtccgcattgccagctgaaatttcgctggtgccacgataaatctcttccgcaccctgtcgaacagtccctactgtcatccccagtgaatgctgcatttgctgtaaatgacgacttaagcgaccgatttcattacgacccgccggttcatcattcatcgtcagatcgccactggcgattttttcaatccgttgtgcggcatgttgcagtggacgaatgacgatccgacgtagcaccataaatgttatcagcgtcatgaccagggcaagcacaaacgcgccaatcatgaacatcccacccaggcgggtgcgctgatgggccagttccgccagttggttggctctggtgctacgtatcttaacggctttgttcaaaatatcggtataagcattatccagcggtcggatctgctcactttcatgattgataatcgcttcaaacatgccatttttggcatatttcaacataggttgcatacccgtgatataagcctgaaagcgttgatttaattcagtgtcgagggcttcatcagcaggtgttttcaccggccgattctgataagcacgataaccttgctgcgactgtttaatctccgattcggcttgcgcaatattgcgcttcattgcttccatttccgcaatacgactcgcagccccggcctgaatcatattgatccgggctgaacgcaaaaaatctgaactgttcgctaacccggtccgaatctcaatctccgcagtaacatcacgctgatcgcgatcggcctgccagaggaaatagccagccagagcagaacttaatgcgaatagaactaagataccgccaagaatgcaggcaaataacggaaccagcctgatgtgatgcaaaaaacctaatcgatgtgagggagttgtattcattaccgttgtctctcgtccaggtttactcctgatagaaagtcatcggcacttgacggtaattacttatgaccaaaaacctctttgcgtcacatttttacaacaattattgcagagaaaattaatgctattggaatgaagagagtaacgaatggctaaactggctaacccgaatgacgaaaaattctggaaaacagcacgcaatttcgtgaagtgattattttcgtccctaaggaaacctcataggatgcctgcgggtgcctgagactttctgttttcaggctaaccgggaatcagaaagacgaaggccccgaccgatatttctatcaaccgaggccaacgaatgaacctagcaattcagatcttagcctcttacccgccatccggcaaggagaaaggctatgaagcacaaccctctggtggtgtgtctgctcattatctgcattacgattctgacattcacactcctgacccgacaaacgctctacgaactgcggttccgggacggtgataaggaggttgctgcgctcatggcctgcacgtccaggtaagggcaagcgcggggattttccccgcgcatctgactagcagattcattttctcatggcaccccttttacacttcagttagtgcatgtttttttcgaggcactaatagaaccatcattacagacaaatttgccgcctgccgtacagtgtgagatcccccctttcgaaccagaacagggtttgcgcccggcatcggcataaaaggaaacaagcgttcccataaacaaaataagtgccagttttttcatataacctccatggtttatcgaatcttatgttcgatttgaacgttatacgctggtttattttgataccgttgatgagatcaaagatcgggtgaattgattaaaaataagccagatggacgtatgggcaaggattatggttttatttgtcatacaaataaatataataggcgcttccgatgtagacccgtattcttcgcctgtaccacgggtcggttttagtacaggcgttttctttaaatatccttcaggaacgtttacgcggcatcatgcgtagaagtgtgttgtccttccagaaatagtggtgtgccagtgcagccgcagcgtgcaacccgatgacaaaatatcccagattcgccagcgtctcatgccacgactttaagctatcaacccgttcgaaattggcctctgaagcgtaaggcatcgtcaaaccaaacgcaaaccacgggttgccccggttatacatcatcaccaaaccaatcactggcagcgcaataaacaggagataaatcaccaaatgtcccaaatgcgccagtcccgtcatcatcggttttggcttaggtataatcggcggggttgggtatttcagtcttaacaaaagacgaaccaccatcagcacgagaattgagataccacaggaaacatgaaccatgttgatgagtggccgatcgctacgtgggaagaaaccacgaaactccattgcgcaatacgctgcgataaccagcaaaaagaccagccagtgaatgctgatttgtaaccttgagtatttattttccataacatttcctgctttaacataattttccgttaacataacgggcttttctcaaaatttcattaaatattgttcacccgttttcagtacgttacgtttcactgtaagaatggagattgcccatcccacaatcctgggctaagcctggaaaggatcaattttcatccgaacgttcctgacaggagaaaaccatgagtaaagttggtattaacggttttggtcgtatcggtcgactggtgttgcgtcgattacttgaagtcaaaagcaacatagacgttgtcgctattaatgatctcacttccccaaaaattctcgcctatctgctgaaacatgattcaaactatggtccgttcccctggagcgttgattttacggaagattcacttatcgttgatgggaaaagtatctcggtttacgccgaaaaagaggctaaaaatattccgtggaaagcgaaaggggcagaaatcattgtcgaatgtactggcttttatacctccgccgagaaatcgcaggcgcatcttgatgctggtgcgaagaaggtgttgatttccgcccctgccggtgaaatgaaaactatcgtttataacgtcaatgacgacactctggatggcaacgacaccattgtttccgtggcgtcatgcaccactaactgtcttgcgccgatggccaaagccttgcatgacagtttcgggatagaagtcggcacgatgacgaccattcatgcctatactggcacccagtcactggtggatggcccacgtggtaaagatttacgtgcttcacgcgcagcggcagaaaatatcattccccacactacgggggcggcaaaagccattggtctggtgatcccggaactgagcggcaaactgaaaggtcatgcgcaacgcgtgccggtgaaaacaggttcggtcactgaactggtatcgattctcggaaaaaaagtgactgccgaagaggtgaataacgcacttaaacaagcaaccaccaataacgagtcatttggttataccgatgaagaaatagtctcttccgatatcattggcagccatttcggttcggtgtttgatgccacgcaaacggaaattaccgccgtgggcgatttacaactggtgaaaacggtcgcctggtacgataacgaatatggcttcgtcacgcagcttattcgcaccctcgaaaaattcgctaaactctgacgcgcacaggcggaggaaaaaacctccgcctcttttactcattacgactgtaaataaaccacctgggtctgcagatattcatgcaggccatgtttaccatctgcgccgccaataccggatttacgccatccggcgtggaagccttgcatagcttcgaagttttcacggttgatgtaagtttcaccaaacttcagccctttaatggctttcatcgcgacgttcagattttgggtatagattgatgaggtcaggccgtaatcactgtcattagccattgagatagcctcttccagcgtgtcaaatgcgaccaccggcagaaccgggccaaaggtttcctcatgcataatcgacatttcctggcgaacatccagcagcaatgtcggcggataataatatcctttcccctctaccgctttgccacccaacgccactctcgccccttcttctactgcgcgcgccactttttgctcaaccctttccagcgccgcggcgttaatcaacggccccatcgcaatgtcgttgcgttcagcggggttaccaaattgaaccgcctgcatcgcttcacccagccgattgacgaactgatcataaatgcctttctgtacataaacacgttctgcacagttacacacttgcccactattaatgacgcgtgaatcaacgatggctttgactgccagttcaagatcggcatcgtccattacgatagctggtgctttaccccccaattccagacacactttggtgatgtttttcgccgcagtcgccatgatcttctcacctgcagagacgctgcctgtcatactgaccattgcgacctttgggttacccgccagttcttgcccaacggtttcaccacgccccagtacaaggttaaacacgccgcgcggaagtcctatttcatcgacgattttggcgaatgcaatcgcattgtttggcgtaaattcactaggtttaatgacgatggtattaccggtcaaaagagcgggagccattttgcgggcaatgaggaagaacgggaagttccacggcagaatgccggtagtcacaccaagcgcacgtttaaacaaaagaatattttctcctggacgatcgctttgaataatctcgccctcgtaacgccgtgcccactccgccatgtaatcgatatagtcggcagtaaaagccacttcgacttcagccagctgctggatcttgcccccttcttcaacaatcagcgcactgatttcactggcgcgttcgcggatcccggcggagattttgcgcaaccaactggcgcgttcaatagcaggcaacgcttcccattctggttgtgcacgttctgctgcatcgattgccttacgggcatcctcggcctgaccatcgggtatgcgggaaatgacagcctctgtagcagggtttaccacatcaatccatgcgtctccacgccaggtaacaaactgtccatcgatatacatagaatgttgaacgggtactgacatgggcgactcctgtgatttatatgtttattttcggtgaatgcattgttaattaacatcaatcatcagagagacggcatcgtgaaaggacaattctgtgaagggcttcataaaaacaagtgtaaaaggaataaaaggcagaaataaaagtcaggagtcatgcccgtttgcaaacaagtggttcacaaacgggcaatttttaacgtaacgagcgactttccatcgcctcgatgagcaccgcatcatgtttcagcgtttgccatgcatggatgacttctgccggaaaatcaacgtgaacgataaaatctcgcccgcggggaccgtagccatcgctatcatcgcgtaaacgcggcagctcgccagtgagtagtgagagataacgctcaaccggccataatccttgtaactgattaataaagattacactgtctgcgttatttcctaactgaggaacgaatccgggataacttaaccagcgtggtgcatcgggattgtccccagtcatacggcggaacgtcgccatcgtgcgccgctgcatggtggggtcctgaacaacgatagccgtatgaactcgttctacggcctgtttcaatagcgcgatgctaaagcgtgcgttttcaccgcagtttgttgactggtcttcaatccagattttttcatgcggaatgtgccagaactgatgagcgatatccgccaggatggtcgcttctgctctgccagtggtgcggatagtgttgtagtgcggatgctgtgcgatggcgctatacaaaaaagttgtcgagtgaccgataccaccactaatcagtaaaggaatttgctgatcgcgagcaatcttacatgccgcgtcgatagtcggcataaccgcattgcctgcaaggatcacgcaatcggcctgatacggcacctcaccggagaaatcatcctgcgccagccactgtccgataacatttatggcatctatagttgccggcgaaagcgtcggaaacggggtaatgttcatggttcctccttatcgttcccttaagaatactgcgtgagataatagtgagaagcggagcactctgaaaggaggaagtcgtatgtccttaaccgccactccgcaagcctgacatatcttttaaggaaatgctgtagataaacattattcatcttgcagcagagaattgtatttttctgaattcctgaatttttacccttaccgttttagaattaataaaaaacccggcgctaaatgcttaccgggttttttctttatcaggcaaatagcagggttaaccgctaatctgctccatcgcctgcaaaatacgcttatctgaaatcggataaggcgtaccaagttgttgagcgaagtaactaacgcgcaactcttctatcatccaacggatctctttcacgtcttcatcctcacgacgtgcaggcggcagtttgttgatccattgctgccacgcctgctggacgttttcgactttcagcatctgagcacggtcgcgatgtggatcaaccgccagtttttccagccgtttttcaatcgcctgcaaatatcgcagcgtgtcgcccagccgtttgaagccgttaccagtgacaaaaccgcgatataccaacccgcccatctgcgctttaatgtcagaaagccccagtgccatggtcatatccacccgccctttcagacgtttgttgatattgaacactgccgtaagaatttgctcgacctgcttcgcaatatctaccaccgtgtcgttcagttcggcacgcactttctcatgcagcgcagcaaagccttcttccgtccagaccgggccaccattggcgtcgatcagttgatccacaccgcaggagatacagtcgtcgatcagctccagcactttgccatacgggttaaagtacagtccaagcttggctttgtttggtaacttctcatgtaaatacttgatcggcgagggaatatttagcagcagtagacggcgaagaccgttccacattgcctgtttttgctccagcgggttatcaaacagttttatcgccacactgtcacgttcatccaccagcgccggccacgccttcactttatagttgccgcgcttctgttcgtagctttccggcagttgcccaaagctccagatatgcagcccgctctgctcgataccgtcatccgccaccgcggacagcgtttcctgcactttgcctttcagcgcatctttcagatcctgtaatgagcgcccttcttttagcttcttatttttgtcgtccaccacgcggaaggtgattttcaggtgatcgggcacctgatcccagtgccagtcttcgcggtcaacggtaacaccggtcatccgccgtaactcgcgctcaaggctgtcgagcaacggtaactccagcggtgtgacgcggcctaaaaacgcttcggcgtagtttggtgcgggtacaaaattacggcgtaccggtttcggcaacgatttaatcagagcaatcaccagttcgcggcgcagaccggggatctgccattcaaacccgctttcctcaacctggttaagtaacggcagcggaatatgtacggtcacaccgtcagcatccgcgccgggctcaaactgatagctcaaacgcagcttgagattgccctgatgccagaagttcgggtaatccagcttgctgattttttctgcgccctctttgatcaacatgcttttttcaaagttgagcaaatcaggggtttcgcggctgacttttttccaccagctgtcgaagtggcgtgcagagatcacatcgtggctgatgcgctggtcgtagaactcaaacaacgtttcgtcatcaaccagaatatcgcggcgacgtgatttgtgttccagctcttccacttcggcccgcagtttcaggttttcacggaagaatgcgtgacgcgtctgccagtcaccttccaccagcgcatggcgaataaagagttcacggcataacgccggatcgatctggctgtagttgaccttgcgcgcggcaacaatcggcaaaccataaacagtgactttttccgttgccatcaccgcgccctgcgcccgttcccagtgaggttcgctgtaggtgcgtttaatcaaatgctgagcgacaggctccacccattccgggtcgatacgcgcagcaatgcgcccccacaggcggctggtttctaccagttccgccaccattacccatttcggcggttttttgaataaaccagaaccgggaaagatggagaaacgcgcgttacgtgcgccggtatattcttgtttatcggcatctttcatgccgatatgggaaagtaaacccgtcagcaacgcaatgtgaatttcgcgatactccgccggttcgctgttaaccggaatgccaagttctttcaccacctggcgcaactgggtgtagatatcctgccattcgcgcacgcgcagatagttgagataatcggtacgacacaggcgacggaaggcgttggaagaaagcgccttttgctgctcgccaagataattccacagattcacaaacgcgaggaagtcagactctttgtcgtggaagcgacgatgtttttcgtccgatgcctgctgtttatccatcggacgctcgcgcggatcctgaatggaaagcgcggacgtgataatcatcgcctcacgcacgcagccatgtttttgcgcttccagcaccatacgcgccagacgtggatcgacaggcaactgcgagagctggcgaccgagcggcgtcagtttataggcgctggcctgttcatccgtggtgatcgcgcccagttcttcgagcagacgcacgccatcctggatattgcgtttatccggtgcttcgacaaacgggaacgcagcgatatcgcccagccccagcgcggtcatctgcaaaataaccgaggccaggttggtacgcagaatctccggatcggtaaactccgggcgcgaaaggaaatcgtcttcggaatagagacgaatacagatcccttcggacacacgcccacagcggcctttacgctgattggcagacgcctgcgaaatgggttcaatcggcaaacgctgcactttggtgcgatagctgtagcggctgatacgtgctgtaccgggatcgataacgtatttaatccccggtacggtcagcgaggtttccgcgacgttggtcgccagcacaatgcgccgtccgctgtgcgactggaacacgcggttctgttcgctgttcgaaagccgcgcataaagcggcaagatttcggtatgacgcagatttagcttgttcagcgcatcggcggtatcgcgaatttcccgctcaccactcataaagatcagaatgtcgccagggctttcctgactcagttcgtctacggcgtcaaaaatcgcctgcaactgatcgcgctcggtgtcgtcggcttcttcaacaatcggtcgatagcgcacttccaccggataggtccgaccggagacttcgataatcggcgcattattaaagtggcgcgaaaagcgttccgggtcgatagtcgcggaagtgataatgatttttaggtcaggacgccgcggcagcaactctttcaaatagccgagcagaaaatcgatattcaggctgcgttcgtgtgcttcgtcaataatgatggtgtcgtactgcatcagcaggcggtcttgctggatctccgccagcaggataccgtcggtcatcagcttgaccatcgtgttatcactaacgtgatcgctgaaacgcactttgtaaccgatgcaaccgcccggctccgttttcagctcttccgcaatacggttcgccaccgttcttgccgccaggcgacgcggctgggtatggccgatcagccctttaatcccgcgccccagctccatacagattttcggtaactgagtcgttttaccagaacccgtttccccggcgacgatcaccacctggtgatcacgaatcgcttcgagaatgtcctgttttttctgactaaccggtaaattgtcaggataagtaatttccggtcgtgccgcttcacgcagcaggactttccctgccgcctggtcaatctctttcgccatctcctggaaaatggcctgttgtgcatcaggatttttaaccttcttaacaccgtgcagacgccgagaaaaacgcagtctgtcgcgcagcatcagcgaatccagccgctgctgcaaggccgtaaaggtcaatttttgttgttctgtcataacgttagtgggcagtagtctgcctgattaattttcttttaaatgatagatatagagtaccacatcgcggctttctatgcgttgttcaataaattcgaacataggcttcgatttattgcgctatctctgtggcaggattgtgaataaagtgtcagcaagcaacggggcatcgcccattcaaacatctataaggaaacaccatgagcaaggtattagttcttaaatccagcatcctggcagggtactctcagtctaatcagttgtccgattattttgttgaacaatggcgcgaaaagcactccgctgatgaaatcaccgttcgcgacctggctgcaaatccgattccggtactggatggcgaactggttggtgcactgcgtccgagcgatgcgccgctgactccgcgtcagcaggaagctctggcgctttccgatgagctgattgccgagctgaaagcccacgacgttatcgttattgcggcaccgatgtataacttcaacatctcaactcagttgaaaaactattttgacctggttgcacgcgcaggcgttactttccgctataccgagaacggtccggaaggtctggtaacgggtaaaaaagccatcgttattaccagccgcggtgggatccacaaagatggaccaacggacctggtgacgccgtatctgtccacgttcctcggctttatcggcattaccgatgtgaaatttgtcttcgccgaagggatcgcatacggtccggaaatggcagcgaaagcgcagtctgacgcgaaagcggccatcgacagcattgttgctgcataaccggacacgatcttgatgtggactgtagttcagtccacatctcaatccacttacctgttttcccataatttcagcatcgctttgtgatcttccttaagcacaatatgcgaacgtctggctcgaatataactaatcgcttcatcaacggttttacagtgtccgtaacataacaaccatgccgccactaccagcgcactgcgcgataatcccaacgcgcaatggaccagaacgctgccttgctcttcgcgtaatgtttccagcatcgccacggcctgtcggagctccccctcttccggaaccaccagatccagcatcggtacacagaaatagagtcgatcttttgtcgctcgtccgcgagggaattcaaaggtgacgtccagaaccgcattctgtgccggaatatgtcgtggaaacgcccctaaataaacaccagcagtcattttgctcaccggctccaggcgacgacaaaaccaacgcatagacagccacatcccgatgcggcagggcaatgtcagccagtaaacggcgggcggtagtttcccctgactatctttccctgttgttatcgcgccaagcccaccgtacccacggccaattatgagtagcgataatactggccaacataaccagactgaccaccataactgaatcatcatcattagctccatcaatacaatgcacgagcccgcgcctacgacatagggcagtgctattttgattcgacgttgatcaggtttctgataattccaacgacggtcgacgggcaccatccagtcaatcaacatacctaccgccagccctgtgatgacatcaataaaatgatgctgccaggtcgtcagagtagaaatagcgatgagtaaaaaccatccgccgcagactttacgccacctctcagccagatgctgacgaaagtgacgccaaagtagccagcagagaataatatgcagcgaaggagactggttataaggcagatcaaacagttcaagttgcgaaaatagccatcccgtcaccccactcacttcaggacggataaaactaaacttcagcggatagagcaaaaaaccgcagcaggccattaccgttgccagaataagccggtggacaagtcggcgctgttcgaatgtcgtgctacaaacgaacagcgaaaatccatataaaagatccagactccagtaaggaacaatagtccagggaagaaaagggatcgccgtttcccaaccgaatacctgactggggatatcatggctgttaaggtcctgaaccgcggtgaactgattaagagatccataggtgaagaagaaaaacggggccagcaacaataaccagccagcgccttgtagcaatacgttccgacgttcagttatcacgacgcaccgccatcgaaaccgtaaaaataccccactcatcaatccgttgtgtgcatttatcaaatccggcatcacgcacgagtgaatccatctccccttgcgaacgcacgcgcattacccacggtttaccatctttatgactggttaacaccccggcaatcatctccagttgagggtgccacggctgcccggtgtagatgagaatgccgcccggttcgatggcattggcaagacctgcgagtgagttttttacctgctcattttcgggaaacagctcatacagtccagagacaatcgccagcgtaggccgcggagttaacgcgctgagttcctccgggttaaacgcatcgccctgttcaaaacgcacccgcccagacattccccgttgggcaatcatcgcttgcccctgtgcaacatttaactcactgtaatcacgtaacaaaatatcgcttacggcaggctcgtttgccagcgcattcagtacatagcgcccatgccctgcggcaatgtcaaccacgcggacggctaaacctttggcgtggagatcggcaacggcttgtttaatcagtatttgtaaatgggttttacgctggcgaataccgcgccagccaacactgttcaggtagattttgtcaattaagcgcccgaatgcgttactgccttgcggttgattttgatagacataatccagggaactgcctgaatcaaagccggtgctcattccgagatgcaggcccgcagagtgcgccccgaacaatttcatcgcctttcgcataaagcgatacgccaaatcaaccggcgataatggcacgggtccacctgaaaggagccgccagcgatccgctgatggtccagtgcggtcttcatgctgataatcaaatttttgtgacttgttagcatataaacgactaataaagctttgcattttttcaaatgcctgcgccctgttctcttcacccaacgtgtcgtgataaaagcctggcagcagatgcagctctttcagagggctacgtaatctctgataaaaatcaatctgcggttggcgatgcaccacatagtcatcgcctgatatcagaagttgcgtggggagcgtaatcgccgccgcatctctaataatacgttcagacgttttgtagagatcgagcaagatattaacggcaatcgcccgtgtgatcagcggatcattattgaaactcgccacccgttgccgatcgtgggtcaaatagcgtcctttcacataggaattaataaaaaacagaccacgcagacgatgccataacgccagcgcaggacgtgccagcggtacatacaatttaaccttaaaggccggagaagccagcaccagcccgcgaattgcaggcgcataatcatgaacccatgtggcaaccagcactgcgccgacgctttgcgcgatcactaccacctcatccagtccgacctggctatcgctggcagcaaaacgaacaaattcatcgacatcctgcactgaacgcgcaagagatgggctataaccacgcggccccgaagtttgtccatgccctcgggcatcccaggcataaaaagcagtatctggcatcgccagttcatcaacgatatgttgtagacgaccagaatgttcatggccacgatgaaataagacgatgacctttttcgccccgggctgtaaagcgggccagtgccgataaaacaacgctgtattatcactggtggtaaaaaaatgttccccagagatgcgtgaattttccattttctctattttccttcagtaacagcagtagcgaataaaataaaaaaataccggagcggtgaaaattaatgagtcaatcctgtcaaggagtccgccatgtcctggtaatagttttccactatctttaacaccaatatctcgtttgatggctgacatcactacatcgccgcaaaaaccactaataccaattaacaaacccgctaataatgcctgtaatgtatttagcggtgtcagcaacggtccaataatcagtgacgcaatcatggtggtgattacgccccccaccaggccttccagcgtttttcccgggctgactttggggaccacttttcttctgccgcaggatttcccccataaatactgtgcaatatcgtttgactcggttaacgccaaaagaaataacaccagtaacgccccgccctggatattcatggatggcaacattaataaccaggcggcatgactcaaggcgaaaacggtcattatccagccccaaaaaatggcgctcacggtatgcagaaaaccggaggggtcccccacaaaaacttgcccggtggctaatattagaaacccagccaaaggtataaataacagaaacagctcaaagcaattaaaaccgataagcaaatagttaagaggaataacccaatatagccaacgtggaaaatgtatggatataagcgtacaatattctttcaatgccagaaaacttatcagcgcaaaaaacgtcaacgtcatccagcgtggacctgaaatcaccagtgaaaaacaaatgacgataccccaccaggtacgaatacgtaatgtaacttcatccccttttctctccggtaaccgccatagcagaaaacggtttatcagcgttgctaaaattaacaacgcgaaaagtgttgccagagatttttccagcattatctttcagcgctcataagaagcacactccgacaacgattaatcgcagtccagataagcagaattgaagcaatgctccataaaagattattccattgcatccactgtggataaatggaaacggccagcccccacaacccaaatattaacgcacgatcgcttttgccgaatggaccggcataactgcgaataccgttaattgtctgcgcgagtaaaccacaaaactcagtcaatatggtgcaaaataacatgagtattacgagtgatgcgttactttccggtaaaaataaaaacggtaaatagagcgcaatatcggaaataacatcgccagtttcattcaaaatcgcccccagacgtgtttgctgattgcactcacgcgccaacatgccatccagcgcattgagcgccatacggataaaaagcacgatgggcaatagcaaaaagaggatgggttgtgccaccaacaccaacagcaatccggtaagaagagaaagcgccagtgcagcaagagtgatgtgattcgctgtaacgtggtgcttgtaaagccaaaacatcgtcggccttaacagcgactgaaagagcggttttatctggtagagcgtcattatcaatccttgataattcggtttgcgctatggtgcatcaattcccctgacggagatatcgcaacacgccgcttcattaaaaattcagaatatatcaaggtattggggactcactgtcaggaataattatccccaattaatcaaagggttaagaaatattacgttgtggatcaatacaactcatcaagttttctcatcgcttgttcccgtattgcgcgcgtcttaccgttaagcgccagctggcggactaaatccagttcagggttaacaagctctaacgccagcaaaggatcacgtttcagcctcgcctttaatacatcaactggaaaacggggattattcatcgccacaatccaccactcgggatcaatttctgccgccagtactgcaggcggtgtgtggcggttgttaagtgcgccgaacttgaaaaatgtgagattgcttttcgccagtgtactccaccatatacgatccggttgttttgccagtacatccagttgtgctaacgcatcggggtcgagtgcataatagacgcgtaatgcttcatcaacctgcgcacgggagctgttttcctgcctcagaaaaaacttcgcccaaatatcattgcgtggcgtattttgctgtaattccttgaggacaacagcgggtaaattatcccaactaactaatgcactctctaaaaagtcccagtcttccaaacgtatcagggcggtggcatttaatagcatctggtcatcaacttcaccgtggctgataagctcagacaaaatcatatcagcgctggtttcatacgcagctgaatctgctttcggattatttttccgatgcgataaagcacgttgccaaattttttgtttcatcgacgtgctcagatactgatttttcgccagattactccacccctcaggatcgttgaaacgtgtcaataaccgttgtaaagcagcgtcagagtgaattacctgcatatcccgacagcaaaagtaggcaggggattttttctccatccttttaacaaaattaaactgtaagttatctggcaatgctaaaaataacacacgtattagatcatcgtcattctcgaatttttggtataaataggctgcaactttgtcactctcttgtggcgtcatccgcaataattgaccatggtgtttcatctctgccagcttgaacgttaagcttgtgacaacattgtttgatgaatcgttcgccaactgcattgcctgattgtaggtgagttgtcctccagcaccgacctgacgaatagaggaatcatcactgcggatatagccatcaataatggattcaggcaataaccacgcatctttataaagctcctgaatgatcatatcccaatctcttttcgccagagtcattacgatatccagagggagattttcacgtagcgcaagattcaacggaccgacaccatcaggtagacgactcattcgcgtcattatttcgacagagagcggttcacggtcgagcaaccccagaacaacaggctggtaacccaattgctgatcggtcaactccagaatctcattgtcaggcatatatctcgccatactttcaatcgtttgttcatcattgctattaataagttgtttgcgtaggttagctgaaattcctttaagccttgggagagttcgcattatggcaagatcaaatgtcgcaatatctcgtccttcaaatgcagcaacgttgccttcatccagcatttgcaattcctgcactaactcaggagaaggcttagggcgaaacagcgcttcttttttcatctgattacagacattccctgccatgcgaatattgcttcgcttaaaaatttctttcagagcatcttcatcatttattagaccccaataatatgcatcaggatttattatcatcagcgcttttttgacattttcagtgtcatttttgtcactcgcacggaccatgaattcactatttgtcgaagacgcaacaacaggtgcaattatgtcattgataaatatcccacgcgcattaataccccccttaatcgtagacggattatcgtaatatgagtcgataaataccagtccacttgcatttatcgaaccggtaattaacagtggtgaatccgtaactatattcgttgccgtcacgttaccgagaataacccatggattagaaagagagaaagtggaaatattacctttgactgtcaaattgccaagaacaatcaatttttgattactctctatattaccttctaccactaaatcgccacgatgcactttccagtccgatgcagataaaccgaaggggacaagattcacgctactgttgatagcttgttcaacttgttgtttatcttcagcggtagctgcagaaaaaaatggttcaatatcaactgcatttgcaacacatcgaagttccgcctgtactggaagactcagcataaacaggggaagtaaacctatccagctgcaaatcctgggcttaaacatatgcactccatgccattaaaaaagaaacaaaagggaaatgcatctttcccttttgtatattcgttattctcgcgaaataccatccaacgtagacaacacttcctcagaaagatgcaatttttcagcagccatattctcccgtaaatgcgcaacagaagacgtccctgggatcagcaaaatattcggtgaacgttgtaacagccacgccagcgccacctgcatgggtgttgcacccaggctcgcagcaacatccgacagcgtagaggattgcagcggtgtaaagcccccgagcgggaagaacggcacgtaggcaatgccatcgtgggccaaagcatcaatcattgcatcatcagcacggtgcgcgatgttgtattcgttttgcacacagacaatttcggcaatcttgcgcgcctctgcaacctgcgtcggtgtgacgttgctcaggccaatatgttttaccaggccttgttgttgcatctctgccagcacggtcaggctggcctcaatcgatccttccgctgggccatgaccatctcccatcataacgcgcaggttaaccacatccagtacgtccaggccgagattacgtagattatcgtgcaccgctttttgcaactctgccggagaaaaggcgggcaaccaggaagcgtcctctccacgccgcgcaccaattttagtgacaattgtcaggtcgtcagagtaaggataaagcgcttcgcggataatctgattggtgacgtgcggaccataaaagtcgctggtatcaatgtgattgacgcccaatgccagcgcctcgcgcagcacagttatagcgacgtggcgatctcttgggggaccaaaaaccccaggacctgccagttgcatcgcgccataaccaagacggttaacggattttgtaccgagagtaaatgtattgctgctcatcgcaccctgccctgtaataaaacggattaagaaaaatcagtatagaaacgaaaagagataaataatgcgagggcgtaaacaagattactggatgagttgctctattgtcctgaaaaacacaaaacaaaacgcgtaaagcgccgcatccggcaataaaaaaaccgcaacctgtatcagcgttgcggtttaggtatcacatgctaaaaattagaatgttcagtatctggacgttactgtttcggtcgcagattctcatcaaataccagacgtttcctgttcggttcaacttcccgcaatggctcaacttgatgcaacgtctgcttacaacgagtcaccagcacctgatactcatgcgtaccctgctttttccatgccagctcctgctcactgagttcacgaatcgctttcgccgggctgccgacaatcaggtaattggcaggcatttctgctttggctttcacaaatgcggatgcgccaacaatgctgttctcgccaatcaccgcgccgtccatcactaccgcgttcattcccactaatgcattgcggcggataatgcaaccatgaaggatagcgctatgaccaatatgtccatcttcttccacgacagtatcctgctcgggaaaaccgtgcataacgcaattatcctgaatgttcgcgccatctttcaccacgatacgaccaaaatcgccacgcaggctggcatttggcccaacgtaaacgcccttgcctagaataacatcgccgatcaataccgctgtcggatggacaaaactctcttctggcacaaccggagtcagaccatctatctggtaaattggcatatcgcctcctgttcaatattcaaaccgccaaaacgttgaaaatacaggcttcccggcgcaggcagttcaccgaccgaggtttcacctttttcactaacgaacgctaaagcagcaggcgctacgcgctgataaatgttgatacacagctgacgcgccgtatgccctgcccagtgcgccggaagcaactcctctggcaacaatgggtctttaaggacgacacggcgataaaaatggatcagtaaaagctgaatatgaaatgcacgctccggggttaactcgtctgctgcctcttttaacagcggcaccagcgggcggaatgactgaataaaggtttcgtacatggcattttgttcagttaaatgccagcactcttccactctggcacgcagtgctgcacgagaaagcgccagtggtatttgcgcttcaaaacaaatcacgttatccgccacccccgcttcatgcaaaagtgtctgtacatccgccagtttttgcgacggcgatgccatcaggctgggtgccagtgcgccaaaaccttgccagatcaactgctttttgacatcagccagcgttgatttatctaaaccttccgagagcaacaggagccatttaccatcccatgcaggttgctctgcgcgataaattttactttctgcccgtcgcgtcaggcgcaagcctttatcactgaggctatagaaactgcgtcgcccgatgcgggaaacatccagccagccttctttattaagacgaaacaaagcggtgcgcacgaaacgctcaccaaatcccagcccttccagcaaagcagccagactacccagccagatttcaccaccacgatgggaaagcgaatcaccatacagagaggagatcaaagatgtgccactgaccggaacagcgtttacagcatgttggataaaagtaacaagtttactcattcgattcagtctgttgttattgttgtgatttatgaatcatagcacaggtcgtatcgacttctggccctggcgctttacctcaccagggccagacgacacgtcaggcaccaacaatattgcgcagatcaaacacccgacacgccttgccttctgaacgcgggatactgccacagttaacgatcatcacatcggtagagatccccaccatcgacttaatccgatggcgcagctggtggcacacctggcaacgctgctcatgcgtcaatgtcaggctgctttctttcaactccactttcacagaaagtgaatcaagatgcccccggcggttcacctccagttggtaatggggcgataaatgttcgaatttgacaatctcttcttccagttgtgacgggaagacatttacaccgcgaatgatcaacatgtcatcgctgcgtccgctgatgcgatccatgcggcgcatagtccgcgccgttcctggtaacagtcgggttaaatcacgcgtgcggtaacgaatgaccggcaatgcttctttggtcagcgtggtgaataacagttcgccatgttcaccatcggcaagcggtgtgccgtcatgaggattaacaatttcaggatagaaatgatcttcccaaatggttgggccgtcggtagtttccagacactccatcgccacccccggccccatcacttctgacaggccataaatatccagtgcggtgatccccagacgccgttcaatctctttacgcatggcctgtgtccacggctcagcaccaaacactccaacccgcagcgagcaaccgctggcatcaccgcccaactgccgctccagctcttcaatcaggttaaggcaataagatggcgtaaccatgatcatatctggttgaaaatcgcggatcagttgcgcttgtttttccgtctgcccaccagacatcgggatcaccgtagcgcccagacgttcggcaccatagtgcgcgcccagcccaccagtaaacaggccgtaaccataggcaacatgaattttgtctttgggcgtgccacctgccgcacgcaaggaacgcgctacaatattggcccagttatcaatatcgttttgcgtatagccgacaactgtcggtttacctgtggttcccgaagaagcatgaatgcgcaccacttgttccatcggcacggcaaaggtgtcaaagggatagttgtcgcgcagatcctgtttggtggtacagggaaatttacgcaggtctgaaagttccctgaaatcatcaggatgtacgcctgctgcgtcgaatttgcgccgatacatcgggacattttcatacgcgtgtttgagcgtccatttcagacgctgtgtttgcaacgcctgtaactcatcaacagacgcggtttcaatcgggtcaagctttgtattggttatcattgtagggtactcgcaggttgatatgctcaaacacgctccagaatcatggcgatgccctgaccgacaccgatgcacatggtgcataatgcgtaacgaccgttacgccgatgcagctcatggctggcagccagtgccaggcgggcaccactcattcccaacggatggcctaaggcgatagcgcctccgttggggttaacatgtggggcatcatcaggcagccccaattcgcgtagtacacccaacgcctgggccgcgaacgcttcgttcaattcaatcacgtccatatcgtgaatactcagccccgcgcgttccagcacccggcgagttgcaggcaccggaccaagccccatcagacgcggttccaccccggcggttgccatggctacgatacgcgcccgcggcgtcagtccttgcgctgctgccatctgttcactggcaataatcaacgcagcggctccgtcattcaccccggaggcattgcctgcggtaatcaccccattggcacgaaatggtgcttttaacccacgtaactgttccagcgtcgtttccgggcgcagatgctcatcatgttgtatttctgttacaacgcctttcttgtttttcaacacaaccggaacaatctcctcagccagaatgcctgaggattgcgcttttgccgtacgttgctgactgcgtagcgcaaaactatcttgatcttctcgcgatatttttaacagttcagctacattctctgccgtttccggcatgctgtcagttccaaattgttgagccatgagcgggttcacaaatcgccagccaatagtggtatcaaacatctcagcctgacgagaaaatgcactggttgccttgcccataacaaacggtgcccgagacattgactccacgccaccagcgatcagcaaatcgccatcgcccgctttaatcgcccgtgcggcgaaccccagtgcgtccagcccggaaccacacaagcggttaatggttgtgccggaaacactctgcggcagccccgccagtaaagtcgccatccgggctacgttacggttatcttctcccgcctgattagcacagccgaggatcacatcatcgatacattccgcatcgagacgcgggtttcgcaccagcagttcccgcaaagggatagcagccagatcgtcagcccgaacacctgataatgccccaccatagcggccaatcggcgtacgaattccgtcacagataaaggcttcacgcatcaggcttctcctgtaatggtgccgccgatgcggtgagatttaccgcgaaacagcgcaaccgttttttgttgttggttaacaatttcgatgtcgtaaacaccggtttgcttgccctgatgacgaacctgcgcagtcgcagttaaggtgtctccggcaaagcctggacgtaaaaaatcaatcgtgcaggcagaagcgacggctgccagcccctggctattgcaggcgtaggcaaaggcagtatcagccagtgaaaatagctgcccgccgtggcaactttgatgaccgttaagcatttgtgcagtgacggtcatggtcactacagcaaagccttcatccattgagataatgtcgatgccaagcgctttggcgcaggcatcgttctcatacattgcatgggcattttgccaggccttatgactcataaccgctctccagaagcgcccgttggcgcagcaatgaacatgggcgatagcgttcttcgccatagtgatgctgtagattttcaaggagccttaatattcgctgccagccaagttgcgctccccaggcaagtgggccatatggataattcaccccaagacgcatggcggtatcgatatcctgttcagaggccacgcctttttgaagcgcatcaagggcttcattgatgatcattgctaccgttcgccaaatcagcattcctgggtaatctgcaatttgcagcactgttttgccctgctgttgcaggtaataaatggccttgcgggtcgctgagtccgggttcaccgctgccgcagcaatggtcaccaccttgcccgccattttgtcgaccactaccaccgggcgtgccagtcgtattgccagcgcctgtgccgtctcgccttgtgtctcaatcaataaaacatcgtcaatttccgtgacaccgtcacttttcttttctactttcattgggctaaaactgtcgcttaccgcttccaggccaacaactgcctcacgttccgcgcgccagtcgtacacgcccagcccacttttcttgcccaaccgtccaccaatcaccagttcctgttgcaccagcgaaggtaaaaaacgacgctcctgccagaaagcgttaaacaccgaacaggtgacagcaaaattgacgtcctgaccaatcagatcggttaattccagcggccccatcgggaaaccagcgccatcgcgaagtgcagcgtcaatcacttctggtgcagcaacctgctcttccagtgcccgccaggcctcggaataataaggacgcgcaacacggttaacgataaatccgggggtcgaatgacagcgcactggctgcttaccccaactcaatgtcagttcacacaactgctcgacaacttccgctgccgttgccagcccactgaccacctccaccaacttcatcaccggtgccgggttaaaaaaatgcagccccgcaacacgttcaggattttttacctccgcagcaatcgcggttatagagattgacgaagtgttagtggtcaatagcgtttgtggcgggcaaacttccgccagttgtgcaaagagcgcttttttaacttccagacgttcagacgccgcttcaataaccagattcgctgctgccagcgcgtgaatatcggtcaccgggatcaggcgtttcaatgtgcgttcacaggtttcagcggtcagttttccccgcgtcacgcgtgaatttagccgcgcgtgtatcccgtcgattgcgcgggtcagcgcttcagcagaaatgtcatacagtaaaacctgatgtccatgactggcggcaacttcagcaatgcctgcccccatggtgccgctcccaatcactgccacagtttgcacatttatcatcatgctatttccccgtgaactgcggtgagcgtttagccaggaacgcactgacaccttcacgataatctgcgctccgtccggcaagtcgctgatagtcacgttccagatccagttgcgtatcgagcgtattggtttcagcgctatttatcgcttgcttgataagtccaagaccaaatgtcggttgtgtcgccagatgccgtgccagctgttgcgcggtatctgccagcgtttcatcatcaacaacctgccagatcatcccccattcgtgcgcctgttcagcactcagttgattccccagcagtgccagccccatggcgcgcgctcgtccggcaacgcgtggcagtaaccaggttccaccgcaatcgggtattaagcctaacttactaaacgccatgacgaattttgctgaacgggcagcaataacgatgtcgcaccccagtgccagtgttgcgcctgcccctgccgccacgccattgactgcacagatcaccggttttggcagttttgccaggcgacgtaccagtgggttatagaaacgttcaactgacatccctaaatccggtgcggggcctgtgggatcaacgttacgatcgttaagatcctgaccagcacaaaatccgcgcccggcacctgtaagtaacaggcaacggatagtgtcgtcgcgctcgacctgtttcaggcactctgccagttgtgcgtgcatctcatcattaaaactgttcaggcgttccgggcggttgagcgttagtgtcatcacgcccttttctacatgactgaggatgaattccatcattagcgtcctttaaagtcgggcgtgcgtttttgtaagaaagcggagatgccttcatgacgatcttctgttgccgccagcaaggtgaataactgtcgctcctgggcaagtccggcttgcaaagccacttcctgcgactggcgcagcgcttgctttgccgcttgtaaggccagcggcgagtgacgtgccattttcgatgccagctgtaaggcgtattcgagggttaaatcgctggggaagacgtcgctaaccagcccggcctgctgtgcttgctgggcggtgatactttctccgctcagcaccattttgctggctaacgatttaccgacactacggattaaacgttgcgttcctcctgcgcctggcatgatgccgagagtgatttccggcaaaccaaaacgcgcgttctctccggcaaccaccacatcgcacaacaatgccagttcgcaacccgcaccaagcgcgtaaccgttgacggctgcgatgagaggtttgttgaaggcctgcaatcgcgcccatagctgcgggcgtgtatcgtttaaggtggccgcgagatctttttctgccatttcgttgagatcggccccagcggcaaaaaagcgtgcattaccggtaatcacacagaccgaaatgctgctatcggtagccgcagcttccagttcatttaccagttgcgtcagaagggcattatttagcgcattacgtgcggcgggacggttaagggtcagcaacaatacttgttgctgacggctgacgatcagttcgctcatgccatccccttcgcgtcaaagtcaaccaccacatcgctggtcagcggcagtgcctggcaactcaacacatagcctgcggccagttcatccggttccagactgtaattggtttccatcgccactttgccacgcagcactttgcatttgcaggtcgcacagacgccgcctttgcaggcatagggcagatcagccccctggcgcaatgccgcatcgagaatgctttcatcgtcggcattaagcacgatttcccgatcccgcccatcctgacgtacagtcactttttgtccgtcactttgcacgttaacgctacgtttgacgcgcgtgccaggcgtattaaaccgctccagatgaatggttttatctggcattcccagtgcttttaaggcggcttccgtctcatccatcatcgccgccggaccacaaataaatgcctcatcataaagacgaaaattaatgagcgaggccccaagtgactgtaatttttcaccgtcaatacgcccgtgaagcagatcgctgtcgagggtttcctgactgaaaatgcacaacaactgtaaacgctgaggatatttgtctttcaggtctgccagtgcctggcgaaacatcatgctctggctggtacggttaccgtagatcagggtgaactgactttcaggctcggtttgtaaagtggtggcgataatcgccagcattggcgtaatacctgatcctgctgcaatagccagatagcggccctggcgttcggcctgtggctgatagccgaaatgcccctgcggcaccatgacctccagcgtcataccctggcggatgtgttcgcgggcatagcgggagaaacgtccgccttcaatggctttcaccgccacactaatttcgccaggcagatagctgcggcaaatggagtaacaacggcgtaattcttcaccatcaaagctggcttttaaggtcaaatgttgaccggggcgaaagcgatacgcctcctgcaaaggctggggcaccgcaaaggtaatggtcaccgcatcacgggtttccggctccacttttgccaccgttaaggaatgaaacgttgtcatggcatcctcaaatacatttgaaataatcgaaaggttcgcggcaactatcgcagcgatacaatgctttgcaggccgtggaaccaaattcactgataagtgtggtatggacgctggcgcagcgcgggcaacgtacttctggcggcaaatgggcatggcaactgtgtccggcgggcgggctaatgccatactgtcgcagacgctcacgggcatcgggggtcatccagtcggtggtccatgccgggtcgagttgcagcacaacctgaacgggggtaaacccgtgggttgtcattgcctcacgtatcgcgccaatcaaatgttccgttgccggacaaccggaataagtcggcgtaaagccgatcacccatccttctcccatctgtgtcacattacgcaccatgcctaaatcggtaatggtcagcaccgggatctccgggtccgggatctggctgagtagcgcccatatctcatgaacctgtggcggtgcaatggtggccagacgttgcatacccatctcctctgttaccattgctgaccgggcaagacacgctggagatactgcatttctgccagcatgggtccaaggtgttcggtatgcagtccttttttaccgccagtgcgatacgcctgctcttgcggtacgttcaatgtggcttcgttgattccggcaaaaacttcggcttcccacgctgcgcgtaaagtgcgtggatcaaccgcaataccctcttcactcagtgcaatatcaatctcgtcggcatcgaacagttcggcagtaaaacgccacaacttgtcgatggcctgctgcatcttttgccctgatacgtcagtaccattgcccagtcgctccagccagccacgactaaaacgcaggtgataacgcgcttctttaattgctttggcagaaatcgccgccagttgcggatcacggctttccatcagacgggtaaagagcgccacatgccatgcatcgatgaaatactggcgtgcaatggtgtcggcaaaattgccgtttggttgttcaaccaacaataagttgctgaactggcgctcgtctcgggtgaaggccagggtatcttcatcaccttctcccgctaattcagcggcatacgataagaagttacgtgcctgacctaataaatcgaggccaatgtttgccagtgcgagatcgatttccagttccggtgcgtgaccgcaccattcccccaaccgctgggagagcaccagacagttatcgcccaggcgcaaggtgtaagccgttaactgattcatttccgacctcacatgtgctcaatgccatcagggatggtgtaaaacgttggatggcgatagaccttgctttcagccggatcaaaaaattcaccgcgttcttccggttgcgaggcaacaatttcactcgccttcaccacccaaattgaacatccttcgctacgacgggtgtaagcatcacgggcattttccagtgccatccgctcatcggcagcatgtaaactgccaacatggcggtgtgataagccctgtttgccacgcacgaaaacttcgtataacggccagtaaacattactcattttgaatctccttatgcgaccttacgggcaagttgtttttgtgcatgggccagcgctgcttcccgtacccaggtaccttcttcccaggctttacgtttggcgtcgagccgctcctgattacaaattccgcgaccgttaattacttcgttaaactcctgccagtcgatctcaccaaagcggtagtgaccgctttcagtgtcaaaatgcagatccgggtcaggaacggtcataccgagcatttcaacctgtggaacggtgttgtccacgaaacgctggcggagttcgtcgttggtgaaacgtttgattttccaggcgagacttctggcgctgtttggcgagttatcatcgtttggcccgaacatcattaaggctggccaccagaaacggttaatggcgtcttgcaacatctgcttttgagcttcgctgccctgcgcgagtgccatgcaggcttcaaacccctgacgctggtgaaaactctcttctttgcagattttcaccattgctctggcatacgggccataagaagtgcgacataacgccacctgattgacgatcgctgcgccatccaccagccagccgataacgccgatatcagcccaactcaatgtcggataattaaagatggaggaatatttcatccgtccgtcgagcattttttggtagatgtcttctctggcgcagcccagtgtttcggcggcgctatagagatacagaccatgaccggcttcatcctgcactttggccaacagaatggctttacgccgcaaggttggtgcgcgagtgatccagttaccttcaggcaacataccaacaatctcggagtgcgcatgctgcccaatctggcggatcagtgtctttcggtaagcatcgggcatccagtcctgtggctcgatagccgtttcctgggctatccgttgctcaaagcgttcttcttgggtcacgtcatcacctttacgattccagttttcgtgaattaattaaaaacacgaatcacattgttttatgaaagttacacaatagttaactaaaatcacaaattttgtatgcttgaactgtgacggatttcgcaccctatttttataaatcattatttatcagtgcgttaatgttttccgcagttgctatacagatcgcatagttaacatttcgttaaaagaccccttgctttttatgattcgcgatttaactattagcaacagaaatgtgaaacatctggagagtagcgatgcagcagttagccagtttcttatccggtacctggcagtctggccggggccgtagccgtttgattcaccacgctattagcggcgaggcgttatgggaagtgaccagtgaaggtcttgatatggcggctgcccgccagtttgccattgaaaaaggtgcccccgccctccgcgcgatgacctttatcgaacgtgcggcgatgcttaaagcggtcgctaaacatctgctgagtgaaaaagagcgcttctatgctctttctgcgcaaacaggcgcaacgcgggcagacagttgggttgatattgaaggtggcattgggacgttatttacttacgccagcctcggtagccgggagctgcctgacgatacgctgtggccggaagatgaattgatccccttatcgaaagaaggtggatttgccgcgcgccatgtactgacctcaaagtcaggcgtggcagtgcatattaacgcctttaacttcccctgctggggaatgctggaaaagctggcaccaacgtggctgggcggaatgccagccatcatcaaaccagctaccgcgacggcccaactgactcaggcgatggtgaaatcaattgtcgatagtggtcttgttcccgaaggcgcaattagtctgatctgcggtagtgctggcgacttgttggatcatctggacagccaggatgtggtgactttcacggggtcagcggcgaccggacagatgctgcgagttcagccaaatatcgtcgccaaatctatccccttcactatggaagctgattccctgaactgctgcgtactgggcgaagatgtcaccccggatcaaccggagtttgcgctgtttattcgtgaagttgtgcgtgagatgaccacaaaagccgggcaaaaatgtacggcaatccggcggattattgtgccgcaggcattggttaatgctgtcagtgatgctctggttgcgcgattacagaaagtcgtggtcggtgatcctgctcaggaaggcgtgaaaatgggcgcactggtaaatgctgagcagcgtgccgatgtgcaggaaaaagtgaacatattgctggctgcaggatgcgagattcgcctcggtggtcaggcggatttatctgctgcgggtgccttcttcccgccaaccttattgtactgtccgcagccggatgaagcaccggcggtacatgcaacagaagcctttggccctgtcgcaacgctgatgccagcacaaaaccagcgacatgctctgcaactggcttgtgcaggcggcggtagccttgcgggaacgctggtgacggctgatccgcaaattgcgcgtcagtttattgcagacgcggcacgtacgcatgggcgaattcagatcctcaatgaagagtcggcaaaagaatccaccgggcatggctccccactgccacaactggtacatggtgggcctggtcgcgcaggaggcggtgaagaattaggtggtttacgagcggtgaaacattacatgcagcgaaccgctgttcagggtagtccgacgatgcttgccgctatcagtaaacagtgggtgcgcggtgcgaaagtcgaagaagatcgtattcatccgttccgcaaatattttgaggagctgcaaccaggcgacagcctgttgactccccgccgcacaatgacagaggccgatattgttaactttgcttgcctcagcggcgatcatttctatgcacatatggataaaattgctgctgccgaatctatttttggtgagcgtgtggtacatggatattttgtgctttctgcggctgcgggtctgtttgtcgatgccggtgtcggtccggtcatagctaactacgggctggaaaacttgcgttttatcgaacccgtaaaaccaggcgataccatccaggtgcgtctcacctgtaagcgcaagacgctgaaaaaacagcgtagcgcagaagaaaaaccaacaggtgtggtggaatgggcggtagaggtattcaatcagcatcaaaccccggtggcgctgtattcaattctgacgctggtggccaggcagcacggtgattttgtcgattaatcggtgaatgaagggcaacggcgaatagttgcccttttatttcactaaattttgtgacgttgtcacattatgcatgatgtgtacatctattttcagggcatccactgtatgaaaagctggcacacctgccaaacaacctggcaggtgcaggcaatcccctttgcatcagtactgataatgtgaacctgactaaaccgcccacagagcgcggttgctaacaagaacacaacatctgacgaggttaataatgggaagcccctctctgtattctgcccgtaaaacaaccctggcgttggcagtcgccttaagtttcgcctggcaagcgccggtatttgcccacggtggtgaagcgcatatggtgccaatggataaaacgcttaaagaatttggtgccgatgtgcagtgggacgactacgcccagctctttaccctgattaaagatggcgcgtacgtgaaagtgaagcctggtgcgcaaacagcaattgttaatggtcagcctctggcactgcaagtaccggtagtgatgaaagacaataaagcctgggtttctgacacctttattaacgatgttttccagtccgggctggatcaaacctttcaggtagaaaagcgccctcacccacttaatgcgctaactgcggacgaaattaaacaggccgttgaaattgttaaagcttccgcggacttcaaacccaatacccgttttactgagatctccctgctaccgccagataaagaagctgtctgggcgtttgcgctggaaaacaaaccggttgaccagccacgcaaagccgacgtcattatgctcgacggcaaacatatcatcgaagcggtggtggatctgcaaaacaacaaactgctctcctggcaacccattaaagacgcccacggtatggtgttgctggatgatttcgccagtgtgcagaacattattaacaacagtgaagaatttgccgctgccgtgaagaagcgcggtattactgatgcgaagaaagtgattaccacgccgctgaccgtaggttatttcgatggtaaagatggcctgaaacaagatgcccggttgctcaaagtcatcagctatcttgatgtcggtgatggcaactactgggcacatcccatcgaaaacctggtggcggtcgttgatttagaacagaaaaaaatcgttaagattgaagaaggtccggtagttccggtgccaatgaccgcacgcccatttgatggccgtgaccgcgttgctccggcagttaagcctatgcaaatcattgagcctgaaggtaaaaattacaccattactggcgatatgattcactggcggaactgggattttcacctcagcatgaactcgcgcgtcggacctatgatctccaccgtgacttataacgacaatggcaccaaacgcaaagtcatgtacgaaggttctctcggcggcatgattgtgccttacggtgatcctgatattggctggtactttaaagcgtatctggactctggtgactacggtatgggcacgctaacctcaccaattgctcgtggtaaagatgccccgtctaacgcagtgctccttaatgaaaccatcgccgactacactggcgtgccgatggagatccctcgcgctatcgcggtatttgaacgttatgccgggcctgagtataagcatcaggaaatgggccagcccaacgtcagtaccgaacgccgggagttagtggtgcgctggatcagtacagtgggtaactatgactacatttttgactggatcttccatgaaaacggcactattggcattgatgccggtgctacgggcatcgaagcggtgaaaggtgttaaagcgaaaaccatgcacgatgagacggcgaaagatgacacgcgctacggcacgcttatcgatcacaatatcgtgggtactacacaccaacatatttataatttccgcctcgatctggatgtagatggcgagaataacagcctggtggcgatggacccagtggtaaaaccgaatactgccggtggcccacgcaccagtaccatgcaagttaatcagtacaacatcggcaatgaacaggatgccgcgcagaagtttgatccgggcacgattcgtctgttgagtaacctgaacaaagagaatcgcatgggcaatccagtttcctatcaaattattccttatgcaggtggtactcacccggtagcaaaaggtgcccagttcgcgccggacgagtggatctatcatcgtttaagctttatggacaagcagctctgggtaacgcgttatcaccctggcgagcgtttcccggaaggcaaatatccgaaccgttccactcatgacaccggtcttggacaatacagtaaggataacgagtcgctggacaacaccgacgctgttatctggatgaccaccggcaccacacatgtggcccgcgccgaagagtggccgattatgccgaccgaatgggtacatactctgcttaaaccatggaacttctttgacgaaacgccaacgctaggggcgctgaagaaagataagtgattgtttcagacaaaaaaacggcaccaggtgccgttttttacttatgagcgaaccagattaataccgtacacacaccgacttagtttcacaccaaccgtccagccagtcggggccaaaatcacggcccgttcctgactgcttcatcccaccaaacggtaagttagcgtcaattaaggtatggctgtttacccacaccgtacctgcctgtaagcgatcgctatattccagagcctgggagagattttgcgtccagacactggcagttaagccatattccgtgtcgtttgccagttgtaacgcctcttctccatccgctactcgcaccaggtttaccaccggaccaaacacctcttcacgagttaaacgcaatttagcatcgggatttaccaccagcgttggcgcaacataatacccctctccggctggtccattcgacccgcgaatcagctctgcttgctgtgcctgcgcatcgtcgaggaatgaacacactttgtcgcagtgcgcacgagaaaccacagggttaatctgtgcaacaggtgacatccccggtcccacttgcaacgattttaccgcctgctcaaatccactaaccagcgtgtcaaacaacggcgcttcaatataaattcgcgaactggcggcgcatacttgcccttgattcaggaagcttccggtcatcaagccttcaataacccattgcggatcagcatcttttaatacaattgccgggtttttaccgcccagttccagcgttacacgcgttaagtgatcagcagcagttctggcaataccttttcccgtcgcggttgaaccggtaaaactgattttcgcaacatgaggatgtgacgtcagggccgcgccgcatacagcacctgacccggtgaccacattaaaaacgccatcagggataccagcctcgctggccagttccgccacgcgcaacatcgtcagtggcgtggtttccgaaggcttaatcacgattgaacagcctgctgccagtgctggcatcaccttccacataccaatcatcaacggaaagttccatggcacaattcccgccactacgccaaccggctctttacgcgtccaggcctgataacgcgccccctggggtaagggaatcgacaagtccagcgttttacccgcgattttggtcgttaacccggcggtataacgcatccagttcagcgtacagcccacttcaaaagcacgggaaatggcaattgacttgccttgctccagggtttccagttgcgccagctcctcactgtgctgttccaccagatcggcaaaacgtagcagaatacgttcacgctctgcgggtaatcgcccggcccagcgacgcgagacaaaggcccgccaggcagacatgactgcgttatctacatccgcttcgttggcatcagcagtagacgcaatttcttgcccggtggccggatcaaagatcgccaaccgtttttcactttgtgcggggcctggacgaccatcaatataaagaccgtgttgacgatcgagaaactgttggacctggcttaatactgctacatgcggctctgtcatcacttttccttattatttacccagtgtgatttcagtgtacgcagcgacaagaaaagtcacttttttcgctgtgacattcgctttgtcagctgtgacaagctccgcaaatcgtgacaataaccgcttatgtctctatgcctgagaagacttatttcctatagtcaggctcattagcttcgtttactgcaacacaaatgcaacaataaaaatacatttcacagagcgaaaacgtgccatgaaccccgcagtggataatgagtttcagcaatggctttcccaaatcaatcaggtatgcggaaattttaccggacgcctgctgactgagcgttacacgggtgtactggacacgcattttgccaaaggactaaagctgagtaccgtgacaaccagcggggtgaatttatcccgcacctggcaggaagtaaaaggcagcgacgatgcctggttttacaccgtttttcagcttagtggtcaggcaataatggagcaggatgagcgtcaggtgcagattggcgctggcgatattacgttactcgatgcctcacgcccctgttcgctttactggcaggagtcttctaaacagatttcattacttttgccacgcactctgctggaacaatattttccccatcaaaaacctgtctgcgcagaaagactggacgctgacttacccatggtgcaactcagtcatcgcctgttacaggagagcatgaataatccggcactttctgaaacagaaagtgaagctgcgctacaggcgatggtgtgtctgctgcgcccggtacttcatcagcgggaatctgttcaacctcgtcgtgaacgtcagtttcaaaaagtggttacgttgatagacgataatattcgcgaagagatattacgcccggagtggatagccggagagacaggtatgtcagtacgtagtttgtaccgaatgtttgccgataaaggtttggtagtcgcgcaatatattcgtaaccgtcgtctcgatttttgtgcagatgcgattcgccatgccgcagatgatgaaaaactggcaggcatcggctttcattggggattttctgaccagagtcatttttcaacggtatttaagcaacgctttgggatgacgccaggcgctgatgaatcccctaatgattttggtaaaaatcattaagttaaggtggatacacatcttgtcatatgatcaaatggtttcgcgaaaaatcaataatcagacaacaagatgtgcgaactcgatatttt

SEQ ID NO: 52 - DNA, 49143 bp, Escherichia coli
  source 1..49143: mol_type = genomic DNA
ggtgcttttgccgttacgcaccaccccgtcagtagctgaacaggagggacagctgatagaaacagaagccactggagcacctcaaaaacaccatcatacactaaatcagtaagttggcagcatcaccgttttgagcacagtatcgcaaacatgtttatgatcccgatgggtattgtaatccgcgacttcgcatctccggaattctggaccgctgtcggttctgcaccggaaaatttttctcacctgaccgtgatgaacttcatcactgataacctgattccggttacgatcggtaatattatcggcggtggtttgttggttgggttgacatactgggtcatttacctgcgtgaaaacgatcaccattaatggttgtcgaagtacgcagtaaataaaaaatccacttaagaaggtaggtgttacatgtccgagcttaatgaaaagttagccacagcctgggaaggttttaccaaaggtgactggcagaatgaagtaaacgtccgtgacttcattcagaaaaactacactccgtacgagggtgacgagtccttcctggctggcgctactgaagcgaccaccaccctgtgggacaaagtaatggaaggcgttaaactggaaaaccgcactcacgcgccagttgactttgacaccgctgttgcttccaccatcacctctcacgacgctggctacatcaacaaagcgttggaaaaagttgttggtctacagactgaagctccgctgaaacgtgctcttatcccgttcggtggtatcaaaatgatcgagggttcctgcaaagcgtacaaccgcgaactggacccgatgatcaaaaaaatcttcactgaataccgtaaaactcacaaccagggcgtgttcgacgtttacactccggacatcctgcgttgccgtaaatccggtgttctgaccggtctgccagatgcttatggccgtggccgtatcatcggtgactaccgtcgcgttgcgctgtacggtatcgactacctgatgaaagacaaatacgctcagttcacctctctgcaggctgatctggaaaacggcgtaaacctggaacagactatccgtctgcgcgaagaaatcgctgaacagcaccgcgctctgggtcagatgaaagaaatggctgcgaaatacggctacgacatctctggtccggctaccaacgctcaggaagctatccagtggacttacttcggctacctggctgctgttaagtctcagaacggtgctgcaatgtccttcggtcgtacctccaccttcctggatgtgtacatcgaacgtgacctgaaagctggcaagatcaccgaacaagaagcgcaggaaatggttgaccacctggtcatgaaactgcgtatggttcgcttcctgcgtactccggaatacgatgaactgttctctggcgacccgatctgggcaaccgaatctatcggtggtatgggcctcgacggtcgtaccctggttaccaaaaacagcttccgtttcctgaacaccctgtacaccatgggtccgtctccggaaccgaacatgaccattctgtggtctgaaaaactgccgctgaacttcaagaaattcgccgctaaagtgtccatcgacacctcttctctgcagtatgagaacgatgacctgatgcgtccggacttcaacaacgatgactacgctattgcttgctgcgtaagcccgatgatcgttggtaaacaaatgcagttcttcggtgcgcgtgcaaacctggcgaaaaccatgctgtacgcaatcaacggcggcgttgacgaaaaactgaaaatgcaggttggtccgaagtctgaaccgatcaaaggcgatgtcctgaactatgatgaagtgatggagcgcatggatcacttcatggactggctggctaaacagtacatcactgcactgaacatcatccactacatgcacgacaagtacagctacgaagcctctctgatggcgctgcacgaccgtgacgttatccgcaccatggcgtgtggtatcgctggtctgtccgttgctgctgactccctgtctgcaatcaaatatgcgaaagttaaaccgattcgtgacgaagacggtctggctatcgacttcgaaatcgaaggcgaatacccgcagtttggtaacaatgatccgcgtgtagatgacctggctgttgacctggtagaacgtttcatgaagaaaattcagaaactgcacacctaccgtgacgctatcccgactcagtctgttctgaccatcacttctaacgttgtgtatggtaagaaaactggtaacaccccagacggtcgtcgtgctggcgcgccgttcggaccgggtgctaacccgatgcacggtcgtgaccagaaaggtgctgtagcgtctctgacttccgttgctaaactaccgtttgcttacgctaaagatggtatctcctacaccttctctatcgttccgaacgcactgggtaaagacgacgaagttcgtaagaccaacctggctggtctgatggatggttacttccaccacgaagcatccatcgaaggtggtcagcacctgaacgttaacgtgatgaaccgtgaaatgctgctcgacgcgatggaaaacccggaaaaatatccgcagctgaccatccgtgtatctggctacgcagtacgtttcaactcgctgactaaagaacagcagcaggacgttattactcgtaccttcactcaatctatgtaattagatttgactgaaatcgtacagtaaaaagcgtacaataaaggctccacgaaagtggggccttttttagcacgagagccttttttgtcagctatctatactttaaggtgactgccaaaacagactcgacgtagccttcgagctgcgcaccaacacggcctcagatgggccacatctggagaaacaccgcaatgtcagttattggtcgcattcactcctttgaatcctgtggaaccgtagacggcccaggtattcgctttatcacctttttccagggctgcctgatgcgctgcctgtattgtcataaccgcgacacctgggatacgcatggcggtaaagaagttaccgttgaagatttaatgaaagaggtggtgacctatcgccactttatgaacgcttccggcggcggcgttaccgcatccggcggtgaggcaatcctacaagctgagtttgttcgtgactggttccgcgcctgcaaaaaagaaggcattcatacctgtctggacaccaacggttttgttcgtcgttacgatccggtgattgatgaactgctggaagtaaccgacctggtaatgctcgatctcaaacagatgaacgacgagatccaccaaaatctggttggagtttccaaccaccgcacgctggagttcgccaaatatctggcgaacaaaaatgtgaaggtgtggatccgctacgttgttgtcccaggctggtctgacgatgacgattcagcgcatcgcctcggtgaatttacccgtgatatgggcaacgttgagaaaatcgaactcctcccctaccacgagctgggcaaacacaaatgggtggcaatgggtgaagagtacaaactcgacggtgttaaaccacctaagaaagagaccatggaacgcgtgaaaggcattcttgagcagtacggtcataaggtaatgttctaatttccccgtaaagcggcaactttattgagttgccgcttttttattccgcgcttcattctgctacagcgtttttaacacatcttatagtgcatctaccatatcccgtacctgagataataacgactgataatagctcgcgtgaagttcttccccatcgaataccactgtattacacaagaaagtgacatcggcatcttcaataccaagataactgcacatattttttaaataatcgcttatatttttttcccagcccatctggacaaatgattctttgtctcctccaaccagcgccacccaacgaactttattgaatggtaatttgtgcccatctccataagccagcccattattccatactctgtcaatatatccttttagcattgccgggaagctgtaccaccagagaggaaaaaccaccactaacgtgtcatgctcaagcagctctgaataaagctgatgaacctctggagaataacgtttatccatattcttccagtctggttcatcttccgacgtcatcaccgggttgaaattacgccgatataaatcgagttccgtcacctgtattttccgctccattgcccgctgatggatcgcatcagcaatatgtgcggtcaatgaatcatgacgaggatgggcccataccaaataaatacgttcagactgcataattttacctccacgttaagttctggagcgcactttacgcaggcggcataatcctgtaaacgtgatgattcaggatgagttaatgaaggattttcactaatgcggatgaatatgtctgactttgccactttctttgccgtggcccgtaatcaaagctttcgtgcagcgggcgatgaattaggcttatcctcgtccgccattagccatagtattaaaacactggaacaacgtcttaaaattcgcttattcaatcggacaacccgaagcgtatcgttaacggaagcgggttctaatctctatgaacgattgcgcccagctttcgacgaaattcagatcatgttagatgagatgaatgattttcgtctgacaccgacaggaacgctcaaaatcaatgccgcccgggtagctgcacgtatatttttaatgcctttactggttggtttcacacgtgaatatcctgatattaaagtcgagctcacaactgacgattctcttgtcgatatcgtccaacagggctttgacgctggcgttcgacttagtggcatcgtcgaaaaagatatgatcagcgtggcgatcggcccaccagtgaaattatgtgtagcagcaacgccagagtactttgcaagatatggcaaaccccgccatcctcatgatctgcttaatcatcaatgtgttgtttttcgttatcccagcggcaaacctttccactggcaatttgcaaaggagctggaaattgctgtcgcaggaaatatcattctggatgatgttgatgctgaactggaggccgttttgatgggtgctggtatcgggtatctgctctatgaacagatcaaggagtaccttgatactggtcgtttagaatgtgtactgggagactggagcacagagcgtccaggcttccagatctattatccaaaccgccagtatatgtcctgcggcttgcgcgcatttctcgattatgtaaaaacgggtcagatctgccagagtcagcgtcaccgaccacaataattatttactattcgctttacgcgccagcagcgggaaaatcagtcctaatcctaccagcacaaacggcgttgcaacattcagcgccaactggaaggtccactctgcagtgaaggcttccattttcgggaagatccccgtcaaacaggcaaaggcggtaaaggcaaaacaccaaatcccgacggtcattgccagaggcttattacgaataaagacatattctggtttatatttctgcgccaggcgaacgactgcaataaatgcaacaaatacccataaataacgcagcggcatcactaccgagttaagattcaacagccatttatagagattgttcatatcaccgatgccgagagtcggcagcataatcagaattgccaccagcaccagggtcagaaaatagccattaacgggcgtaccagaagcgttggtacgacataaactggctggaatatatttgctgtcagcatcacctaatagcactttaagcggggcatcaatcgagaataccagcgcagctacttgtcccagggtattcgcaatggcgtaaatcaccattaaagtattacccatgttgtaatactcgcccagcttctgaaaggcgtaatattgaccgttagtcattaagtcatccgggatattacgcgagtcaaacatcatccccatcgccagtgagcccagaatggcacaaaccgcaaccatcaccgccaggcatagcatcccttttggaaattcttttcctgggttgcgcgtttgattaacgtaaggagaaatcttctctgctccgccaaccgcgaaaaccagcattgaaatagtggtaatgtaggtaaagtcgatatgaggaatgaacgtttcccaggtaatgtttgtggtcgcaatatgcacttcagtaatcgcaggcgcggttaccgccattgccacatacaggagcgacataacaaacatcgcaatccctgccacagaaccgacgattttcagcgatttcataccgcgtgaagcaacccacataaagaagataaacagcaccagcgttaacccctgtaacgctacgactgaatattctttgattagcgaaccgtcgcctttcatcgcccaaccgagcgcaatcagaattgcctggggtttttgtgccagatagggaatatgcaccacccagtaggtccacgcggcgagataagccagtccgggtcccatcgtgtgtttaatccaggtactgaccccgcccttcccatctttgaaggtcgatcctaactgaccaacaattagcgcataaggtgtgaaatagagtgcaaagataaacacccatgaaaaaacaaccaccagcccctggttggcatagttattaacaacgttgccaaaaccccagacagtgataaaagacatcagcgcaatgttgtaccatcgcaactgtttttcctgaacattcccagccatagacaaatccttcgccaaaattaaaggggcatctgtaaaacgagggattatgcgcggcaaataagaagtgcggaaatagcgaaatgcaaaattataacctgctgcacattttatttttaaacgaataaaatttggaataaagcaagtcagatagaagaaacaaaaaagcagagtgtgaaacagtaagttcacactctgcttgaattcatttacacgtgagcaacgggtttcggcgtatgaccggcgttgcgcagcagcatcagcaaatagataaacgatacgctggcgatcatgataaacaataaattatcggagaaattctgcattagcatagcggtaaatgacgggccaagcagacttcccacagtatagctcaacagtaaggcctggttcatcgccaccagttgatgatgttcaactttctcgcaagcccatgccatcgccaccggatatagcgtaaagccagcggcaccgaggatgaataacgctggggccatcgccgcctggctaagcatcgcgatactgccgagaatgacgacaaagacctgaacacgcaacaccagcagtcgaccaaacttatccgccagacgtccaatcggccattgtccaaggatacccgcactgaccagtaccgccatccagaaaccaatgctggcattgctcacccctttgtgattgaggtacagcggcatcaggccatatagagatcccagaacgattcctgagataatgcagccattcacgccaagccgcgcctgacggagttttagcattgacgtaattgacgtcgaatcatggttttcagcctgctgattcagcacacgcgtaaacaacagcggtaagatccctgccaacgtcaaacctgtaacccacggcaatacggacatcagctcggttgaaactttgctgaccagtaactggcctaaaaacgttcccacgtaataaaccatcatatacgcagcaagcaaacgcccacggttacgtgacgtcccactgcacatcagcgcgctctcaacaaccacccaaatcatggcacagccgacgcccgcgacaaaacgccaagccaaccagctccagaatccaatcatcaggccaaggccggcacagccagcggcaaaaatgaaggaggccagataatagctgcggttaaagccaatgcgcttaatgacataccctgtcagcaatgtaccgacaaggttgccggtaaaataggatgagctgacaacgcctacctgccatgtggacatgtgttcctgggcgagccaaagcggcacgagtgtatttaacaccgcgatcgccagagtcaacaaaagcaggccagacagcaaaagcatgacaggccgggtatacgtggacatgaattaaaaccgtgaggaagttcaaatttcatgcgcatcatgccaccgccaaaaacattgtcaatgggtgaaaatacgcgcatatcgcagcggcggtattatcgatttatattactcattcataacgctaatgctgaagagatgattaatctcatctgattgtttttattgatctaacacaaatttcatacgcttcgttcagtcgaaaaatttcatggtcacagcaaactcatatttcccgtctatgctttcagagcaatgcatcacgtctgaccgatttcagacgtaccactgactctcgaaaggagaagaggatgaccaaaccgtatgttcgtcttgataaaaatgatgctgccgttttgcttgttgatcatcaggctggtttactttcccttgtacgggatatcgaacccgataagtttaaaaataacgtgctggcgctgggtgacctggctaagtatttcaacttacctactattcttaccaccagttttgaaaccggtcctaacggtccattagttccagaactgaaagcacaattccccgatgcaccttacattgctcgcccgggaaatattaacgcctgggataacgaagattttgtaaaagcagtcaaagcgacaggtaaaaaacagttaattattgccggtgtggtaaccgaagtttgcgtggcattcccggcgctttcagccattgaagaagggtttgacgtctttgtcgtgactgacgcgtcagggacctttaatgaaattacccggcattcggcatgggatcgcatgtcgcaagcaggtgcgcaattgatgacatggttcggcgtggcgtgcgagctgcaccgtgactggcgtaatgatattgaaggactggcgacgttgttctctaaccatattcctgattatcgtaatttgatgaccagttatgacacgttaacgaagcagaaataaaagagaaccggggccgaaaccccggttgttactgattagcttgcgacggccatccccacggtcatatgcaaaccatagaatacgccgcgaccgattaattcccctgccagaagcagaatgaatgagacggatagtagcggaaccgcaggctgataaccttttagctgtggtgcaatccacaagcacagggcaacggccaaaagcacgatccgccaggacatcagcgcaccatagtccggcaccagcgctgcggcctgctgcacagaactatgaatagttgccagctctgtgccctgcatcactgacatcacgccactcaccaccagtgccagtacagaaatggctggcagcagacgcatcgcccagccatcgacgccagccagactcaacaacaggtaacccagtaacgggccgcccataaacatcgtcaggaagaagcccatcggcgtccagatgctgtaccaggtcggaacggtatcaatgctgttatacacacgcaccatcatccagacaaagatgacgccaagaaccatcgtcactatcagccacagcgtacgcaatgccggtgacagctttttcagcattgccagcaaccagccgatgccgcctacggcaaaaaagatcgaaccgctggcgatttcgttactgagtgctgaagcccctacccggttgagcgagttaaaagcgcgcattggtgaaccaagatggagcatagaggcgataaagccaatgcccatcagcacccataaaccaaacatgcaggcgataacacgctgctgggcttctgctcgcaggtcgcctttgagcagcgccaaagccagaacgataaaaccacctgctacacattgcccgaagaccgtgaagatcatcagcggccattcatgccatccacttcccatctcacacctccttcgggtttgccagatagccagtggtatccccggtcgggcggctattggcattgggtttgatcacaatattcggtttggtaaagtgagctcgcggcaacggcgcaacggccgccagatcgccatgttttttacgcagctcgtcgatagggccgaaatccagcgcccgcagcggacaagattcaacacagatcggctttttaccctccgcaacacggtcataacaaccatcgcatttggtcatatggcctttcgtttcgttatattgcggtgcgccatacgggcaagccatatggcagtagcggcagccaatgcacacatcttcatcgaccacaacaaaaccatcttcacgtttatgcatcgcaccgctcgggcagactttagtacaagccggatcttcgcagtggttacatgaaatcgacagatagtaggcaaacacgttctggtgccagacaccgttatcttcctgccagtcgccgccagcatattcataaatgcggcggaagctgacttctggcgtcaaatctttgtagtctttacaggccagctcgcaggttttgcaaccggtgcaacggctggaatcaataaaaaatccatactgggttgtcatcggttactccttacaccttttcaacctgaacaaggtttgtatgtgacggattccccttagcgagaggagacggacgttgagtggtcagtacgttgatacaaccgcccttatcgacacgttttgtatccgggtcataccaggcaccttcacccagtgcgaccacacccggcatcattcgtggcgtcactttcgcctcaatatgaacctcaccacgatcgttaaagatcctgactttatcgccgttgttaataccgcgtttttgcgcatcaagcgggttgatccacatttcctgacggcaagctgctttcagcacatcaacgttgccgtaagttgagtgaacgcgagatttatagtggaaacccgtaagctgcagcggatactgtttgttcagcggatcctgataactttcaaagcccggcgtgtagatcggcagtggatcgatcacatcgccttctggcaattcccaggtagcggcaatgtcagccagcgcctgcgaataaatctcaattttgcccgatggcgtagtcagtgggtttgcctgcggatcttcacggaaggctttataagcaacgtgatgcccttgtgggtcgcgctttttaaagatcccctgcttgcggaactcttcaaacgttggcagttcaggaatcgcttcccgcgactgggcatacagatgccgcatccactcttcctgggtacggccttcagtaaactgttgctcaacgccaagacgttttgccagttcgctggtcatttcatagatggtcttacattcaaagcgcggtttaatcacctgatcgttgaaaatcacgtaagacatattcccgcaggatgcatccagtgcaaagtccatctgttcggaagcggtgcagtcaggcagcaggatgtcagcatatttcgccgatgaggtcatgtggcagtcgataaccacaatcagctcgcacttcttatcatcctgaaggatttcatgggtacggttgatttcagaatgctggttaatcaggcagttaccggcatagttccagatcattttgatcggcacatccagcttatctttcccgcgtacaccatcacgcagcgccgtcatttccgggccacgttcaatggcatcggtccacataaacatcgaaatgctggtctggatcgggttttccaaggtcggcatacggacaaacggtaagctgtatgaaccttcacgcgcgccgctgttgcctccgttaataccaacgttaccggtcagaatcgccagcatcgagatagcacgggttgcgatttcaccgttagcgtgacgctgcgggccccatccctggctgataaacgccggtttggtactgccgatttcacgagccagtttgatgattttgtctgccggaacaccggtgatttgtgaggcccattccggtgttttagccacgccatctggcccttcacccagaatataagctttatagtggccatttttcggcgcactggctggcagggttttctcatcgtagccaacgcaatatttatcgaggaatgcctgatccaccaggttttcagtgatcatgacgtacgccagaccgttaaccagtgcggcatctgttcccggacgaatagggatccactcatcttcgcgcccggcaccggtgtcggtatagcgcggatcaatgatgatcatgcgggcattagatttctggcgtgcctgttcaagatagtaagtcaccccaccgccactcattcgcgtttcgccagggttattaccaaacagcactaccagcttactgttttcgatatccgacgggctgttgccatctgcccagccgccgtaggtatagttcaaaccttccgcaatttgcgcggaggagtagtcgccgtaatggttcagatagccgccgcagcagttcatcagccgcgcgaccagggtatttcccggcggccaggagcgggtcatggtgccgcccagcgtaccggtgccatagttcagatagatagactcgttgccgtactctttgatcaggcgctgcatattggtcgcgatgatgtcgtaggcttcttcccagctaatgcgctcgaatttgccttcaccgcgcgccccgactcgtttcatcggatatttcaggcggtccggattgtagacacggcgacgcatggaacgcccacgcaggcaggcgcgaacctggtgcaggccgtcgtaattgtcatcgccggtattgtccgtttcgacatatttgatttcaccgtccacgacgtgcatacgtagcgggcagcgactaccacagttaactgtacaggcgctccagataaccttttcgtctgattttgttggaatggcgctatcgacagcgtgcgcaatccgactaaaaggtaatgttaatgcgctgctggccattgccaggccgccgatcgctgtcgtttttaccaaaccacggcgactcacctcagcagccaataccgcatcagggattttcgttttcataatggctcactcaagcttgctcacgattgattccagtaacaaaccgtattgtgtaattatttctatagcagctcgctatataggcttgtatacatcgaataatttgaaaatcaaagagataggtagattttcactcgaaagtagtattacgtgtaagtgaggagtaattattgttcggtatcaaagggagacaaaaaaagcgcccgcaggcgctttttagattcagaaaaattgggtattagccaatatattccagtccgttcatatacggacgcagaacttctggtacttcaatacgaccatcagcctgctgatagttttccattactgcaaccagcgtacgaccaacagccagtccagaaccgttcagggtatgaaccagacgggttttcttgtccgacttgctgcggcagcgtgcctgcatacgacgcgcctggaaatcccaaacgttggagcaggaagagatctcacggtaggtgttctgtgccgggatccatacttccaggtcgtaagttttgcaagcgccaaagcccatgtcgccagtgcaaaggatgattttacggtacggcaggcccaacaactgcaggactttttctgcatgaccagtcatctcttccagcgccgccattgagtcttccgggcgcacgatctgcaccatttcaactttgtcgaactggtgcatacggatcagaccacgggtgtcacgaccatatgaaccggcttcagaacggaagcatggggtgtgggcggtcatcttaattggcagatcatcttcatcgatgatttcaccgcgcaccaggttagtcagcggaacttctgccgttgggatcagcgcatagttactggtgtctgcttcttcttccagcggacgagtatgaaacagatcgccagcaaatttcggcagctgacccgtaccgtacagcgtgtcctggttaaccaggtacggaacatagttctcactgtagccatgctgttcggtatgcagatccagcataaactgcgacagtgcgcggtgcatgcgagcaatctgccctttcattaccacaaagcgggaaccagtcagcttaactgcagctgcaaagtcgaggccagagtgcatttcacccagcgtcacatggtcacgaacttcaaagtcaaactcacgcggggtgccccagcggctgacttcgacgttgtcattttcgtctttacctaccggcacttcatctgcaggcaggttagggatggtcagcgcgatatcgcgaatttcagcctgtaaagcatccagctcggcttttgctgcatccagctcttcgcccagtttgttcacttccagacgtaaaggctcgatatcttccccgcgcgctttcgcctggccaatggatttcgatcgggagttacgctccgcttgcaggttttccgttttgacctgcaatactttacgacgctcttcaagagcgcccagcttatctacatccagcttaaagccccggcgtgccagtttttcagcgactgcgtctggctcattacgcagcagattgggatcgagcatgcttatcctgtgcttatcgaattaaatgggagatgtggccacagcctgcgaccacagggatacagtaacaacattaccgcaacgataacattaacggtagcgttttatggggctattttgatcctgttcagccagccaggcgagcttttcgccaatcttgccttcaaggcccctgtttgtcgggaaataatagcgtgtttgtgctatttccggcgggaagtaaacctcaccggcagcataagcgtttgcttcatcatgagcgtaacgatattcctgcccgtagcccatttccttcattaatttcgtcggcgcattacgcaaatgaaccggcacgtcataatccggacgttcgcgagcatccgccagcgcagctttaaacgcagtgtagacagcgttgctttttggcgcgcaggccaggtaaacaatcgcctgagcaatggcgcgttcaccttccgccgggccaacgcgagtaaagcaatcccaggccgcaattgccacctgcatcgcccgtgggtcggcattgccgacatcttcggaagcaattgccaggcaacgacgcgcgacatataacggatcgccaccagcggtaataattcgcgcataccagtagagcgccgcatcgggtgcgctaccacgtaccgacttatgcagtgcggaaatgagatcgtaaaagcgatcgcctttgttatcaaagcgggcgcttcgctcaccggcgatttcggtcaataattcaggcttcaggacccgcttaccgctatcattgacttcggccatatccgccatcatttccagcgtatttaacgcccggcgcgcgtcgccattcaccagttcagcaatggcgcgtcgtgtttcatctggcagaacaatatcctgaccaccataaccacgggtcttgtcttccatcgcctgagttagtacttgctcaatatcctctgtacccagggatttcaacagatagacacgggcacgggaaagcagtgccgaattaagctcaaacgacgggttttcagtggttgcgccaataaaagtgatggtgccgtcttcaatatgtggcagaaatgcatcctgctggcttttgttgaatcggtgcacttcgtcaacaaaaagaatagtgcggcgacctgcattgcggttttgccgggcgcgctcgatcgcctcgcgaatctctttcacgccagaggtgacggcagaaatacgttccacatcagcgttcgcatagcgggcaatcacttcagcgagggttgttttgccggtacccggtggcccccagaggatcatagaatgtaaatgcccggcttcgatagcgcgcggcaacggcttccccgcagccagcaaatgttgctggccgatatactgtgctaaattttctggccgcatacgcgcggccagaggttgaaaagtattatccgaaaaatcgagcgacagattgctcactcaggtgcctctacttacgttgatcatctaccgtgacgccttgcggcggggtgaaggtaaatttcgctgcatccacagccccattttgctgggatttcagttgataactgctgcgctgatcgtcctgctccaccgcgctaaactgatggattgtgccatcacgtcccacgttaatggtgaactgcttcagattgccattgctggctttcggcgtcaggacaaagtcatcgccattctgtttgatattgtactgctgccagtcgctggactggttgcgggcaatcagcataaacggcgtattaccggtggcatctttcagccaggttgccgtagcttgctcaacgaacggattatagaaccacagtgttttaccgtcagaaaccagaatgctttcatcaggttgtgtcatatgccagttgaataagtttggacgtttcacccacagatcgccctgaccttcctgcaccgccgcgccgctaccgtcagtcactttttgtgtgaagctggcgtggaagctgctgactttatccaggcggcttttcagatcgcttgcggcatcagcccaaacgctgcttgctactaagcttgagagtaatgcacaggtgatggcaatttttttcatcattattcctcaaattacgtcactcccgatcgggagttccctctactctctattccaggctaataatcagcttgaggaaagaagaaaatactgaattttcagttgatagagtgccggatgcgacgctaccgcgccttatccggcaatgcattaattagtcaaacggcggtggggccagcacttcacgattaccgttgtgcccctgttcgctcacaatcccctgcgcttccatctgttcgataatacgcgctgcacggttataaccaatgcggaactgacgctgcacgccagaaattgacgctttgcgtttttcagtgacaaactgcaccgcctgatcgaacaacggatccagttcttcagcgccatcgaaaccgcccgcgccaccttcgctttcgctgtcggaggtgatgccatcaacatactgtgggcgaccacgcgctttccagtcctgcaccacggcatgaacttcctgatcgcgaacaaaagcaccatggacacgtaccggcaacgtggagttcggcccagagtagagcatatcccccatacccagcagtgattccgcgccagcctgatcaagaatggtacgtgagtcaatcttactggatacggtaaaggcgatacgggtcggaatattcgctttaatcagaccagtaataacatcaaccgatggacgctgagttgccagtacgaggtggatacccgcggcacgggctttttgcgccagacgtgctatcagctcttccacttttttacctaccgtcatcatcaggtcggcaaattcatccaccaacaccacaatgtatggttcttttttcagcaccggatgctgggcatccatactgtcacccggcttccagtacgggtctggaatcggacgcatcatgcgatcggcttcagcaattttttcgttataacccgccagattacgaacacccagcgcagacatcagtttataacgacgctccatctcgttaacacaccagcgcagcgcgttggcggcatctttcatatcagtaacgacttccgttaacaggtgcggaatgccttcatacaccgaaagctccagcattttcgggtcgatcatgatgaaacgcacatcttctggctgtgctttataaagcatgctcaggatcatcgcgttcacaccgacagatttaccggaaccggtagtccccgcaaccaacaagtgcggcattttcgccagatcggcaaccaccggctcaccggcgatatctttacccagcaccacggttaatggcgacggattatcgcggaatttggcgttatccaaaacttcgcgcagataaacggtttgtcgttttttatttggtaactccagacctacatagggtttgccaggaataacttcaacgacacgcaccgccaccgtcgaaagtgaacgggcaaggtcccgtgacaagttagaaatgcgcgccgcttttacgccaggagccaggttaagttcaaagcgagtgataaccggccccggagagtaattgacgacatcggctttaatacggaaatcagccagacgcgcttccaccagacgagccatttgttcaagcgcaaaggtatctaccggctccacttcgctcggcggcggtgtcagcaaatccagagaaggcagcggcgtcgtcggtttatgcaacggacggctgtcgccattacgcatcaacagcggatgaagcagggtatcctgctgccgcggtgcaaccggttgttgcggctgctgatactgctgctgcggcgcaactggttgttgcggctgctgatattgcggctgtggcgcaaccggttgttgcggctgctgatattgtggctgcggcgcaacctgctgttgtggctgctgatactgctgctgcggtgcaaccggttgttgcggctgctgatattgctgctgtggcggaactggttgttgcggctgctgatactgctgctgcggtgcaaccggttgttgcggctgctgtacaggttcaacaattggcgtaaacaacggttcgtgtggaccatcatccagcaacgctttcattggcgaaaattcaaaatcatccagcgagaacggattcgccccagccggttgttcgccggaataacgttgttgttgagtttgcgcaaactgacgagccagttcagcctctgccgcagcatctgcatcttctgcgtttacgggcacatcatgttgatactgttcgccatagcgttgctgctgtgtctgggcgaactgacgtgccagttcatcctgctgcatcgcatcgatttcatcatcgttatactgatcgccagaatcatactgattgcgctgggcttcacgggctttctcttccgccgcacgctgtgagggcagcttaataccgtaagacgccagttcacgacgagttggcacgcggatacgtttcggtcgtggcaactgcgggccaatcccctctttgacttgcggacgcggtccaccgctatttgccagactgaagactggcgcggcaacggttgcggcagcccccgtcgccagtgtcgcttttttcacgccagatgccagcggagaaacagcggcagcggcttctactggaggtactgctgcaacagaaggcgctttcaacgaagatttgatcggttctggttctttaaccggttctggaatcggttgataccaggccgcaagttgttcacgttcacgggctcgcttctcttccacttcttcaaaatagtaaagcggcggacgcgcgggttttgtctcttctacaacgggttcaggctccacaacaggctgctgttcaacaggttgcggctgttggtacaacggctcctgagcggctggttgctgataagtttgctcagtctggtatgtagactgtggagcaaaagtggattgctgctcttcggcttgccaggcgttacctgccaccggttgttctggcgcaggggcgtaatacggttgctgaacaggttgttccgccgcaggagcgtagtaaggttgttgcgcaggttgttcagctgcaggtgcataatacggctgctgcggctgtactggttgttgcagcggctcattatattgcactgcaggctgtgcatattgtgactgctgtgggtaaccttccggtgcaggagcaataaccggctctcccgtttgtggacccggtacaggctgccaggctactgtaggttgcgaaggtggaacatcaacagaggcaacaggcggcgtctgagtcacaggttcaaccggcgcagcccagctttgtgtcgccgtggtagcagcagctgctacagcgacaggttcggtaattggcgcaccgtttaataatggatcgtattcgtcatattctggctgcgttgcacgattgcccgaaaataggacgtcgtccgggtcggcagccacaccgcgtgcagtgtagataatctcttcgtcatcatccatccgcttaccggagaacaacgcagcgtctgtttgccgccccatcggattaatgaatttttccgccaaccgtttacgacgcgctagcgcgccgcgaagaatacgggcacggcgtgattcacgctgtttgccgtggttttcatcttcatactcttcgtcatcttcatattcatcttcatcgacccaggtatcatcgcgacgggtacgattactggcgaaggtgagaatgtttaaaatccagccgccgagtttttcagcaatggtcacccatgaccaaccggtgaacagcgtcaggcccgcagcccaaacgcagagcagcgcaatagttcccccgctactgtgtagcagtggttgtagcgtagtgcttagtaagctgccaatgacgccaccggaggcaaaataccagatatcgtcagcgttgattgccgccagaccacaggaggtaaggatgagcgccaaaacgccaatgatgcgtagcgaaacggcaaaataatcaatgtattcgtcactggactgatgacgccaggcaaaccaacaaccgccgacaataatgacgggaatggtgtaagccatcacgccaaaaataaagaacagcgtatctgccagccacgcaccgggcatcccacctaaattatggataggttcatgccaggccgtttgcgaccagctggggtccgaagggttaaagcttagtaaggcagccatcaaccagacggcaaacaggacaataaggatcagcaacgcttccagaaggcgacggccgctacttaactttgtcaatgtgacttctttgtcttcagtgtattcctggctcaagaaaggctctccaggttacaggcttttcctgcccgatgctaaaacggacaacagtaccaggttaccccagtactgttgctgtatggattaacaggagtgtaatcaaaatacgccgattttgcacctgttccgtgttagcgcgtcttaataaccagacgattactctgcttgacttcttccataacaacgtatgtccgtgtgtcattgacgccaggcagacgcagcagggtttcccccagcaacttacggtaagctgacatatccggcacgcgtgttttcaacaggtagtcgaaatcaccagatactaaatgacactcctgaatttcttcaagtttttgtacagcggtattgaattgttcaaacacatccggtgcgccacgattcagagtaatctcaacgaataccagaagtgatgcatccagataatgggggttaagcagcgccgtatagccctgaataaacccttgtctttccagccgacgcacacgctcaaggcacggcgttggggaaagtcccacacgtttagaaagctcgacgttagaaatacgcccatccttttgcaactcattaagaatgttacgatcgatacggtcgagatctttgccagggcgcttcttgctatctaccattattattgtctctctgtattccttccctactcctgtctgaccctgaaacatcactgttcagagtcgctacccgtcacgatagaccgaaatcatgaagattcacggcgcgcaatgcctgggtctacggtgagaagaccgttgccttgtggcagctatcgacatcacgaatggcgtctgtccacgccatacgtagatttcactagcacggtaaacatggtatttacatgcatggttatgcgcatataagaatactgttttttttcttcctcgaatgttttcgcaaaacaccaggggattgtcaaagcaaaacatcgatttttagtacaacatgccagatattcattaacaggggcgtttattcatcatttaatcggcttataaagcgggaaatttaagtagcagaggtgataatgacgggagaatttgacctgcttatcgatgctgccgattgcacaaattgttaacaaaatcgtcatactctttttttacgtctgtaaattccctacaatcctgcccattgtctgccaacaactatggggatctcatgggcacgaccaaacacagtaaactgcttatcctgggttcaggcccggcgggatacaccgctgctgtctacgcggcgcgcgccaacctgcaacctgtgctgattaccggcatggaaaaaggcggccaactgaccaccaccacggaagtggaaaactggcctggcgatccaaacgatctgaccggtccgttattaatggagcgcatgcacgaacatgccaccaagtttgaaactgagatcatttttgatcatatcaacaaggtggatctgcaaaaccgtccgttccgtctgaatggcgataacggcgaatacacttgcgacgcgctgattattgccaccggagcttctgcacgctatctcggcctgccctctgaagaagcctttaaaggccgtggggtttctgcttgtgcaacctgcgacggtttcttctatcgcaaccagaaagttgcggtcatcggcggcggcaataccgcggttgaagaggcgctgtatctgtctaacatcgcttcggaagtgcatctgattcaccgccgtgacggtttccgcgcggaaaaaatccttattaagcgtctgatggataaagtggagaacggcaacatcattctgcacaccaaccgtacgctggaagaagtgaccggcgatcaaatgggtgtcactggcgttcgtctgcgcgatacgcaaaacagcgataacatcgagtcactcgacgttgctggtctgtttgttgctatcggtcacagcccgaatactgccattttcgaagggcagctggaactggaaaacggctacatcaaagtgcagtcgggtattcatggtaatgccacccagaccagcatccctggcgtctttgccgcgggtgacgtgatggatcatatttatcgtcaggccattacttcggccggtacaggctgcatggcagcacttgatgcggaacgctacctcgatggtttagctgacgcaaaataattttacaaatcagtaacaaaagtaaagaaggcgacaccatgcgactatgggtcgcctttattttttccccgttgtaacattgctctgcaaataattctgataactcacctgctaagcgtgcaatgaataaatcccgtcaaaaagagttaacccgctggttaaaacagcaaagcgtcatctcccaacgttggctgaatatttctcgtctgctgggctttgtaagcggcatattgatcattgcccaagcctggttcatggcgcgaattctgcaacatatgattatggagaatattccccgtgaagccctgctgcttccctttacgttactggttctgacctttgtactgcgcgcatgggtggtctggttacgcgaacgggtgggttatcacgccgggcagcatatccgctttgccatccgccgtcaggttctcgaccgtctgcaacaagcagggccagcgtggattcagggtaaacctgcggggagctgggcgacgttggtactcgagcaaattgacgatatgcatgattactatgcacgctacctgccgcaaatggcgctggcagtgtcggtgccgttgctgattgtggtggcgatcttcccctctaactgggctgcggcgctcattctgctgggcacagcaccgttaattccgttgtttatggcgctggttgggatgggggctgccgatgctaaccggcgtaactttctcgctcttgctcgcttaagtgggcatttcctcgatcgcctgcgcggcatggaaacattgcgtatttttggtcgtggtgaagctgaaattgaaagtattcgttctgcttcggaagatttccgccaacggacaatggaagtgctacggctggcgtttttatcctccggcattctcgaattttttacctcgctgtcaattgctctggtggcggtctactttggtttttcctatctcggcgagctggattttggtcactacgataccggtgtgacgctggctgcgggttttctggccctgatccttgcgccagagtttttccagccattgcgcgatctcggtacgttttatcatgctaaagcccaggctgttggtgcagctgacagtctgaaaacgtttatggaaaccccgctcgcccatccgcagcgcggtgaggcggaattagcatcgaccgatccggtgaccattgaggccgaggatctgtttatcacgtcgccggaaggtaaaacgctggccggaccgctgaactttactttgccagcaggccaacgtgcagtgttggttggtcgcagcggttcaggtaaaagctcactgctgaacgcgctttctggttttctttcatatcagggatcattacgaatcaacgggatagaattacgcgatttatcaccagaatcatggcgtaaacatctctcctgggttgggcaaaacccacaattaccggcagcaacattgcgggataacgtactactggcgcgacctgatgccagcgaacaagaattacaagcagcgctggataacgcctgggtcagcgagtttctaccgctcctgccacaaggcgttgatacgcctgttggcgaccaggctgcccgcctttccgtggggcaggcgcagcgcgtggcggtggcccgtgcgttactaaatccctgttcgctattactgttggatgaacccgctgccagccttgatgctcacagtgaacagcgcgtaatggaggcgctgaatgccgcctctctgcgccagacaacgttaatggtcacccaccagttagaagatcttgctgactgggatgtcatttgggttatgcaggatggccggattattgagcaaggacgttacgcggaattaagtgtggctggtggcccattcgccacattactggcccatcgtcaggaggagatttaaatgcgcgctttgctaccctatctggcactgtataaacgtcataaatggatgttaagtcttggtatcgtgctggcaattgtcacgctgctcgccagtatcggtctgttgacactttccggctggttcctctcggcctcagcggttgcgggggttgccggactgtacagcttcaactatatgctacccgctgcgggcgtgcgtggcgcagcaatcacccgtactgccgggcgttattttgaacgtctggtaagtcacgacgcgactttccgcgtgttgcagcatctgcgcatttacaccttcagcaaattgctgcccctctcccctgccggactggcgcgctatcgtcagggcgaattgctcaatcgcgtggtggcggatgttgatacgctcgatcatctttatctgcgcgttatctcgccgctggtgggcgcttttgtggtgattatggtggtgacaatcgggttaagtttccttgatttcaccctcgcctttacgctgggcggcattatgttactgacgcttttcctgatgccaccgctgttttatcgtgcgggaaaaagcaccgggcaaaatctgactcatcttcgcggacagtatcgccaacaactgacggcctggctgcaagggcaagctgagctgaccatttttggtgccagcgatcgttatcgcacgcaactagagaatacagaaattcaatggctggaagcgcaacgccgtcaatctgaactgaccgcattgtcgcaagcgataatgctactcattggcgcgttagcggtgatcctgatgctgtggatggcgtctggcggcgttggcggcaatgctcaacccggcgcgttaattgccctgtttgtcttctgcgcgttagccgcgtttgaagcactggcaccagtaacgggtgcatttcagcatctcgggcaagtcattgcctctgccgttcggatcactgatttaacggttcaaaaaccggaagtcaccttccctgatacccaaactcgtgttgccgatcgcgtttcgctgacattacgggatgttcagttcacttatccggagcaatcccaacaggcacttaaagggatttctcttcaggtaaacgccggggaacatattgcgattctcgggcgaaccggatgcggcaaatcaacactgttacaactgctgacccgcgcttgggacccgcaacagggcgagattttgcttaacgatagccccatagccagcctgaatgaagcggctctacgacagaccatcagcgttgttcctcagcgagtgcatctgtttagcgccacgctgcgtgataatctgttactcgcctcgcctggcagtagtgatgaggctctggcggagagcttgcgtcgcgttggcctggagaagctgctcgaggatgcaggtctcaacagttggttaggtgaaggcggacgccagctctccggtggtgaactgcgccgtctggctatcgcccgtgcgctgttacatgatgcgccactggtgttgctggatgaacctaccgaaggcttagatgccacaaccgaaagccagatccttgaattgcttgcagaaatgatgcgtgagaaaacggtgttaatggtcacccatcgacttcgcggactctctcgtttccaacaaataatagtgatggacaacgggcaaattattgagcaaggtactcacgcagagctgcttgccagacaggggcgttattaccagttcaagcagggtttgtaagctattattgaacgatccgacttgcgtggagttttgcggtcatgcgcctggttcagctttctcgccattcaatagccttcccttccccggaaggcgcattacgtgagcctaacggcctgctggcacttgggggcgatcttagccctgcgcgcctgttaatggcttaccagcgtggtatttttccgtggttttctccaggcgaccccatcctctggtggtcgcccgatccccgcgcggtgctatggccagaatcactgcatatcagccgtagtatgaagcgatttcataaacgctcgccctatcgtgtcacgatgaattacgcttttggtcaggtcattgaaggctgtgccagcgatcgcgaagaaggaacctggatcacgcgtggcgtggtcgaagcctaccatcgccttcacgaactcggccatgcccactccattgaagtctggcgtgaagatgagcttgtcggcggtatgtacggcgtggcccagggaacgctattttgtggcgagtccatgttcagccggatggaaaatgcgtctaaaacggcgcttctggtattctgtgaggaatttatcggtcatggcggtaagcttatcgactgccaggtccttaacgatcacacagcatcgcttggtgcctgcgaaattccccgccgggattaccttaattatctcaatcaaatgcgcctcggacgattgccgaataatttctgggtaccacgatgcttgttttcaccacaagaatgaatgttttcggcacatttctccccagagtgttataattgcggtcgcagagttggttacgctcattaccccgctgccgataaggaatttttcgcgtcaggtaacgcccatcgtttatctcaccgctcccttatacgttgcgcttttggtgcggcttagccgtgtgttttcggagtaatgtgccgaacctgtttgttgcgatttagcgcgcaaatctttacttatttacagaacttcggcattatcttgccggttcaaattacggtagtgataccccagaggattagatggccaaagaagacaatattgaaatgcaaggtaccgttcttgaaacgttgcctaataccatgttccgcgtagagttagaaaacggtcacgtggttactgcacacatctccggtaaaatgcgcaaaaactacatccgcatcctgacgggcgacaaagtgactgttgaactgaccccgtacgacctgagcaaaggccgcattgtcttccgtagtcgctgattgttttaccgcctgatgggcgaagagaaagaacgagtaaaaggtcggtttaaccggcctttttattttgtgatatgtatgaagtactttggaagtataagtccgtaacttgtctcgatgtagatatactgcacaacttgtttacagtatgagcaaacaataattatcattaaaattcttcttgaccgttttactccaactccctatagtagcgccccgttgccacccatgaggtttggtagcaaaacaatttggtgaggtgtccgagtggctgaaggagcacgcctggaaagtgtgtatacggcaacgtatcgggggttcgaatccccccctcaccgccagattataagcgcatgttattgtttaacatgcgcttttttattttcccttccagacagtatgccatcgggtatgccatctgaaaccggtttatatgccccgcgatcatatcttatcggacaatttccgatctttgagcatactggcaaagctatactgccagcatatcaggatagtgttttgcgataatatcattcagtctgtcaaccagttctggttttctgaacgtgatatgcgcggagcccttcttaaagtatctgatgctgaacatctcatcttcatagctctctttaccctgaacagactgaatgtgatcatccagacgaagggtgatgtttccccggttgtcggggattggtttaccgctgaacaggtgcaacattctttccagatcggcgagtcggtcagcctgttgtccggtgataagatgaaatccccaccggtcccatctcaccagattgttgacgataattttactgccaaatttacaggggcaattggttttgtaattccagttcagccctctgaagacgttgatcacccctcgctcaaacacctcatccttattctggtgcagttgttcaaatgtgctcagaatgttcgcttcgctgatttccggaaaattatcgtactccagtgaccggtaccatgtatcacgggcctgcgtatccattaatgacagcatcccggaacgttgcatcaggtcacgccagatttcgcggtcaagattccgggtaatggctttcattgctgtttcgggtttctccatcagccagcaaccgcagcgaaaatcctgtttcatggcccagtccggggcggttttacctccaatactttctgtcattgatgagatttcagccagttgccggataagtgtgtcgatttgcagcagtgaactctttcgtacagccagaatgtggctgactgaggttgagcagataacgtccgtatgcccgttgaccacttccggacggggggctgtgatttcagacataatcgatattcctttttgcagataaatgaaaacgccagctctgttaaggctggcgtcaggagaatgaagtctggtgagtgagattcaccggttctggtgcagaagctgcagttggcgcagggtacggatatcctccctggcctgttcaatacagggcagcagtgctgccgaatccgttttatcctcatcgttgtcgaaaataattccggactcacagtcgatattgtcctgcagccacgcaatgaggatatccagcgctgtttcagtggttaatggcatcacgctctgtatcactgtattgtcttccggcaactgatgagggctggcagaagtcgccggtgttttggtagcgtcacgttcatccaccacgcggagtgaataaccgttttcagcgactttgttaatcagttcagcgagctcaataccatcgacgtcaacgacaattcgccccatgttcagtgcctgcacgttaacgctgtctgcctccagcgtcagggccagtttcatcgtttcgcctccggatacttacccagggtaatgttatttaccgttctgtaattgtcgcgggtcatcagacctgttgcccggcgagcccggaggatatcgatgctgtttattaactgagagtgggtacaggcgttgaatcccggctggtcggtacgcaccagcgcgtatttttccacgagaaagttcaccgcatcacacagtgaaatgcctgcctcaatatgctgctcaatcacacgttcatcggcaaacggcgtgtcattcagcgtgaggccgtaatgctggtccagcagtctggtaagcagtgtctgccagatttcaaccggagacgggcgtgaaccggccgcctgcccgggtaatacaggtaatgttttcatactgaagattttcctgatatgcagagatgagaaatgggaaagtggtgtggtgaaagcacctggccggagcagaaggttattctgattatttactttttcgtttcgggcgtcggataaacagccatataaacgtagccacaactgccgagggtgtcggcttcgcaggtcagcccttttgcatacagcgtgacggtatgctgatggcggggattcagttcaccgctggtgagcatgagttccagttgtttcatcagcagcggaagggcctggtccaggtggtacgcatccgcgtcgctgaaccggcctctgataccggcacggtcggcaaggtaatgcaaccggttaccctcctgcaccagacgtgccccaaaacagggcgtcacggtgcagggtagcccccaccaggggcggtcgttgttatcgtcgggataatttgtttcatggagtgagtctgacacgataaaatccttacagaaaatcggtgaatgatagtttaacgatgacgagtcagccggcgcgcagaccggcttcggtgaaggtgtattcgttgatgagaagggcctcatccacagcggcgtctgaggtcagccagtcgtactcgttttccagttgacggtacaaccagaaggccaggtcgcgcagggcttcgctgactgcggcttccgcatcggttgtcatagcctgaccagtcggactgttccgggtgacggtgatatccatgctgtacggatggcagtaacgtcccctgtgactgatttcagcctgcaactgccagaagttacgtttctgcaccgcctgcagggcatccgtgatacgatgaagctcacggtcctgcggggcatattccctgattttccggggtgccgctggctgccagtgccagcgcccttcaaaacaggctccgtccccctggctgcagaatccgctgaaccagatgcacggctcttccataaacctgccgttgctgagccggaaaacgcgctggcggaggctaatcccgaaaatgttacagacctccctgaagtcttcatacacgttttcataccagttgctgttagcatgatactgacggtaccagtcgcgggctttttcccgtgcagcagggcaggaaagttcatccagcgtatacacagtggtggtgataatgctgctcatcagaatcccctttctgattcagttcagggtgacgctcatcagccggacatacgggccaaaactgtccttacggcgttctgcaaacacagccagcacaccgggaatatcctgcacttcacgaccggtatacgcctcagcactgccgtgccagcggtacttaccggtgcagaacagaaaaagacgggatgccggatgctgacggtgaatgcgcatggcttcaccacgggtgataattttcataatgggatacctctgaagacagaagataaaagtgaaaacaggtgtgatgtggttgtgacggtgacgggttaaagcagaccgtgttcggcaaaggagaatacctggctgccaccgactatcagatggtccggcacccggatatccaccaggcccagtgcctgtaccagacgttccgtgataaggcggtctgccttgctgggtgtgacttcaccggacgggtgattgtgtgccagtaccacagcagcggcattgtgatacagggcgcgtttaatcacttcccggggatggacttccgtgcggttgatggtgccggtgaagagggtttcaccggcaatcaactgattctggttgttcagatacagtacccggaactcttcccgctccagtcctgccatgttcagaatcagccattcccgtgccgcatgcgtggaggtgaaggccacaccgggttcatgaagatggcggtccagggttttcagggcccgctgaatgaggctgcgctcaccgggcgtcatctctccgggcagaaaggaaagctgttgcattgtgcttctctccattcagtcgatgatgcgcataatggcgctgcattccggatgctgcagggcataatcccgcagccggtaataatggaccgtcatggcataacactccgtacgacaggcatgatgactgtacgtcatcagacaggcagcaatgccggcggcttccgggctcatttcagcgcggttaccgttcatgacattgaacagtacccatgtttcgtcatcatcgtcatccggttcgggggccataaatgccccgccgttgttcagggtgtacagattccagataccaccgcagtagtcttcacacagacggtccatccagccgaagacacggggctccagggtcacccactgtggaataaggccaaaatgttgcggccagaagctgatgcgctgttcatcagggacgagagtagcaaccagctgaggtgggttattccctgatgcagcggttacggaaacagaaggtgtggtggaattatgcgtaacggttgtcatgagattattccttataaaaagtaaatgaatggaagaatgtccggaggcagggacggaagtgagtcaggactgcgctttcagggaaaaggcatcagcgcatgctctccagcagcgtttctgccatcacccacaatgcgcgattgagcttaatgtcggtgtcgatgctgtgaatggcccgggtgtggatacgttttcctctggcactgcgaccggaaattccgcctttcagcatattctcctggatggtctgatatgcgctccacaggtccttgccgtaatcctccctgcgtcgtggtgtcagaatgtcagcagtggtgacgggctgatgttcgtcaccataacggtaagtcagtgccgcctgcgccagtgcctggcgtgccggtggcggcaggaccagcgactgcatggcatcacgtttctcctcaatccggtcaaacacgcccaccacttcgtaagccccttcaataactttctccaccacgtttccccggtgcggaacacgcacttcccccagagactgaccacagacgcagccgttctggcagacgaatctgaagtaacccggcagcatctggtagctggaggtaccgtcatgggagttgagcagaataatttcagggacatgttgtccggttatctccccgtcacgccgcagacgcagcatgtgttttgtgtattcccggcgacccgggtcacgcacacgtgtctggcaggcgaagaatggctgaaagccttcccgctgcagactttccagtacggtgatggtgggaatgtacgcatagcgttcactgcgggaggtatgccggtcttctccaaaaatactgggaacatagtgcatcagctcttcatgtgtcagtggacgttcacggcgtatctggtttgtataaccaaaacgactggctaatcgcataattgctccttatgaatgattaagcggtataaatgaaaaaaccgcgtctcccggagaagacgcggcctgatgggtgaaatgaatgaggtttattgtccgggaagcccttcactggtgagccacgcattaagttgtttgcctgcatagggttcagaattccggcagcgccagcgtcgctgaccttccgcgttgcggataatccgccggaaatgcattcctggataaacacattgcggtaagctgttatgacagcaactgtctgtttgcgtgagaaaggatcttcggaaaataaaagtaatgtacagcccgtcatgtattttcaggtaaaaataaagcccctgccattatggcagaggatttatttacatttgatattaataacgcgcagataagatactataattcatacattaaattttgatttcgtcaagcccgacaatcttatgaatcgtattgtcgtaaagtttaacgcccggtttaccgttttttagggtaacgaaaccggcggtgatgttgccttcacaactttgattgttgttgtatttgatggtctgggctttaccggtatagaaattaattacgccgtataaaccatcccagcacgctgtaccccccatggcgtgtaccagaccgtattgcatgtctttggatgtgcccaggtattcacaacctccgtcgatagtatcagtaccctgacaccagaattctgtaccgtcagtaacgtcagtcaggttggtcggtaaaggaacggcattgtttgctgatacattagcagtaaagaaactgataactgcaatcattaaaatagtgatgatatttttcatgataaatactccattgtttctgatgttaaataaaagtataaaaactgtttctgcaatacttataatccactcgagaggtcaggattaacccccgacttgtttattaaacacatacctgaagatatgaccttcaacatggtgatatatttatactatgtttctgactgtctcctgaatcaaataaaatatatccgttccatgatgaacatcatttacctgttaagaacactaataacctgattatttagcaaactctgcgagaaagaatatcagatcgtaaataacaccagtatcagcataaccagccagacccagaaataagcaggtttttgcccgaggatctttgcccgacgccacagataaaccgggatcagccatgccagccagccaaatgctgtggtatcaacaccagatttacggagttttcgttcatccagatatcccagagcaatattcagaatcagagagataaaccagtactggccttcgctgactgcatcataagcccgttcaaatgacataccgttcagcccggcagtccacatctcaagtatgtacccaatcaaaggggcaaatgccagcgtccagacaacgtctccgggaatgcggtgacccggaagggccggaggaacttcactttgtttcagtatttccgccagtgatgtggctgaaactggctgccattccagcatgccctgttgccacaccagtgttgatgcattcagttcaccacgccggatacgttcgataatatcttcctctgttacgttatcataacgtacaccatttttttcataatgccagttcatctgattctcctgttaatcattcagttaataaaacatgtgacatccaaaacaaaaatatttttatgatattcattttcactcactgtattaaattaaactgaggtgttttacaccacgttatcaattattcctggaaccaggtgttccagcagctaccgtagaatttgttactcaaagtctttttctcatttttgatatttgcggtatagctgtcgactttcttaccgtttactaaaacgtcgagcttcgtggcttcaccgatagcatcgataaagtatacccacgcattcttattcattcgtgttccgtcgacaggtggggccgaatactttttaccgttgatgataaaaataatatcagaatcgtactgatttagcggggtgggggtatgaccgtaaatccactcatatgtggtagcaaattgttgtcttctggattaatcgtgcagttaatagaaacactaccgacactgaacatatcggtgccagcaacactgttacgcttctacaatgccgattctgcttgtgctacggttgtacttacagttaaaacaacagctaaaagaatgtttaacagtttcatgagatttctccccaaaattaaataaattaatcttaaccatcatccgggtaatatatatctgaaaatattttcaataacaccagataagaaaaacaccaccacagtggcggtggcgtttctccggtgtgtctttatttaatccgggccatcgcgtttctcagtgccgaatctgcaccttcagttatctcctggcttttctgtaataccgcctctgaccgggtcagtgcctgacgcgccgccagtggtttccggatatgctccatcgtcagcatcgtgtcctcgtagccctgctgacgccaggcgtcgatatgtgccgacgtgaaactgagcagaccgccactgttgccaccatcacctgcatgtttcagccttttccggggacggatttcaaggattgtggtgtccggaaaagcccgacgatcccataaagaaccgtcactcagatgcgtcacaatcaccatattgcatccggcatccaccagtggcgtcacgggagtattcccctgcctgtttcgccatccgcccatcccaccatcaccgtacattgttccctgaacctcgcggggacggaacagcagaggcagcgcggctgacgccagtaaagcttctttctgctgcccgcggggcagactctggatatgctgaaaaacggcgtttttcgtggttccggcacccagttcagcacgaatgcagtcaataatatcctgcatgcctccttctgtggggtacagcgacacgtacagcggtagcccgtcagccagagcatctgtatcaagataatgatccatcagcgctgtcaggggctcatctgacaacagcggctgaatcatcggattgtcgaacccgttgattgtcgatatatggcgaaaaagcgtcgtaagcagtgcgcccgcacgtccggggatctggcagaggttcatggcctgaaccagttttttcagcaatgaaaagtaaaccgatctgtttaccgacagaacctgattattccccagatgatcccagagcgcctccaggcgtaaggtggcttctgacagatcgggagaggccgcgataatggcaccattgagagccccgatactggctcctgagaccatactgatctgtgcgccgcactctgccagtgccttaaccacccccgcctgataagcgcccaccgctccgccgccggacagcaccagccccgtttgcatttctgtactcatgcctctcccttctgaaatatttcatcaaccatactttcagagaggcgttctgcagagcagagacggggcatacgaaccggtaagtgttctgcagcctgcgtggttgaccagatcacaggatgccgctcttcactgcaccagtcccccagccagttaaccgcttcatgccattcgttatcagcctgttcccggcgctgaccaccaagccagtccagtgtgttcagacgtactgttgcgctaccgccactctcccgtgccatctgcgttaatgctttatatctgagaatatccagtaactgattaacctggcctgtttcaccctgacgaatcacatcaccaaacgcgccccagcgaagctcttcaagcgccacataacaacgtccggcaggggaaaatgacgcgtatcgcccggcgctccaccacgagaatatctgctcaagatgtaactgtgcccgctgaacctggtcaacacggtggagtttttcctcaagatgattcagtttctgatgaacctgttctgccagagtgagtaactgctcccgcgtgtcagccgaataatgcgccagcctggcagtatcactgaccagtgaactgaccctgtcgtttacccgggtaatcgcgtagtttgtggtggcaagtgacgttgtcagctccgtcagccagcgcagggacgcctcaacgccctgtgcaagcgacgcattgatggcattctgccgtgcagcgccttcgccggtcagcccctcttttaaacgccggaagaacgtgcgctctccggccgtgcggatatgctcctgtgcaacatcgattccgtttgcgaaatcaaccacaaatttttcaggaagacaggtgagtacctgacatacccggttatcagcaatttgttgaataaatggtgaagtcacagcattgtctccagctcttccctcagcgccttactgtcagtaatgagctcaggaaccctttcatttaatgcctgaagtcgcccggtaagccgttcctgcgcctgctgatcgcgtttatgatcttcagagctctgaatcagcgtgttacgcagttgttcaactttctccctgaatgcgcagaaaaaggcatcgatttcctggcggacgggctggttaatatcctgctcaatggatgcctgcagctccccgaaatatgcccgggtcagtgacataacttcctctctggccttgttgatattgatcacgctgcgactcacatcctcgtcatagttttcccagcccaggtcactggtgccaaaccatcgacaaacggttccccatacgccactctgccgacggcgacgggtgacggtctccgttctttcctccataagcgcactcagatttatttttaccgcgagccgggtctgtaactggctgactgccggaaaactgatttttacggtaaagccctcatcctccaggcgggcattgatgcgaccggcaatgttttctgtggcgtacagggccgtgccacgaaaacctgtttcaatcccgctgacgattttctccagctcaggccggaactgtgcttcagcctcacggtgcaggctggtcacggtcgattcgatttgcgtcatcagttcaagggctgccctgcgatcactgaattttatttcggggctgtccggatcaaagtcccgcatcctgtcatgctgatttccggttccgaaaatatcgtgaaagaaagcgaatgcgtttctctcccggggctgcgctgaattttcttcctccagcatttgctgttctttgcgtttaccgcttctgaaatagtcgttcagctcctcctccagtgaggcacagaccttcgtcagtaattccccggttttggtattgatgtcctccatggccattctgacatcaccggtcacctgattctgacattcctcaatctcctggatatccgccagcaggctggtaatatgcgcctgtagtgactgaatgctttgctgcagcccctgatgacgtaatgacagatattcgctgacattttctgcattctgcatcagttttgcggcggcagagtcaaccgccagtgccgccgctctggaatgggagctctgtatgacttccgttatcagttgatcgatcagagatatattccagagtttttctgcctttttatttaccttagtgctgtctttccagtcgtcctcttccaccataggtccgaaagcttccctgataaaatcatcgacccaggcttcatcaaccggaagcgcaccgttttttcgtaactcatgaagcgcacggttagccaggtacgcctgacgtgatgagccgggataaacgcgggaggcgggcagcacatcgctgttcagcattgctggcaccttctggcgtacggcatccgcaccatcaccattgcgatctttttcatcgaatttattgaccagcacaaacagacgaccggctgagacgtcagcaatggcattaagctctttacgaacctcctcatcggctttcgagttcatctgggtgtaatccatcaccgccagcaccgcagaggctttctgtagttgatcccgcatcatcatttccatctgtggttgtccggcttcattagggccgggggtatccagcagtgtgagtgttccctgacatgcatccattcccaccaggtggctgaacgccacgtcgatcaccggtagtttctgcacttctgcgtattcgtcaaaaggaaattcagtccccattgccgcagcaagacgaaccaggtcatttaacgatgccagtccggtaaagatttcgtcttccccgtggtattcatttttaagccagacatcatccgccagaatatccagtagttcgcgggtatccccggtttgctgcagggactgtgcgacttgctgccctgccggggtggcgagtttttcctgcagtgtgattaataaattgcggacgggctgaatatgttccagatggaggaccggttccgtttttccgggaacgtggcggatcaatgtcggtaccgaggtcatggggcggttacggttgggcagaatttcctgccccacaatggcgttgatggtggttgatttgcccgccttcatcgtgccgaccacagccagcaccatctccctgcgggcggttttgatttgttcgccctccagctcctcaattcttttcagcgctttccgtttatcaaaaagcagcccgttttcgttcttactgtcagataacacatccggctcatcaaccatttgccggagcagattgatattcagttgcaaaagccggtcggcttcatcacaaagcagggcgatgttcttttcgtgcatcattcacctttataaattcaataattcagaactgcggtgaacagcaatgagcgtcctttcccattactgcatgaattttcctgaaatcgtatttccgggataccgtataatcagaaagtcatattcagcgtagcctgaccgttatagccttcagcgctgctgccgctgacgctgtgggcataaccggcctgaacgcccagggtgatattttcccggatacgggcttccagtccggcctgcaggtccagtgacgtgccattccgggacggtgagaacgtcatgttactgccggctgcggctgtccccatgctcatgtcaccccgggagctgaaggtgcggataacagaaggctgtacccaccagttcaccggcagttcactcacactgtgttttgcactgtcgcgcagggtgtcacgggatgaggtgccttcaccaaaggtcatatcgttgtggctgcccagacggaaaccggcacgcacatgttgtgcactgccatgcccgaacttcacataaccggcgttatcctggccgtcatccagggagagtccctgccaggtgtactgcagttgtggctccagcatcagattgtcagtgatactgaagggcagaccggtttccagtgagcccagccagccccagccccgggcgcggaagtcgttattgtccgatgacgctttcatgctgtgacgggttccctgggccacaatgtcagcccacaggccggaggatgtgtgtaccagattcaggtatccgcccagactgccggcatcatcccggaccgtgccggcgcgggaaccgtcatcatccttaacatcaacggaagaatggcctgcagcaccatacacccctgtcgtcagagacataccggcaacctctgttctgagcaggtcaccctccagacggacgaagccatagctgccgctgctttccggcgtggctccacgggcaataccgccgttgttatcgtgaccgagatgaccgccctgaatgctgagacggacgctgttattttcaccgtttacaccggtctgatggctgcgggagcctgccagaatccggtcatagtccattgcctgtgtcaacatggatgtatacagggggacttcagcacgataagcattttcactgcgcaggtaccagtcttcatcgctgtcacggttcagggtgtagttaaaggcgccggcctgaagcgggcgactcagggcaaacgcaccttcttctgtggtggcgccattctgtgcatccacaacccggataccctgtccggtggttgccaccccgaggttgctgtttccgacatttgtaaacgcaagccaggttttgccggttgcctgaccaccattaatcaccagctggtcagaggcattgctgccatcaaggcgaacacgcatattgatggtgccgccctggccggtgaggttcgtggtggtcagtttatggaacgttaccggggagttactttttgcaacagcacggctcagcgcggcattcggtgtcgtctgattatcaaagcgaatctcccctgcgttaacaatatcgccggtactgaccacatcaccattcagtaccatactggcgcctttactgagctgtgttctgccactcagacttcccccggcagccagcgtcagtgttccacgatgtccgacagtggtgttgccagcctgtcccccggcattaaccgtaaagctgccgccattttccagcagcaggccgctggcctgaccggatgtgccatcaatactgaacttaccgctggcattggtcccctcaacagtggcaccactgtctgcaatcagggcaccaccggatgttatggtgacacttgtcgccttaccgccggcagacactgccagggtaccgccgtcatccactagggtattctgtgctgaatggctctccagtacatccagacgaccgccggattccagaacaacaccgtcagccttaccgttttccaccgtgaaattccccagacggtttgtgccgatgacagttgcagcagtactggtaaccagtgcaccgcccgtgttctgggtgactgcagtggcttccccgccggcatgtaccctcagttcaccgttctgatttatggtggtgttaccggcagcgccacctgccttaacaacctgccagcccccctcgttaattaccgtgttcagcgcaagtccgtccctgtgcacatactggtaaccgccattcagtgtggtattcagggcccttccgtgtaccgactggtcaccacctgcgtaaatgagagtgtcacgggctagcccggaaaataagataatctgccgtccatttttgttgatggtggtggattctgctgttccctggaccttctgacccgtatacgagttgtcagaatcagggccgccttctgcgccggtgttgatgatggttcctgttgccagcccgccacttttaacgctctggtaaccgtcgcggttgataattgtaccggtggcaaccccgccctcatgcacccactgctcgcctctgttattcagtgtggtgttcaccgccagtccgttcaggctctgtcccccgccgtcacgaataaccgtatcactggctgttcccccctccagcacgacctgacgaccatttgtggtgacagtggtgtttccggctatcccgccattctgtatccattgcccaccggtgttttcttcactgtccggccccagttccagcccggtactgatggtcattccgttggccgtaccgaagacaatctggttgtcatgatttgtcagtgttccatcgttcacggtttctcccgcctgtacaaccttgtcagcagccagtgccgggactgatgtgacagcagcaagagacagcgcaaccgccacaccggcgcgttttccccgtgagcgggccagttcggaagccaccaccagggtgcccgtaatgtgattccataccagcctgtagctggtgttcagatgtcgtttcatcagcttttccttacagagggtgaataaaaaagccggtacccacaaaagtggataccggcaggtacaaaacagcatggtcagataaagtggtttttcccggacataaatgcttcccctctctcatccgccagagaagtatcagtccgttgtgtgcaattccgttatgcatgatgaagagattcagctgccttttcgcagaccattaaccactataaacgatcgatggaaacgatcgatacctgttttatcgatcgttttattctattaacagcaaggcagtcacgcaagagaaagaggtggatatgaggggggtgtatcatgttttcagttggttaacgcaatgtaatcaggcatttcccctggcagactgttcagaagaaaatccagttccatacagcgcgggcaacagagaccaccgtgtcacggacggcacgcagaactgtgcgtgcaacagaggcaacacagacgctctccaccgtgtcaaatatccggtccaccgcaccggtaaactgttcacgggcctgcccccggacagattccgtgcacagctcgtcctgcaggcgggtcatcaggggactggcggcatggtcgggaagcgctgtcatgagcgcactgaccagcgtatccagttcccagccggtgcgggccgatacggcaacaaccggatgtacgggccggaacagccggaataccgcatctgttttttcgcgaatgttctgttcctgtgcgggagaaggctgaatacctgccatatcccattcatggcagggctctgttttgtcggcctgcgtcaccacaaacagcacctgctgatgtccccggtgcagtatgtgtcgccagaaatactcatccacagacagggcacggtcatcggctttaatcagccacagtaccaagtccagttcaggcagaatgtcacggtacagggcttcatactctgcatccctgtcccggctctcgcccaccccgggcaggtcagtgataaccatgctgtgaccatggccactcagacggaagcgccgcacttcccgggtgccggcgtgaacatcactgaccggggtgacctccccctgaaacagtgcattacagagtgaggatttaccggccccgcttttacccataatgccaatcacgggttcgtgactggtgagtttgcgcagatgttccaggatgtgacgggaaagcgagtaaggcagggaggagagcggtttttcaattgcctcaatggcatcagacggattcatacatgtattcccggtgaaaaaagacaaaaccccgcgcaccggaaaggtggcgggggattcacaacgataatatctgtctgaaattatttaggatgcaggtatcttctgataatcatacatcccgaattttgttcttaataggtaaccgtctcatttaaaccgtctttcgcctccctttcctgtttccgatactaatgtccattttcgcagtaaagggacatttaagatgaatgcacgaaaagcggtactggcagacaatccggaattgatcctgcgtgtgctacagctgagatttgacgagtcactgtcgtacccgcgcatttctgcgcagaccggtgtcagcaaaaccgccattttttctctggtgaggcgatttcaccaggtattcactgactggcctctttccggtgaatattcctgcgggcaactggcccgggctcttttcccggggcgatacccttcagccccgaccgtgactcagcctgtgaaagcagagaaaccccgccggaaccgattttcaccggagtttaaatggagactggttcagcaaactcttttacccggtgcctgtgtcgcacaaatagctcgagagaatggaattaacgataacctgctctttaactggcggcatctctggcgtaacggtggcctgcaaccgcccggcgaacatgaaacatcgctacttcccgtgacgttaactccggagccggataataaaatcccggcaccagtgcagatacctgaacagataaatacactgccagacagtctgtgctgcgagctggttctgccggccggaactctcaggctgaaaggtgaactgacaccggcgttattacagacacttatccgcgaaatgaaagggagcagccactgatgatatctctccctgccggttcgcgtatctggctggttgccggtatcaccgatatgcgaaatggctttaacggcctggcctcaaaagttcagaacgtcctgaaggatgacccgttctccgggcatctgttcatcttccgcggacgccggggtgaccagataaaagtgctgtgggctgacagtgacggactgtgcctcttcaccaaacgcctggagcggggccgcttcgtctggccggtcacccgcgatggaaaggttcaccttactccggctcagttgtccatgcttctcgaaggcatcgactggaagcacccgaaacgaacggaacgcgctggcatccgcatataacccgttgtaaagtgaggatatggacacctcacttgctcatgagaatgcccgcctgcgggcactgttgcagacgcaacaggacaccatccgccagatggcgaaatacaaccgcctgctctcacagcgggtggcggcttatgcttccgaaatcaaccggctgaaggcgctggttgcgaaactgcagcgcatgcagttcggtaaaagctcagaaaaacttcgcgctaaaaccgaacggcagatacaggaagcccaggagcgaatcagcgcacttcaggaagaaatggcggaaacgctggatgagcaatatgacccggtactgccatccgccctgcgccagtcttcagcccgtaagccgttaccggcctcacttccccgtgaaacccgggtcatccggccggaagaggaatgctgcccggcctgtggtggtgacctcagtcctctggggtgtgatgtgtcagagcaactggagcttatcagcagcgcctttaaggttatcgaaacacaacgtccgaaactggcctgttgccggtgcgaccatatcgtgcaggcaacagtaccttcaaaacccattgcacgcagttatgccggagcggggcttctggcccatgttgttaccgggaaatatgcagaccatctgccgttataccgccagtcagaaatataccgtcgccagggcgtggagctgagccgcgccacgctggggcgctggacaggtgccgttgctgaactgctggagccgctgtatgacgtcctgcgccagtatgtgctgatgcccggtaaagtccatgcggatgatatccccgttccggtccaggagccgggcagtggtaaaacaagaactgcccggctgtgggtctatgtccgtgatgaccgtaacgccggttcacagatgcccccggcggtctggttcgcgtacagcccggaccggaaaggtatccatccacagaatcacctggccggttacagcggtgtgcttcaggcagatgcttacggtggttaccgggcgttatacgaatccggcagaataacggaagccgcgtgtatggcccatgcccggagaaaaatccacgatgtgcatgcaagagtgccaaccgacatcaccacggaagccctgcagcgtatcggtgaactgtatgtcatcgaggcagaagtccggggatgttcagcagaacagcgtctggcagcaagaaaagccagagcggctccactgatgcagtcactgtatgactggatacaggaacagatgaaaacactgtcgcgtcactcggatacggcaaaagcgttcgcatacctgctgaaacagtgggaggccctgaacgtgtactgcagtaatggctgggtggaaatcgacaacaacatcgcagagaacgccttacggggagtggccgtaggccggaaaaactggctcttcgcgggttccgacagcggtggcgaacatgcggcggtgttgtactcgctgatcggcacatgccgtctgaacaatgtggaaccagaaaaatggctgcgttacgtcattgagcatatccaggattggccggcaaaccgggtacgcgatctgttgccctggaaagttgatctgacctctcagtaaatatcaatacggttctggcgagccgcttacaattattgccccccccaaaggagatgatttcatgtataattgtggtgaatcatattcagaatacgacatatcattatctgacgatgaaaactatgacgatgactattatcgtgaacgcccgtgtccgggagaagttttcggctatgataatactgaggataatgatgaggcggcatctgattatgcattaaaaataaatgaaaactctgattaatacgggggtagctgataataagacaatcaatgacagatattaatgaataaacataatcaggcgctcaatacttggtttaatctgggcgcctgattaaaatctgaggaaacatataataattttcatcaaaatagtatttatgtactaactaagctggatttgaacctctatttctgggtatttgttatcacttaatccattactgctcctccttcagcatatgtcgtatccgttgaaggatttacgcatatcggtaacgtcggcaacgagccagatgcgggtacctgacgggagtgagatcatcgtcccctcccggtcagttcacggatcaacagcgtgagcagctctggcgatggattttccagcgtcatgttaccgtgacggaactccaccttgcaggagccggcactgacactggtctgagtggaagtggataaagacggcgcaatggccgccaccggttctttctgctcatccggcgttatttctacaggtaataattcaacgccagtgtcagaagaggtcgttacctgaagacgccgtgatatacgcccttcgttctgccagagcctgagccatttgaacaggaggttatcattgatatcgtgttcccgggcaatacgggcaacagaggctcctggttgtgatgccagttccaccatacgaagtttgaattcattcgaatagtttttacgaggttcttttcgccagtcctgtaattccatacttagatgtccgtctatatcagatgggcgtctaagttaccaattttcgtctgatggctacatacggcggtcagtttacgcttactgacaacgcgatggcggagagcatcaatggtctttacaaagcggaggtaatacaccgtaagagctggaaaaaccgtgcagaagtggaactggccacactcacgtgggtggactggtataacaatcgacgattgctggaaaggctgggccatactcctccggcagaagcagaaaaagcttattatgcttccatcggaaacgatgatctggcagcctgagttcacagataaaacactctccaggaaacccggggcggttcaaacctgattctggaaaaggactttgtggattgttgctattgccagtgagattgaatgaagtcgttttaactcgctttgaatacgtcttgcccccagatttcgctgagaacgtaactccagaatcagagcgacttcgcaagtgccggttttcgttgatggtgaacgcttggggcgacggctgtggctttccagaccagcgatgccctgagccagatatctgcgccaccattttacgcaatgtgggccgagaaatgccacagcgacggcatacaaatcccgcatcaccggacgtttcatagagttttacccactgtagccgctgctgaatttccctgttcataatttggcattagttcagctcaatcccgacttaaaaagtccctacaggatgttccggacctgaggcacagttcatatccttatccataaaaaatttagctatgtctatagcattaatcttgacaagacgacgttagggcctggcgatgaatcatttcccctgccagatactgagagatcccctcataatttccccaaagcgtaaccatgtgtgaataaattttgagctagtagggttgcagccacgagtaagtcttcccttgttattgtgtagccagaatgccgcaaaacttccatgcctaagcgaactgttgagagtacgtttcgatttctgactgtgttagcctggaagtgcttgtcccaaccttgtttctgagc

SEQ ID NO: 53 - DNA, 49069 bp, Escherichia coli
  source 1..49069: mol_type = genomic DNA
ctggcggccttagcgcggtggtcccacctgaccccatgccgaactcagaagtgaaacgccgtagcgccgatggtagtgtggggtctccccatgcgagagtagggaactgccaggcatcaaattaagcagaaggccatccgtcaggatggcctttttgcattggcgcagaaaaaaatgccggatgcgacgctggcgcgtcttatccagcctactcttgcttatccgttctgcttttgcatccactccaccacaaaatcagccagcccctcaacatcattaatatccagtaatgcgacatcaagattaagcggcacatcactggctacagcaataacatgcctgtctatcactaattcttcaggtcgatgtccggctccatcgcgaaacagcacaatctttgcgatctcttcatgcttaaacccttcgaccagaatcaaatccagctttgaggtatccattcgacttgcgagaaactgtagatccagctcttcttcgtctggtgtttccgtcatcaaggcccatcgttgctggctggcaacgatggtttgtgccgcgccagccttgcgcagctcatagctatctttgcctggcttatcaacatccatatcatggtgcgtatgcttaatcagccctggacggatccctctggcgcataatgccgggatcagttgtttcaaaagcgtagtttttccggtaccactccacgcggcaaaggcgagtaacggtatcatcgtttttcctgccatcgggcaagctcctctggcgtattcacgttaataaatgcatctttattatcgctgaaatcaaccgcatgaccgccagccagacgcataaatgccattacccggcgttctcctgcttgcagatattccagtaataaaggctcaattgcgcggtttaccagagcaatagtcgggtgatcgcgttcaccgtcgtggacccacacgacaggcgcatctttgcgctgatgattaagccgggctgctaaatcctcgggaatataaggagtatcgcacggacaaaacaaaaaccactcgcctgcttcctgctgcattactgaaagcattcctgccagagggcctgggtaatccgccagtgaatcttcaatcactttcagaccgcttgcctgatagatttcctgatggcgattggcattaaccacgacgtgagagagctgcgtcataagcgcgtcagcgacatgttgccataatggtttgccgtttaattcaagcaatcctttatctacgccgcccattcgtctggctttaccgcctgccagcacaacgcctgttatcgtcgtcatcagattcaccgatatcgcctcttttattgtgggattgaccctgctaacgtgtctgtctcaagagtaaggagcattactatgaaatgtaaacgtctgaatgaagttattgaactcctccagccagcctggcaaaaagagccagaccttaacctgttgcaatttttgcagaaactggcgaaagagtcaggttttgacggcgaactggcggatttgacggatgacattctgatctatcacctgaaaatgcgtgattccgcgaaagatgcggtgatcccgggtttgcagaaagattatgaagaagacttcaaaacggcgctgttacgcgctcgtggcgtaattaaagagtaaaagcttgtaagcggtgccaccaaaatcatcgtgaaatgatatccttcatcattcgtaatgttttccggatgatgggatgaacaacagcgcttttactttccagacactacacccggataccatcatggatgctctatttgagcaagggatccgggtggattccggtcttaccccgcttaacagctatgaaaaccgtgtctatcaatttcaggacgaagatcgtcgacgttttgtcgtcaaattttatcgccctgaacgttggacagccgatcaaatcctcgaagaacatcaatttgcgttgcagttggtaaatgatgaagttccggtcgcagcacctgtggcctttaacggtcagactttattgaatcatcagggattttatttcgctgtttttccaagcgtcggtggtcgccagttcgaagctgataatatcgatcagatggaagcggttgggcgttatttagggcgtatgcaccagacggggcgcaaacagctttttatccatcgcccgaccatcggtctgaatgaatatctcattgagccacgcaagctgtttgaggacgctacactgataccttccgggttgaaagcggcattcctgaaagcgacagatgagctgatcgccgccgttacagcgcactggcgggaagatttcaccgttctgcggctacatggagactgccacgccgggaatattctctggcgcgatggtccaatgtttgttgatctggatgatgcacgtaatggtccagctattcaggatttgtggatgttgctcaatggcgataaagccgagcagcggatgcaactggaaactattattgaagcttatgaagaatttagcgagttcgacaccgctgaaatcggactgattgaacctttacgcgccatgcgtttggtttattatcttgcctggctaatgcggcgttgggctgatcccgcgttcccgaaaaatttcccgtggttaaccggggaagattactggctgcgacaaacggcgacttttatagaacaggcaaaagttctacaagaaccccctttacaattaacacctatgtattaatcggagagagtagatcatgaaaaagatttggctggcgctggctggtttagttttagcgtttagcgcatcggcggcgcagtatgaagatggtaaacagtacactaccctggaaaaaccggtagctggcgcgccgcaagtgctggagtttttctctttcttctgtccgcactgctatcagtttgaagaagttctgcatatttctgataatgtgaagaaaaaactgccggaaggcgtgaagatgactaaataccacgtcaacttcatgggtggtgacctgggcaaagatctgactcaggcatgggctgtggcgatggcgctgggcgtggaagacaaagtcactgttccgctgtttgaaggcgtacagaaaacccagaccattcgttcagcatctgatatccgcgatgtatttatcaacgcaggtattaaaggtgaagagtacgacgcggcgtggaacagcttcgtggtcaaatctctggtcgctcagcaggaaaaagctgcagctgacgtgcaattgcgtggcgttccggcgatgtttgttaacggtaaatatcagctgaatccgcagggtatggataccagcaatatggatgtttttgttcagcagtatgctgatacagtgaaatatctgtccgagaaaaaatagttcaatgtaaattacataaggcccgtgaatattcacgggttttttttattatttaataaatataaatacattctgataatgcgtcctgccgctggacattatttcagcataagcggatatttaaagttttgctgttttatcagggaatatttatatgatacgtaagtcagctacaggtgttattgttgcgttagccgtaatctggggtggtggcacatggtacacaggtacgcaaattcagcctggtgtcgaaaagtttattaaagattttaacgatgctaaaaagaaaggtgaacatgcctacgatatgacgttaagttataaaaattttgacaaaggtttttttaattctcgttttcaaatgcaaatgacattcgataacggtgcacccgatctcaatatcaagccaggccagaaagttgtatttgatgtggatgttgagcacggtccgttgcccatcacaatgttaatgcatggtaatgtcatcccagcactggcagcggcaaaagtgaacttagtgaataatgaactgacacaaccgctatttatcgccgcgaaaaataaatcgcccgtggaagcgacattgcgattcgcgtttggtggctcattctctacgacattagatgttgcccctgcagagtatggaaagttttcttttggtgagggccagtttacttttaatggtgatggtagttcattgtctaacctggatattgaaggcaaagtcgaagatattgttctgcaattatcaccaatgaacaaagtaacggcaaaaagttttaccattgattctctggcgcgattagaagaaaagaaatttccggttggtgaaagcgagtcgaaatttaatcagattaacattatcaatcacggggaagacgttgcccaaatcgatgctttcgttgcaaaaaccaggctggatcgcgttaaagacaaagattatatcaatgtcaatctgacctacgaacttgataagttaacaaaagggaatcagcaactcggtagtggtgagtggtcattgattgctgaatctattgatccctcagcggtgcgccaatttatcatccagtataacattgcaatgcagaagcagcttgctgcacaccctgagttagcaaacgatgaagttgctctgcaagaagtgaatgctgcattgttcaaagagtatttaccgttattacaaaaaagtgagccgaccattaaacaaccggtaaaatggaagaacgcactcggcgaactaaatgccaatctggatatcagtattgccgacccagccaaatcttcatcatccacaaacaaagatattaaatcgctcaattttgatgtgaagttaccgcttaatgtcgccacagaaaccgcaaaacagcttaatttatctgaaggaatggatgcggaaaaagcgcaaaagcgggctgataaacaaatcagcgggatgatgaccttaggtcagatgtttcagttaatcacgattgacaacaataccgcctcgctgcaactgcgttatacaccgggtaaagttgtttttaacggacaggagatgagcgaagaagaatttatgtctcgtgccggacgttttgttcattaaaatactcactcgcctctgctcattcagaggcgagcaaaatttacttgtcctgccgctgtgatgacatcaacgacgtcagaagtcggtctttttcctgccacagtgagttcagccattgctgaaaatggcgcttaaagcttttgtcattgatgtagtcgccatgtaactcatcggcaataggctgtaaatccacatgaacgacaattcgcgtcagtttaccgcttaacatatcgaagaacggctgacggttattgtccggataacacagcgtaacattaagcagtttatcgaattgtttacccagtacatttagcgccatcgcaatgcctgccgcctttggtggcaacaagttttgaaaagtggagtgggtttgctgatgtttttcttgcgtgaaacgggagccttcaacgaaattgacaatggtggtgggatgcaggcgaaacttttcacaagaacgccgagtggtttcaacatctttaccacgtcgctccggatgacgtaataaataagcgcgggaataacgcttcataaacggcatatccagcgcccagcacgccaggccaagaaatggcacccaggccagctgttgcttgaggaaatatttattcatcggaatgtgcttacgaaacagcacgcacagtacgacaatatctgcccaactacggtggttacaaataagcagataccagttcttcttacttaacccttccagcccgtgaacttcccattgcaggtgtgggttcagatgcagtaataccgccagaccttcacaccagcaatacatcataaaatcacaaaaacgcgaaacctttcgccaaatgactggcacaggtagcaatagttttacaatcccggcaatgatgatcgggacggaacaaaaaatagtgaccaaaatggtcaatacgatactcagcaaaagggttatcgcagcgagtattctcgtcataatgaatttattcaaaaggttagccatagacagtgcgctaaagaagcgcaaggcgcagattttagcagaaaacgacccaaataacggatgatccttaaggagaaaaataattcatatctatccacattagaaaaaatcccattatctcaattattagggatggctttatttttaactgcatgaaaaacaaagacaaacatcatgctgtaaaaagcatgataataaattaaaagcgatgtaaataatttatgcacaaagttatccacatgacgatttgcgagcgatccagaagatctacaaaagattttcacgaaaagcggtgaaaaactcatgttttcatcctgtctgtggcatcctttacccataatctgataaacaggcacggacattatggttcagatcccccaaaatccacttatccttgtagatggttcatcttatctttatcgcgcatatcacgcgtttcccccgctgactaacagcgcaggcgagccgaccggtgcgatgtatggtgtcctcaacatgctgcgcagtctgatcatgcaatataaaccgacgcatgcagcggtggtctttgacgccaagggaaaaacctttcgtgatgaactgtttgaacattacaaatcacatcgcccgccaatgccgaacgatctgcgagcacaaatcgaacccctgcacgcgatggttaaagcgatgggactgccgctgctggcggtttctggcgtagaagcggacgacgttatcggtactctggcgcgcgaagccgaaaaagccgggcgtccggtgctgatcagcactggcgataaagatatggcgcagctggtgacgccaaatattacgcttatcaataccatgacgaataccatcctcggaccggaagaggtggtgaataagtacggcgtgccgccagaactgatcatcgatttcctggcgctgatgggtgactcctccgataacattcctggcgtaccgggcgtcggtgaaaaaaccgcgcaggcattgctgcaaggtctgggcgggctggatacgctgtatgccgagccagaaaaaattgctgggttgagcttccgtggcgcgaaaacaatggcagcgaagctcgagcaaaacaaagaagttgcttatctctcataccagctggcgacgattaaaaccgacgttgaactggagctgacctgtgaacaactggaagtgcagcaaccggcagcggaagagttgttggggctgttcaaaaagtatgagttcaaacgctggactgctgatgtcgaagcgggcaaatggttacaggccaaaggggcaaaaccagccgcgaagccacaggaaaccagtgttgcagacgaagcaccagaagtgacggcaacggtgatttcttatgacaactacgtcaccatccttgatgaagaaacactgaaagcgtggattgcgaagctggaaaaagcgccggtatttgcatttgataccgaaaccgacagccttgataacatctctgctaacctggtcgggctttcttttgctatcgagccaggcgtagcggcatatattccggttgctcatgattatcttgacgcgcccgatcaaatctctcgcgagcgtgcactcgagttgctaaaaccgctgctggaagatgaaaaggcgctgaaggtcgggcaaaacctgaaatacgatcgcggtattctggcgaattacggcattgagctgcgtgggattgcgtttgataccatgctggagtcctacattctcaatagcgttgccgggcgtcacgatatggacagcctcgcggaacgttggttgaagcacaaaaccatcacttttgaagagattgcgggtaaaggcaaaaatcaactgacctttaaccagattgccctcgaagaagccggacgttacgccgccgaagatgcagatgtcaccttgcagttgcatctgaaaatgtggccagatctgcaaaaacacaaagggccgttgaacgtcttcgagaatatcgaaatgccgctggtgccggtgctttcacgcattgaacgtaacggtgtgaagatcgatccgaaagtgctgcacaatcattctgaagagctcacccttcgtctggctgagctggaaaagaaagcgcatgaaattgcaggtgaggaatttaacctttcttccaccaagcagttacaaaccattctgtttgaaaaacagggcattaaaccgctgaagaaaacgccgggtggcgcgccgtcaacgtcggaagaggtactggaagaactggcgctggactatccgttgccaaaagtgattctggagtatcgtggtctggcgaagctaaagtcgacttacaccgacaagctgccgctgatgatcaacccgaaaaccgggcgtgtgcatacctcttatcaccaggcagtaactgcaacgggacgtttatcgtcaaccgatcctaacctgcaaaacattccggtgcgtaatgaagaaggtcgtcgtatccgccaggcgtttattgcgccagaggattatgtgattgtctcagcggactactcgcagattgaactgcgcattatggcgcatctctcgcgtgacaaaggcttgctgaccgcattcgcggaaggaaaagatatccaccgggcaacggcggcagaagtgtttggtttgccactggaaaccgtcaccagcgagcaacgccgtagcgcgaaagcgatcaactttggtctgatttatggcatgagtgctttcggtctggcgcggcaattgaacattccacgtaaagaagcgcagaagtacatggacctttacttcgaacgctaccctggcgtgctggagtatatggaacgcacccgtgctcaggcgaaagagcagggctacgttgaaacgctggacggacgccgtctgtatctgccggatatcaaatccagcaatggtgctcgtcgtgcagcggctgaacgtgcagccattaacgcgccaatgcagggaaccgccgccgacattatcaaacgggcgatgattgccgttgatgcgtggttacaggctgagcaaccgcgtgtacgtatgatcatgcaggtacacgatgaactggtatttgaagttcataaagatgatgttgatgccgtcgcgaagcagattcatcaactgatggaaaactgtacccgtctggatgtgccgttgctggtggaagtggggagtggcgaaaactgggatcaggcgcactaagattcgcctgaacatgcccttttttcgtaagtaagcaacataagctgtcacgttttgtgatggctattagaaattcctatgcaacaactgaaaaaaaattacaaaaagtgctttctgaactgaacaaaaaagagtaaagttagtcgcgtagggtacagaggtaagatgttctatctttcagaccttttacttcacgtaatcggatttggctgaatattttagccgccccagtcagtaatgactggggcgttttttattgggcgaaagaaaagatccgtaatgcctgatgcgctatgtttatcaggccaacggtagaattgtaatctattgaatttacgggccggatacgccacatccggcacaagcattaaggcaagaaaattattcgccgtcctgcgtttcttctacaggctgcatctcgctaaaccaggtatccagtttctgccgcagcttgtccacgccttgtttcttcaacgaagaaaacgtttcaacctgcacatcaccgttaaacgccagtacagcttcacgcaccatattcaattgcgctttacgtgcgccgcttgccagtttgtccgctttggtcagcagcaccagaacggcgatattgctgtctaccgcccactcaatcatctgctgatccaaatctttcagcggatggcgaatatccattagcaccaccagaccttgcaggctctgacgtttttcgaggtattcgccgagcgcacgctgccatttgcgcttcatctcttccgggacttccgcataaccgtacccaggcaagtcaaccagacgcttgccgtcagccacttcaaacaggttgataagctgggtgcgccctggggtttttgaggtacgagccaggcttttctggttagtcagcgtgttcagcgcgctggatttacctgcgttggaacggcctgcaaaagccacttcaattccggtatcggaaggtaggtggcgaatatcaggcgcactcatcacaaaatgcgtctgttgataattcaaattagtcaaagcggtcgtctccgtcagtcaaagctttgtggcgattatacctgaaccataataaaaggcggatttttcggcgtgagcgttgtaagtaaaagccatacgctttgtgagacattgccgatagtctttatgcgaaatagcagagaaaattctgcgatgcatgtcaaataagctatataaatcagtgaattgcttttatataaaactctgaaaatgtgcaaatactgatggcggttgattgtttgtttaaagcaaaggcgtaaagtagcacccatagagcgaggacgctaacaggaacaatgactcaggatgagggtcaggagcgccaggaggcgaagacagaggattgtcaggaagacaaacgtccggagacgtaattaaacggaaatggaatcaacacggattgttccggctaaaggaaaaacagggtgtgttggcggcctgcaaggattgtaagacccgttaagggttatgagtcaggaaaaaaggcgacagagtaatctgtcgccttttttctttgcttgctttctgttagattccgccgcaaatctatactgaataaaacggctaaaagacgaaccattatgaaaccatcatcttcaaactcacgcagcaaaggtcatgcaaaagcgcgtcgaaaaacacgcgaggagctggatcaggaagctcgtgatcgcaagcgtcagaaaaaacgtcgtggtcatgcgccgggcagccgcgcagcgggcggaaacaccacgtcaggcagcaaaggccagaacgcaccaaaagatccacgtattggcagtaaaacccctattccattgggcgtgactgaaaaagtcaccaaacagcacaaaccgaagagtgagaaacctatgctttcaccgcaggcggagttggaattactggaaacggatgagcgtctggatgcgctgctggaacgtctggaagcaggcgaaaccctgagcgccgaagagcaatcctgggtggatgctaaactggatcgtattgatgagttgatgcagaaactcggcctctcttatgacgatgacgaagaagaggaagaagacgagaagcaagaagacatgatgcgtctgctgcggggcaactaacggattgccgccgtgggccttcccgttctgctgataacccttccggttatatgttatctggtgtggttattcgttaaactacagcggttgtcgcggcgacaaaagtggctgcgcaaccggctgatgacccgaaacgggcatccgccggtacgccgtagccgccagagacgccatcggaaggagtgagcatgtctgtacagcaaatcgactgggatctggccctgatccagaaatataactattccgggccacgatacacctcgtacccgaccgcgctggagttttcagaagacttcggcgaacaggcgtttttacaagccgtggcgcgctatcctgagcgtccattatctctctacgtacatatcccgttctgccataagctttgttacttctgcggttgcaataagattgttactcgccagcagcacaaggccgatcagtatctggacgcgctggagcaagaaatcgtccatcgtgcaccgctgttcgccgggcgtcacgtcagccaattgcactggggcggcggaacgccgacgtatctgaataaagcgcaaatcagccgcctgatgaagctgctgcgcgaaaacttccagttcaatgccgatgcggagatttcgatcgaagtcgatccgcgggaaatcgaactggatgtactcgatcatttacgcgccgaaggctttaatcgcctgagcatgggcgtgcaggacttcaacaaagaagtgcaacgtctggttaaccgcgagcaggatgaagagttcatctttgcactgcttaaccatgcgcgtgagattggttttacctccaccaacatcgacctgatttacggcctgccgaaacagacgccggagagtttcgcctttaccctgaaacgtgtggcggagctgaaccccgatcgtctgagtgtctttaactacgcgcatctgccgaccatttttgctgctcagcgcaaaatcaaagatgctgacctgccgagtccgcagcaaaaactcgatatcctgcaggaaaccatcgccttcctgacgcaatcgggctatcagtttatcggtatggatcactttgcccgtccggatgacgagctggcggtggcccagcgtgaaggcgtgctgcatcgtaacttccagggctacaccactcagggcgataccgatctgctggggatgggcgtttccgccatcagcatgattggcgactgctacgcgcagaaccagaaagagttgaagcagtactatcagcaagtggatgaacaaggcaatgcgctgtggcgtggtattgcgctaacgcgtgatgactgtattcgccgcgatgtgattaagtcgctcatctgcaacttccgtctggattacgcccctattgagaaacagtgggatttgcacttcgctgattactttgcggaagatctcaagctgctcgccccgttagcaaaagatgggctggtggatgtggatgagaagggaatacaggtgacggcgaaaggtcgcttgctgatccgcaacatttgcatgtgctttgatacctatctgcgccagaaagcgcggatgcagcagttctcacgggtgatttaaatagtgaatggcgcttcgtttacaaagtagaaaacgaaagcgccatcaatgtgctgagaacaagattgcctgatgcgctacgcttatcaggcctacaaaacctgttgaaaatattgcttttgtaggccggataaggcgttcacgccgcatccggcatgaacaaagagcacttcatcagcaatctgaaactcaactaaacagcccaatcattgcggcacacagcacggcagcaacggcagtttgcggtgtgtggctgtcaactgcgccactcgataccagattaattattgattccagcataatgactctccccgttttccgggcaagatcatactgaacttatcggaacagtaaagcgtaaaataccagcaatttgcgctcaataatcaatctttacacacaagctgtgaatcactccatccccagctcttttaacttacgcgtcagggtgttgcggccccagccgagtagccgcgccgcttcctgtttatgcccctgcgtatgtcgcaacgcggtcgtcagtaacgtccgctccagctctggctgcgcttcggaaagcagattttgatgaccggaacgcagcgctctgtctgcccactgcgcaagaagcgtcgcccagctgtccggttgcatttgcgaagtactctccgcaaccgttgattcaaacagttcgccgggcaaatcctgaatcaacacttcctgcccggcggccatcaccgttagccagcggcaggtgttttccagctggcgcacgttgcctggccacgccagacgcgtcagagcagcttcggtttccggatgcagtaacttcgcttctacgcccagttcgcgcgcggcaacctgtaaaaaatggcgcgccagacggggaatatcttcccgacgttcgcgcagcggcggcagatgaacgcggataacgttcaggcggtggaacagatcctcacggaacttaccttcctgcactcgctgttcgagattctggtgagtggcagcgataatccgcacatccactttcaccggcgcatagccgccaacgcggtaaaactgaccgtctgccagcacgcgcagcaaacgcgtctgcacatccagcggcatatcaccaatttcgtcgaggaataatgtaccgccatcggcctgttcaaaacgcccctgacgaatggtattcgcgccagtaaacgcgcctttctcgtggccaaacagttctgattcgatcaaatcttttgggatagctgccatattcagcgcgataaacggcgctttggcgcgcggactgtggcgatgcagggcatgagcgaccagttctttaccggtgccggattcgccgttaatcagcacgctaatagaagaacgcgaaagccgaccgataatacggaacacgtcctgcatggctggcgcttcgccgatgatatcggtcgttgggccgttaagctgaatattacgcggctgctgctgttcctggtaatgactgatagcgcgctcaaccagcgccactgcttcgtcgatatcaaacggtttgggcagataatcaaacgccccttgttgataggcgctgacggcagcatccagatcggaatgtgcggtcataatgatgaccggaagcattggatggcgctgtttaatctgcttgagcagcgccagcccgtccattcccggcatacggatatctgaaagcagcacatccggcgttttgctcgccagcgcctccagtacttccgcgccgttctcaaatgtcgtacaggttaaacccgctccagcgagcgcacgttcaagcacccaacggatggaactatcgtcatcgactacccagactatccctcgttgcataaacgtcacctttatttcctgataggcaggtaaaccgagaactcggtatgccctggccaactggtaaattcaattttgcctgaatgctgatcaatcaaattacgagcgatggataagccaagcccggtgccaccttcgcggccgctgaccatcgggtaaaacagcgtatcctgcaaatgaggcggaatgcctggcccgttatcttccacatcaatccgcgccgccagccggtagcgttcgccgtgtaaggtcagttgaaacgcggtgcgggtacgcagaatgatttcaccgccttccggccccagcgcctgtagcgcattgcgcacaatattcagcaagacctgttcaatttgatccgggtcgtgcgccagttccggcaggctgggatcgtaatcacgaatcaaccgcacgttgtccggcagttccatcgacaccagcgttaccacgcgttcagctactttgtgaatactttcggtaacgcgcgtaccgggcagctgcggccccaacagacggtcgaccagatttcgcagccggtccgcctgttcgataatcactttggtatattcgagtagtgatgggtcaggtaacgctttgctgagcagctgcgccgcgccacgtaaaccgccaagcggatttttaatctcatgtgccaggccgcgcactaaatcacgggcagcaacctgctgggcgtgctgtagctgttcctgacttaagcggcgctggttatccatcggagccatctccagcaggatcatgccgtccggcatacgctgggccgtcacagaaaggatatgcgagcgcccgtcgatgaccagcgtcacttcgttatcggtaaaaccttgccccgcctccagactttcttgcatcagctcgatatttaatgagaagtagctcaacagttccggtaacggtgtaccaaacaatttgcgggagctttgggcgagcagttgttgcgcggcggggttggcgtaatggatcgccaggttgtcatcgattaacaaaatactgttaatcagcgagttgaggatctgcccagcatcgggctgcgtgcctgttgccataaagcagtctcctgaacaggttgcaccattttagtgcattatagctttttacggataaaaagcgcgaagcatcagagaattgacggagaaaaaagcccatgcagagatgggctgaaagtttccacggcaactaaatcccggcgttgttgcgccgggtagtacaacttcaactattagacgctgtagtacagctcaaactctaccggatgcggagtcatacgcacgcggtcatcttcttcgcgacgcagagcgatgtacgcatcaattgcttcgtcagtgaacacgccaccggctttcaggaactcgcggtccagatccagttcgttcagtgcttcttccagagagcctgcaacctgtgggatctctttcgcttcttctggcggcaggtcatacaggtttttgtccatggcttcgcccggatggatcttgttcttgataccatcaagaccggccatcagcagggcagcaaagcacaggtacgggttagccgccgggtccgggaaacgtacttcgatacgacgtgctttcggagaagaaaccaccggaatacggatagacgcagaacggttacgcgcagagtaagccagcattaccggtgcttcgtagcccgggaccagacgcttataagagttggtggtcgggtttgccagggcgttaatcgctttagcgtgtttgattacgccgccaatgtagtacagcgcctgctcagacagacctgcgtatttgtcgcctgcgaacaggttaacgccgtttttagacagagacatgtggcagtgcataccggagccgttatcaccgaacatcggttttggcataaaggtcgcggttttaccgaagcggtgcgctacgttgtgcacaacatatttgtagatctgaatttcgtcagcttttttggtcatggtattgaagcgggtagccacttcgttctgaccagcagtcgctacttcgtggtgatgggcttcaaccaccagacccatctgttccatcaccagacacatttcagaacgaatatcctgagcagagtctaccggcggaaccgggaagtaaccgcctttcactgccggacggtgacctttgttaccaccttcgtattgggtggaggagttccatgcgccttcgatatcgtcgatagcaacgtgggaaccagagatagatgatccgaaacggatgtcatcgaacaggaagaattcaggttctggcccgaacagtacggtgtcggcaatgccagtggaacgcaggtaatcttcggcgcgcttcgcaatagagcgcgggtcacggtcatagccttgcagggtgccaggttcaaggatgtcgcaacggataatcagggtggagtcggcgaagaacgggtcaatcactgcggtggatgcgtctggcatcagcaccatgtcggactcgttaatgcctttccagccgccaatcgaggagccgtcaaacattttgccttcttcgaagaattcagcattcacctgatgagcagggatagtgacgtgctgttctttacctttagtatcggtgaagcgcaaatcaacaaacttcacttcgtgctcgttcagcatcgtcagtacgtgttcagcggacatactttaactctcctggattggtcatggtcgtcgtggtaacgaaatctgcaattattttggccgtgtcgccgtaaaaaagataaagcgaaatctgtgccaacttttaaattgcccctaaaaggcgttatcatgcgcaccatcgtgcaaaagggctgcaccacgatgtgaatgttgcaccaatatagtgcttcaatggaaacattaagcaccatgttggtgcaatgacctttggataaccctttttatgctccgtgaaagcgatcacaaagggactctgcaatacttgtttgcggaggatgtttgtgatcctgttttgtagtgcgattaatccgtgtacaataacgcgctatttctaatgcctgaggcaaagttgtgatcgaaaaattgcgtaatatcgccatcatcgcgcacgtagaccatggtaaaaccaccctggtagacaagctgctccaacaatccggtacgttcgactctcgtgccgaaacccaagagcgcgtgatggactccaacgatttggagaaagagcgtgggattaccatcctcgcgaaaaacaccgctatcaaatggaatgattaccgtatcaacatcgttgataccccggggcacgccgacttcggtggtgaagttgaacgtgtaatgtccatggtagactcagtgctgctggtggttgacgcatttgacggcccgatgccgcaaacgcgcttcgtaaccaaaaaagcgtttgcttacggcctgaagccgattgttgttatcaacaaagttgaccgccctggcgcgcgtcctgattgggttgtggatcaggtattcgatctgttcgttaacctcgacgcgaccgacgagcagctggacttcccgatcgtttacgcttctgctctgaacggtatcgcgggtctggaccacgaagatatggcggaagacatgaccccgctgtaccaggcgattgttgaccacgttcctgcgccggacgttgaccttgacggtccgttccagatgcagatttctcagctcgattacaacagctatgttggcgttatcggcattggccgcatcaagcgcggtaaagtgaagccgaaccagcaggtcactatcatcgatagcgaaggcaaaacccgcaacgcgaaagtcggtaaagtgctgggccacctcggtctggaacgtatcgaaaccgacctggcggaagctggcgatatcgtggcgatcacgggccttggcgaactgaacatttctgacaccgtttgcgacacgcaaaacgttgaagcgctgccggcactctccgttgatgagccgaccgtttctatgttcttctgcgttaacacctcgccgttctgcggtaaagaaggtaagttcgtaacgtctcgtcagatcctggatcgtctgaacaaagaactggtacacaacgttgcgctgcgcgtagaagaaaccgaagacgctgatgcgttccgcgtttctggtcgtggcgaactacacctgtctgttctgatcgaaaacatgcgtcgtgaaggtttcgaactggcggtatcccgtccgaaagttatcttccgtgaaatcgacggtcgtaaacaagagccatatgaaaacgtgactctggacgttgaagaacagcatcagggttctgtaatgcaggcgctgggcgaacgtaaaggcgacctgaaaaacatgaatccagacggtaaaggccgcgtacgtctcgactacgtgatcccaagccgtggtctgattggcttccgttctgagttcatgaccatgacttccggtactggtctgctgtactccaccttcagccactacgacgacgtacgtccgggtgaagtgggtcagcgtcagaacggcgtactgatctctaacggtcagggtaaagcggtcgcgttcgcgctgttcggtctgcaggatcgcggtaagctgttcctcggtcacggtgcagaagtttacgaaggtcagattatcggtattcatagccgctctaacgacctgactgtaaactgcctgaccggtaagaaactgaccaacatgcgtgcttccggtactgacgaagccgttgttctggttccgcctatccgcatgactctggaacaagctctggagttcatcgatgatgacgaactggtagaagtgactccgacctctatccgtattcgtaaacgtcacctgacggaaaacgatcgtcgccgcgccaaccgcgcaccgaaagacgattaatttcgttttttagttataaaaaacctgccatcgctggcaggtttttttttacctgtcgtgagcgcacaccaatgcgagtatctcccttataagtctgtggttacgtcaatagagagctttgtcacaattatctgcaaagtcatacgccgttaattgctttcttttttggcgtaagcgtaagatgcctcatctggtttaaaccaaaaggattaaacaatgacgggaaatcaatccaccgtagaaaatgcaaaagagaaactggatcggtggttaaaagatggcatcactacgccgggtggaaaactcccttcagaaagagagctgggagagctgctgggcattaaacgtatgacgctgcgccaggcgttgctgaacctcgaggcagaatccaaaatcttccgtaaggatcgtaaagggtggttcgtgactcagccgcgatttaattacagcccggagctgtcggcgagctttcagcgggccgcaattgagcaagggcgggaaccttcctgggggtttaccgagaaaagccgtaccagcgatattccccagacgctcgcgccactgattgcagtgacgccatcaactgaactctatcgcatcaccggctggggggcgctggaaggacataaagttttctatcacgaaacatatattaatcctgaagttgctccgggttttattgaacaacttgaaaaccactcattttcttcagtctgggaaaagtgctaccaaaaagagacggtagtaaaaaaattgattttcaaacccgtcagaatgccgggcgatatcagcaagtatcttggcggttctgcgggtatgccagcgatcttaattgaaaagcatcgcgccgaccagcaaggcaatattgtccagatagatattgaatattggcgatttgaggccgtagacctcatcattaatctgtaggtgttttatggtgacaataaataacgcaagaaagattctacaacgtgtcgacactcttcctctttatttacatgcttatgcctttcatttaaatatgcggctggaaagagtgttgcctgctgatttacttgatatcgcaagtgaaaataatctacgtggcgtcaaaatccatgttctggatggcgagcgtttttctcttggtaatatggacgataaagaactctctgcctttggagataaagcccgccgtctgaaccttgatattcatattgaaaccagcgcctcagataaggcatctattgacgaagccgtcgccattgcgttgaaaactggggcatcgtccgtacgtttttatccacgttatgaaggtaatttgcgcgacgtattatcgatcatcgctaacgacattgcctatgtacgggaaacgtatcaggacagcggcctgacttttacgatcgaacagcatgaagatttaaaaagccatgagctggtgtcgctggtcaaagaaagtgagatggaatctctttccttactgtttgattttgcgaacatgatcaatgcaaatgagcatcccatcgacgctttaaaaacgatggcgccgcatattacccaggtccatatcaaagatgccttgatcgttaaagaaccgggtggcctgggtcataaagcctgtatttcaggtcagggtgatatgccgttcaaagcgttattaacgcaccttatatgcctgggtgatgatgagccgcaggtgacggcatatggcctggaagaagaggttgattactatgcgccggcgttccgctttgaagacgaagatgataatccgtggatcccttatcgccagatgagtgaaacaccattgccagaaaatcatttactggatgcgcggttacgtaaagaaaaagaagatgcaattaatcagataaatcatgtgcgtaacgtactacaacaaatcaaacaagaggcaaaccatcttctgaaccactaataagttttaactcatacgcagttaataaaaccattccatatgaatggtcggtatcttattgcctttaaaacagtgattttaaaaatcgcttaggggatgttatgctcacgaaaaagaaatgggcgttatttagtctattaacattgtgtggcggtacaatttataaattaccgtcgctgaaagatgcgttttatatcccgatgcaggaatatttccatttgaccaatggtcaaattggtaatgctatgtcggtaaactcatttgtcacgacagtgggtttttttctgtctatttattttgccgataaactaccgcgcagatacaccatgtcattctcactcattgcgacaggattactgggtgtttatttgacgacaatgccggggtattggggcatcctctttgtctgggcgctatttggcgttacttgcgacatgatgaactggccggtcttgctcaagtcggtaagtcgattgggcaatagcgaacaacaaggtcggttgtttggcttcttcgaaacagggcgtggcattgtcgataccgtggtggcattttctgcgttggcagtatttacctggtttggcagtggcttattgggttttaaagcaggcatctggttctattcccttattgtgattgccgtaggcattattattttctttgtcctgaatgacaaagaagaggcaccgtccgttgaggtgaaaaaagaagacggagcatcgcaaaacaccagtatgacctcggtgctgagagacaaaaccatctggcttatcgcttttaacgtcttcttcgtttacgcggtttactgtggcctgacattcttcattccattcctgaaaaacatctatctattgcccgttgcgctggtgggggcttacggcatcattaaccaatactgtctgaaaatgattggtggaccgattggtggcatgatttcagataagatcctgaaatcgccgagtaaatatctatgctacacctttatcatcagtaccgctgcgctcgtactgttgattatgctgccgcacgaaagtatgccggtctatttagggatggcatgtacgctgggctttggcgcgatagtctttacacagcgagccgtattttttgcacctatcggcgaagcaaaaattgctgaaaataaaacaggcgcggcgatggcgttgggtagctttattggttacgctccggcgatgttctgcttcagtctgtatggctacattctggatttaaatccgggggttattggctacaaaatcgtgtttggcattatggcctgcttcgcattctgtggtgcggtggtttccgtaatgctggttaagcgaattagccaacgtaagaaagagatgctggcggctgaagcttgattaatggccggatgtgcttactccggccaacgaaaaccgtatcaaccgtaggccggataaggcgtttacgccgcatccggcagtttcacatcagaagaaatacttcgtcccgatacgaatctggttttgctcgcggtggtacggttcgacattacgatctaaccaacgtaattcgaaataaggcagccagtgttcattaatgcgataacggaaggtattagtgatttcccagtgatgatcttttccattgctgctattaaagtcatttacgcgtatgaaataatgtggctcaaatgtataggaaaatttatcggtgattttaaaattccagtaggtgccaatttcataggtgtcattattatccagttccccgctcaaatctgttgaactatagttattatggttatagcgatttcgtactgtcagattaaaccatggtacaaatttatagttgacgtccagatacactgcaccacccgaaccgatactcttatcattaattaagccaccgggctggatggttaatttatcggttggtttgaataaaggataccaaccttcaatttcattatagccatgttttagttcatcttctcgctgaaaggtgtaggtattggttaacataatacccgcgcccatatcgaagttataacccacacgtagcataacctcgccctgatcggaggcaagattatatgcctccctgttttcgacgtatgcgccagcaaataccgaggcagaggtcagagaagataataaaattattgcattaatctttttcataataagtccattttttaaacgtagggaggccgccacccaccaggatggaaatagcggctattgacatttataacgttacggaagccgttttttcttctgtcgccatctctttatttttgcgttggttgatttcctcaataatcaatgcaaaccgtttttcattgagtgtgtaaaagaatcccatcgtcaatgcagcaataattgccagtgcacaaggccagataaaaatgagctgacgcaaaccctgtaatgtcgcatcgctttgcgcgatgttgggaacataaccaatttgcgtcagcataatgcctggcaagaagccagcaagtgcggcagaaattttacgaaagaaggtataaccggtataaacagaaccttcggcacgaataccggttttccattcaccgtaatctacggtatctggtaccagtgcccagttcaggctgtttacaaaggccgtgccaaaaaaggcgacacaagagaacatgacgaaagtgaaagagttacttccccagaaataattcagtatatcacccaccgcccatagcaccatgccagctaaataaacctgttttttaccaaaacattttacagttactggcaccagtaatacgccgacgaggatgcatcccatactgaagaatcccatccacgacaataaattaatatcattcagcacatactgggtgtaatagacctgaatcgccagtttgatattaaatgccgccagagtacacaggttagcaatgcataaaaccagcaatggtggattacgaaatatcgcgcaaaaagatttgagaatactggctttatgtccggttggcgctgtgtccacataatgctctttgacgcctctgtagcacagcatcataaaaataaagccgccaatggagaacataagtgccgcacaggcataaccgacggttgagtcagaaaaaagcgactgcaacggaataaacgccacggtacaaatcaatagccctatggttgcaccaccctggcggtaagccgcgagctgcgcgcgctcattcgggtttttggtaattgccgggatcatcgcaccatacgagcagttcatcagactgtatgaaagtccaaacatcataaacagcgcggtggcaatcgtcgttttaaccggcaaacaaaaggtggtggcgataaactggagcgttgcaattaacgccgccggaaccgctgcatataaaataaagggacgaaatttgcctttaggcccaatatttttccgcgagtcgagtaaaaatccggtgagcatatcggtaaacgcggtaaaaaacttcgccaccagaaagataatcccgccatagtaagcaggcatccctaattcatcggtataaaatttgaggagatacagagtaccgatgcagagcattaaattcgaaccgacgtcgcccataccataggcgattttttcccgcagattcagttttaatgtcagtggattatggtcagacataatcactccttataacgccccgcagggcgtcgtttattattattacgccgtgcgtttacgggcttctatctcttccacaatgcggacatacatcttctcgttcaggctgtagaagcaacccatcgccacaatggtgactaccgccagtgcgcttgggtagatgaagatcaactggcgtaacccttcaatggtgtggtcagcctgtgcgacgttcggcacatagccaatttgcgtcagcatccagccggggaagaaaccagccagcgcctgagacactttgcgaaagaaggtaaaaccggtgtagaccgttccttccgaacgcacgccggtgcgccactcgccgtactcgacggtgtcggaaaccagcgcccagttcaggctgttaacaaacgctgagccaaagaacgccaggcaggagaacgccacgaagctgaccgaaccgccgccgaagaaatagttgagcagatcgcccagcacccaaatcagcaggccgccgatataaactttcttcttgccaaaacgtctgactgaggcaggcatcaggaatacgccgatgaaaatacagcccatgctgaaaaatcccatatacgacaacaggatgggatcgttaagcacgtactgggtgtaatagacctggatggcgagcttgacgttaaacgcccctaaagtgcagaggttggcaatgcacagaatgaacagcgggcggttacccgcaattgcgcggaaagattgcagcaggcccggcttttgcgccggattagcaggctgggtttcgacataacgctctttcacgcccgagtagcagatccacataaacagcaggccaaacagtgaaaacagcgtggcggcgaagatatagccaagttgctgattaccttcgataagattcataactggcacgaatcccaccgtgcacagcagcaggcccagcgtagcgccgccctgacgccatgccgccagtgaggcgcgttcgttggggtttttggtgatagcgggaaccattgcgccgtaggagcagttcatcatgctgaaaaacagtccgtaaagcataaacagaatagtggccatcaccgttttaccggtgacatcaaacggtgtgccgacaaagttggcgatcgccagtaaggtgaccgggaatgacgcatacagaataaaaggacggaacttaccttttggaccgatcttgcgtcgggaatccaacataatgccggtacccatatcggtaaacgcagtaaagaattttgaaatcaaaaagataatgccgccataggtgcctggcagccccagaacgtcggtataaaacttcaaaagataaagcgtaccgatatccagcaggatgttagaggccaggtcgccaataccgtaagagagtttctctttaaagggcaggcgtaaagttgctggatcttccgttgtgatgtgactcatcgatgttctccctttgcccatgagtttccccacgggcggatgtgattagatgctttttaacgacgcgaacagtgccgcccattcgctatcggcgcgataaaagaccggcggcttgccgatgggcgcattaacggtaacttccccgccccggaacgcttcacccgtccaggcgtggacccagttatcctccggcagatagagcgtccagtcgctacggccttcttcatgcaccggagcgaccagaatgtcgcgacctaacaggtactgatatttcagggtgtaagtgtgcgcatcgtcttcgtaatgcaggaacagcgggcgcataaccggcaggccggacttcgcattcagcgcgacagcctctttcaggtaaggtttcagggtggtgaagacggaggtcatacgggcaaaatgggcgatagtttctgcgtcgccgtcaaactgccagttgtcgccaggacggttaccttcgtgggtgcgcatcatcggcgtgaaggcgctgaaatcgcaccagcgcagcagcagctctttgctgcgcttcatctcaaacagggtggtgtaaccgccaatgtcgctgtggtgcaggccatgtccggtcattgccagcgacagcgccgccgggacaaccgacgccaggccatcgtcgagactccagtcgacgttctggtcgcccgcccacatcatggtggagtatttctggctaccggtagaaccggcgcgcataaagaaaaggatctcgccgagcttgcccgtttcttcaagggcttcgtagttacacttcgcccacagcgcaggccaggcgttatgcataatttcggcactgacgccgttatgcaggtacgtgtcggtgggcagatactcgccgaagtcagccatccagccgccgcagccgagttcaatcatgttctttttgatcacttccttgaaccaggcgtaggcttctggattagtgagatcgacaacgccgccgtaaaactcgccaaactccaccagatagtcaccgccagaggcatcttttgccagatagccgtgttgtgccgcttcttcgcagagatctttatcgctggcaacatacgggttgatataggccaggaactgcacgccctcctgattccactgcttaatgcgtgaatccagttgcgggtagttttcgctgttccacttccagttccacatcacgcgtttgccaaaagaggtcatacgaataccggaccagtcctgcgcccagatgccgttgaccttcacgcccgcgttacgcatggtgtccagtttcttctggcacacttccgtcccgccctgaatgccgagcgttactccgtcataaatccagtcgggcagttctggctggcgtcccagcagggcggttaatttttccagcagggaaatgtatgtgtcagcacattcaaaacgcagcgttgctttgtcttcccacagcgccagttcatggtattccggggcactaaagtcgaagttcatatagcaactgttatcaacatggcagtaatacttctgcgtgctgacaaacgtaggctgtgggaagaaagtccagtaatagtcgccgcccgcattttctttgcagtcggcctgccaggtgacataggtttgtttgttgcgaccaacgccttgttcactggtccatagcgggaacggtttgccacgcagatcgaagtaggaaaactgttcgccgcagccgtagatatggtcctctggttgagcggcaaggcgcagccagatacggttgtggttaaggttgtcgttttgtagttccagcaataaacggccctgatcgtcggcagagatattcagcgtggcgctaatgtcagaaccacggctgaaatgaattaaccaaccatccggtgactggctgacgatggcgtcggtaagcgcaattttctcctgtagtttatctttaatgctgaaattaccgcggaacatatcgatatccgctatacctgagccaatccataaacaaggattatctttgctatgggttaaaataagacgttgttgaaaatgtagggtaaaactgtcgttattctgatgaaattgaaaatctaataactgtggacgtggcgtatccataactaatctccatagagttgagaacgagattgttgccttcctgttattacaggcttatgtaaaatgattctcataaaactgatatataaaaactttacagaagctgagctgtttttaacttaataaattgaagatacataatgttgcctttagcgagtgaaatgttcttcaatgattttgactgctaatcaatacaagttattttctctgtccgtaaatgttaaaaaacaggcggtgcggttttcctggttccagtaataataagtcgatacctgaattaaaggcgttaggcgggcaactcataggttcaactgccagtccctgacgctgtaatttttcaccgctataaatttgtacccagggttgatcgcaacaaaggctaaccgaaagcgcctgttgtggatgggtaatggttatttcccacagatcattagcggttttaaaggtgtggtcgatttttgtcgcggctattgttttcgcctgcgtgaaatttaaatccagctcatcaacgtggtgaagcgttgtcggatttacgtgttcatcaacggcataaacctggtttgccggaagctggaacagatattcatcaacagatgttaagttgcaggttaaataaggatgaatacccacgccataaggcgctgcgacagtgccgatattctggcttgcgatctcaacggaaagacccgtgtgtgcgttgagcgaataaacaacttgtgaagccagcataaacggatagccgtaactgggcggcagaaaagctgtcagggtaacgctggtggcggttaattcactaatttgccagtctcgccaggcaagcagcccgtgaatagcggcttttgaactatgttcattaatgggtaactgatattcctgcccctgatagcggtaacagccgttggcgatccggttcggccacggaataagcactttacccagatgcgccagcggcatctcttcgggtttgtgcgggatgactaaatgacaaccctgaaaggttaattcagccagaccagcaccgacggtcacaatggtcgcgtgataatcccccgcggcaagtgaaacggtctgtccactgcaatgcatattggtgatttgcatacaaggcaccttaattaacgacatacagcctcccgtgaggctgatgtcaaacccaaaaactgcaccggacggtcccctcgcccctttggggagagggttagggtgaggggaaaacccgcaccctattttcagatcagttatttcgcattaatatccagcagacccgctgcaaccgctggagccatgccgggcgctaacgggatacgcgggatcaccaggcaatgcagcaggtgataaatatcctgtttgccgtcccagactttggtggtgaccttattgtccgcatccagctcctgccaccaggaaccattttcatagtccatcaggtacttaatgcagtactcccaccatgtttgataccaggtttcatactggcgatcgccagtgacggtgtagagcgcgtaggccgtacccattgcttcgacgataggccaacgtacacgttcgcggaccaccggttttccttcccagtcaacggtataaacaatcccgtccgcgccatcgggtgcccaggcatcgcgcacggtggcgttaaacagacctttggcatcttctagcagccatgctggtggttgttcgcaacgggcttccagggcagcatggatgtgcagcattaaacggccccattcgatccagtggcctggtgtacctccaaacgcgcggaagcgatgcgccgggttatctttgttgtaatccggcagcggattccactgggtatcgaagtgttcgttaacgcgataatgattatttctggcgacgtcgtggataatcacggaagccacgcgaatcgcgcgatccagccattttttgtcgtgagtgacgtcataaacaatcaagaaagcttccaccgcgtgcatattggcattgccgccgcggtactcttcggttttgctgaaggcttcgtcccaggattccaggcacatctgctcttcttcgctccagaaatatttctcgataatttcaatggtgtaatcgagcagcttgcgcgcttccgggtgacccgttgtgacggcgctggcggcacccagcagagcaaagaagtgttgatagccctgtttggaggcatccaccacgccctcgtcattcacgcaggcataccagccgccatattttttatcacgcagtgcgccgttcatggctttgataccgtgatcaaccaacgagtaagcgccaggtcgacccatcgccgcagcaacggaataaacgtgcaacatacgagcggtgatccacagatgggtgcccatctcttctttgatttgccctttattgcctaaccagccaaaaccagtcggcactacggaatttttaccaaaatcaaagatgcggtcggtttcctgttccagccaacggttgtggcttagggtgttaaaccatttcattccttttatcctcatcttagcggcgtttagccatcatttcgtcgacgatatcgccaagttgttgtaatttcggtgcgcaaacgtcacgcagcatcagttcgttgtctggtaaaccgacgaccgatgcccagactgcacggcctgccaggaatcccgatgcgcccgccgtcattgccacgcgtacggcacgcgggaacagtttttcgtcgacaccggaagagaggatcacccatggcatattgatatggtcattcagacgttgtgaagcacagagaagctcttgttgcggacctttgccataaagcggcatttcaactttgtagaggtcagcgccactgtcgcccagctctttggcggcatcgatgatcgcttgttcgcgatcgaatttatcgccacgacgcggtgggcggacgactggctcaatgatgcttaccagaccgtgtgagtggcacagttcgttgaactctttcaccatatccagacgttgctgcgcatcttcatcactacgccacagcaccagcagttttaaggctttgccaccgtcttgtttgatctgtagcggattgattttgcggtcaataaccacgctatcgaccggaataccgttgccaggaatgaactcatcggcggcgacaatcatggcgcaacttttggcaatcgcgttttgctcaaccacctggcggtagcagaattgttgatctaccagaatcgccgaggcataaggcgagagggcctttgcagcgttaactttgaaatcagttaaaacgctatcggctaccggagcgggtgccccagccgcggcaaacatcatgcgcatggcttcgcgctgatcgaccgccagcatggcaaaaccgcccgatgcgcgcgtaatgtcgttgatggtgtacttattcattcatttattcctttatccagtcgttacatttttactttggcagtcatcccggcactgacacggacctgttccagaatggcggaccagtcctggcgaccgcgacccgctgcgcgcgcctggctataaacctcccgtgaggcggcccccagcggcattggcacatgcagctggttggcgacatcaagggcgatgccaagatccttatgggcaagatcgatcatgaaggcgggagaaagatctccgctgaggactttgtttggccaggaagtggtgaagtgacctttaccggcggcggtaccgctcatcactttgacggcaacatcgaagggaagattcagggcttcgcacaaaacggcggcttctgccgaaagcgcattgagcgcgatgctcatgtagttgttgatgagcttaacgcggatccccatgcccggaccgccagcgttgatcaactcactgcccatcgccatcaggatcggtgtggcacgttcaacttgttcagcggtgccgccagccagcagtaacagagtaccggtaatggcatttgcagaagtacggcctaccggaacatccatcatgctgaagcctttggcttgcatatcggcaatcaatttatcggtttgcagcggatggatggtggacatatcaatgaccagcgcatcggtagataagccttcgcaaacgccgttttcaccgaacaacacgttgcgcaccagatcgccattcggcaacatggtaatgataaattcggcatctttagcggcctgcgccgggttggcggcgggagtcgcacctttgtctaccagatgccgcacagcttcggcgttcacatcaaagacgcgaagttgatgcccttgctgcaataaattgctcgccattggcgaacccatttgtcctaaaccgataaacgcgattgctgccataaccctctcctgaatacagtgatgtcactttttgtcatttatgacatgctttgcttgtctgtttttgatcgtatttgtaatttatcgtcaaaaaattgacagccgtcactttttaaacaattggtgaaattaaaatgaacgcatcccaaaatgtttaaggaatgaccatgattcgtgttgcttgtgtaggtataaccgtgatggatcgcatctattacgtggaagggttaccgacggagagcggtaaatacgtggcgagaaattatacggaagttggtggcgggccagcggcgacggcagcggttgcggcggcaaggctgggggcgcaggtcgattttattggtcgcgtaggtgatgacgacacgggcaacagcctgctggcagagctggaatcctggggcgttaacacccgttacaccaaacggtataaccaggcgaaatcttcgcaatccgccatcatggtggataccaaaggcgagcggataatcattaactaccccagcccggatctgctgcctgacgcagagtggttggaggaaattgatttctctcagtgggatgttgtgctggcagatgtacgctggcacgacggcgctaaaaaagccttcaccctggcccgtcaggcgggtgtgatgaccgttctggacggggacattacgccgcaggatatcagtgagctggtggcattaagcgatcacgcggccttttcagaaccgggtctggcgcgcttaacgggcgtgaaagagatggccagtgcgctaaaacaggcacaaacgctcacaaatggtcatgtctatgtgacccagggtagcgcaggctgcgactggctggaaaatggtgggcgtcagcatcaaccggccttcaaagttgatgtggtagataccacaggtgcgggtgatgtttttcacggcgctttggcggtggcgctggcaacaagtggggatttagcggagtcagtccgcttcgccagcggtgtagcggcgttaaaatgcacacgtcccggtggacgagccgggatccctgactgtgatcaaacccgatcttttttgtcactttttgtataaaatgccagggtgatggtttttcgaggaattttcatgagccttaccgaactaaccggtaacccgcggcacgaccaactcctcatgctgatcgccgagcgtgggtatatgaatattgatgagctggcaaatctgctggatgtctccacgcagacggtccgccgggatattcgtaaattaagcgagcaaggcctgattacgcgccatcacggtggcgcgggtcgggcttccagcgtcgttaatacggcgttcgagcagcgtgaggtttcgcaaaccgaggaaaaaaaagcgattgccgaagcggtggcagactatattcctgatggttcaacaatatttatcaccattggtacgactgttgagcatgttgcccgggcgttacttaaccataatcatttgcggataatcaccaacagcctgcgtgtggcgcatattctttaccacaacccgcgctttgaagtgatggtgcccggcggtacgttgcgctctcataatagcgggatcattggcccttcagcggcgtcctttgtggctgattttcgtgctgattatctggtaacaagcgttggggcgattgagagcgatggcgcgttgatggagtttgatgtaaacgaagctaacgtggtgaaaacgatgatggcgcacgcgagaaatattctgctggtcgccgatcacactaagtatcatgcttcggcggcggttgaaattggtaacgtggcacaggtcactgcgctctttaccgacgagctgccgcccgctgcgctaaaatcacgcttacaagacagccaaattgaaatcattcttccccaggaagacgcgtagatttttgtgaccgttaacctggcttcataccttgccacatagccaaacccatcctttcccgctacagttaatttcttgtggcgcgaaaggaggcaaaaatgctctatatctttgatttaggtaatgtgattgtcgatatcgactttaaccgtgtgctgggagcctggagcgatttaacgcgtgttccactggctacgcttaagaagagtttccacatgggggaggcgtttcatcagcatgagcgtggggaaattagcgacgaagcgttcgcagaggcgctgtgtcatgagatggccctgccgctaagctacgagcagttctctcacggctggcaggcggtgtttgttgcgctgcgcccggaagtgatcgccatcatgcataaactgcgtgagcaggggcatcgcgtggtggtgctttccaataccaaccgcctgcataccaccttctggccggaagaatacccggaaattcgtgatgctgctgaccatatctatctgtcgcaagatctggggatgcgcaaacctgaagcacgaatttaccagcatgttttgcaggcggaaggtttttcacccagcgatacggtctttttcgacgataacgccgataatatagaaggagccaatcagctgggcattaccagtattctggtgaaagataaaaccaccatcccggactatttcgcgaaggtgttatgctaaaaaccattcaggacaaagccaggcaccgtacccgtccactatgggcctggctaaaactactctggcaacgtattgatgaggacaacatgacaaccctggcaggtaaccttgcctatgtgtcgttgctctcattagtgccgctggttgccgttgtttttgcgcttttcgccgcttttcccatgttttccgacgtcagcattcagttacgtcactttatttttgccaactttctgcctgctactggcgatgttattcagcggtatatcgaacaatttgttgccaattccaacaagatgaccgccgttggggcgtgcgggctgatcgtcaccgcgttattgctgatgtactccatcgatagcgcgttgaataccatctggcgcagtaaacgagcgcgaccaaaaatttactcgttcgccgtgtactggatgattttaacgctggggccgctgctggcaggggccagtctggcgatcagttcctatttgctctccctgcgctgggcgagcgatctcaatactgtcatcgataacgtgctgcgtatttttccgctgctgttgtcgtggatctccttctggttgctgtacagcattgttcctaccatccgcgtacctaaccgcgacgcgattgtcggcgcgtttgtcgccgcgctcctgttcgaagcaggaaagaaaggtttcgcgctttatatcaccatgttcccgtcatatcagctcatttacggcgtgttggcggtgatccccattctctttgtttgggtctactggacatggtgtatcgtcttgcttggcgcggaaattactgtcactctcggggaataccgcaaactaaaacaagcagctgaacaagaagaagacgacgaaccatgattgcattaattcaacgcgtaacccgtgccagcgtcaccgtggagggagaagtgacgggcgaaattggcgcgggacttttggtgttattgggtgtcgaaaaggatgacgacgaacagaaagcaaaccgtctgtgcgagcgtgtgctcggctaccgcatctttagcgatgccgaaggcaagatgaatctcaacgtgcaacaggcgggcggcagtgtactggtggtttcccagtttaccctcgccgcagataccgaacgggggatgcgcccaagtttctccaaaggcgcatcaccggatcgcgcagaggcgttatatgactatttcgtcgaacgctgccgccagcaagagatgaacacgcaaacaggacgcttcgctgccgatatgcaggtatcgctggtcaatgatggccccgtgacattctggttgcaggtatgagccagcttccagggttgtcacgggaaacaagagagagtatcgctatgtatcaccttcgggttccacaaacagaagaagagttagagcgttactatcagtttcgctgggaaatgttgcgtaagcccctgcatcaaccaaaaggttcggaacgcgacgcgtgggatgcgatggcgcatcaccagatggtcgtcgacgagcagggtaatctggtggcggtaggccgattgtatattaatgccgacaatgaagcgtccattcgctttatggccgttcacccggacgtgcaggacaaagggttaggaacgctgatggcgatgaccctggagtcggtggcgcgtcaggaaggcgttaagcgcgtgacctgtagcgcccgtgaagacgcggtggagtttttcgccaagctggggtttgttaatcagggagaaatcaccacgccaaccaccacgccgattcgccattttttgatgattaagcccgtcgccactctggatgatattttgcatcgcggcgactggtgcgcgcagctgcaacaggcgtggtacgaacatatcccgcttagtgaaaaaatgggcgtgcgtattcaacaatataccgggcaaaaatttatcaccaccatgccggaaaccggtaatcagaatccgcaccatacgctgtttgccgggagtttattctcactggcaacgctcaccggttgggggcttatctggctgatgctgcgcgaacgccatctcggcggaacgattattctggcggatgcgcatatccgctacagcaagccgattagcggtaaacctcatgcggtagccgaccttggtgccttaagcggcgatctcgaccgtctggcgcgcggacgaaaagcacgggtgcagatgcaagttgaaatctttggcgacgagacgccgggtgcagtgtttgaaggcacgtatatcgttctgcccgcgaagccatttggcccgtatgaagagggcgggaacgaagaagagtaggggcgttttacttgactgaaaaggttttcaatctgaaaaccttttcagggcccaggtccgaagttaccttcccgctctccaggcaacatcccgtagtgccgatcgcgcggcctcgctgataccacctaactgaaaaaatccgtggataacgccaaggtagcgttggcaggtgcattgcactccttgccctgtcatgcggtgatacaacgcttcaccttcatcgcaaagtgggtcgtattcagcggtaatgatatgtacaggtggcaagccattgaaatcatcgcgccaaagagggctggcttcaggatgcctgcgttcaatgcctggcagatacatctcaaagccgctcagtaaagtgtcgcgtgtgatgatgtaatcgtgaccattgcgtatgtagctttcgaaatgcgcagtcgcatcaagcataggataaattaagatgagttgtgccggttgccactcgccagcacgctttaatcgcaaagcagttaccagcgccagatgtccgcccgcactgtcaccggcaagagttatacgttgtttatcaacgccgagtcgttcggcgtgttgccagactatttctgcacctcgttgcgcatcatcatgggcggcggggaaagtatgttccggtgccagccgatactggacggcaataacccgacattgcccgtaataggctaactggcgcagctggttgtcgtgagttgcgaacccgccgctaacaaaacagccaccgtagtaataaattatcgtcgggagtaatgtcggggcattcagcggcgacactattcgtaaggtcatcccttcaagttcgatagtctgaatatctacccgcgtttctgtctcacccgcaaggacagcgctggcgatatagccctccctgcgctgcgcaatactttgttgacgcgatgaggggcgacccgcagcgataaacttttcgactaactctgcaattcctttttccagtgccatagtagaacttattttgctgtatgaatgtacagtcttatacacccgtttttgctggatggatacagggaaattcacgggcgtgaaaaatctggaaagcgcctcgcaaatctaaagactaacccggcagagacgtggttttgctggagcactatcagtaagctagtggtttcaagggtacgtcaatgacgtacaaaaaggattgttactctaagccaatggcgtataattatgctcttcatcgaaacggaaatttttactgaagatgttcaaaaactgctgaccgacgatgaattcagtcgttttcagtttttcctggccttgaatcctgactatggtgaggtaatacctgaaactggtgggttaagaaaggttcgatgggtgtcaggaggaaaggggaaacgtgctggtgtcagggttatttactttcatcaggttaaacattatgagatcagattactgcttatttatcgtaagggtattaaagatgatctgtctccccaggaaaaagcaatgctccggttgttaaatacgaggtggtaaatggataaggcactttttgagcggttgactcacagcatggcccagatgaatgaaattattgaaggaacgcgacagccttcgcggacttttgaagttgatgctatgaaaatcaaagaaatacgccgcgcttcagggttgtcacaatctaaatttgccgatcttatttctgtaagcgtagacacgttgcgtaactgggagcaggggcgacgttcaccgaccgggcctgcaaaggctttgctgcgagcgattgccaatgatccgcaacatgtgctgcaagcacttaaccgttagaggcatggttatgccatacagaaagcactagcattcagaactcctgtgaaagcggcatagtggtcgcctgcccaggagttttgctatgacccgtaatcgtgctgaacgtcgccaccctatgatgcgattaaaaaaactcatcgtcgcgctgatgattgacgtcaatgctatcggatgataccggggggttccggaaggaattccttgtttcccgaactgttaccaacaaaattataacgatgaacaagtaaagaccggttggtggcagtactgatcggtctgtgatggatgattaatttcaccttaaatccgggtgctgttaggatgctgacatttttcgggtacaccattcagattatgcaaataaagatccaatcaaaaaataaacatccctgaatataatatattcatagcatccataactcatcctgggcgataactaaaccatttttgagtaataaatgaaacaactgcaacactcttattatttctggaaaacgcctcgcaaaaacaaaacaacatgcaaaaatccgctttttttaaatgattttccggcgtaattttcgcacatacattaatgagtaatataggtaaggtggtggtaatggcgatgaatacggtttttcttcatttatcagaagaggcaattaaacggctgaacaaacttcggggctggcgtaaggtttcacgatctgcaattttacgcgaagcggttgagcaatatctggagcggcagcaatttccggtgcgtaaagcaaagggaggcaggcaaaagggggaggtagttggtgttgatgatcagtgtaaggagcataaggaatgaaaaaaatttttcattcttgaatataaaaaaacagatgcccttattctggtattaatacaaggctgttttacttgaacttataataactgcaactgttacatcgtatctggaaaacgcctcgcaaaaataaaaaatgatgcgtaaatgagctttctttaaagattcggcaagggtacttttctctccatagattcaaaaatgatattggcgagatatttatgaactctctggcaggtatagatatgggcagaattttactcgatttatcgaatgaggtgattaagcaacttgatgatctcgaggtgcagcgtaatcttcctcgtgcggacctattaagggaagcggtagatcaatacctgataaatcaatcgcaaacagcaagaaccagtgttcctggcatctggcaagggtgtgaggaagatggtgtcgaatatcagcgtaagctgcgcgaggaatggtaatgggaaaaaatgatgtcaatcagattgctgacaacgtgcgcgttgttcatgccggatgcggcgtgaacgccttatccggcctacaaagtcatgcaaattcaatatattgaagtttattggtagggctgataagcgcagcgcatcaggcaatcatacgcttgtcatcagtgacatacccataaccttatcgatgtgttggagggaagaacgaggcaaacagacaattgcggcatgatcttgaatgggtaacgcggaatacgagagatggtgtcgtcacaccctatgagctgtaatccgggcgaccagcgccacccggaaaacgtcagagattactccccttcacccggaaacaggaacgggttgatggaactgcgggcatagccttcttgctccattcgcgcgtccagtaccagagaagcgaggtcatctgccacggcttcaactttcggttctttttcctgataaagaatcttcaggtaagtgccacagtcatcgcagctttcggctttaatcgcggcctgttcgtcatccagcgaccagtaatgcagtttgccgctctgctcgcagttgctgcattttacgcgcactacgtgccattcggtttcacacaggttgcagtgcaggtaacgcagaccctgagtggtgccaatttgcaccatgctggacaccggcatagaaccacaaaccgggcaatattgacgttgctcgccgtattcagcgcgggctttgccggggatcagattggccatctgcgcccagtagagcgacagtgcagcccagataaacggcgctttatcgctgctgacggatgagaaatcagaggcaaacagtgcgctggccatatcttccagctcctgagttgatgccttctccagattctcaatcactgccagcgccgggccgctcatttcaggtttcagctcagcaatcagcgccatcagcagcttttgccagtgcttatcacgcggcagaacgtgaatatccagcgggggcttgccctgtgcgctggcttctttaatgcgcgcggtcagatccatctccagcggatggtcgtacagcaccacttcctgggcgtgggcgataagcgcagcaaagcgcaggtaatcacccagcggattattttctgccagctcgcgcagacgctcggcgcggcggttgtataaattcttgagccgagggaacaataacggcggaatcatatccgccgtacgtttctcgctcgaacccagctcatcttgcgggattatgcgaatactcattcagctttcttttccgttgtcttgcggacctcacggtaccagcgcgggtgatgtttcttcgcccaggcgctggtaacccatccttccaccatggcggtaatcgtgcctttcacccaaagggcggcgtagatatgcaccatgataaccacaattaacgccactgcggcaaatgaatgcagcattaacgcgaatcggatcaccgggattgagaaagcaggcgcaaaataaggacgccagataatcacgccgctcaccagcagcagaaccaggaaaataatcgccgcccagaaaacgcatttctgaccgaagttataacgcccggtgtcacctacttcctcgttgacgacgatcttacgaatattcttcgcccaaaagatatcatcccgattgattaggttgtgatgccagtaacggaaaaacatgatgatgaacgaggcaaacataaccacgccgacaaacgggtgcagaattcgcgccagctgcggtgtgcccatgatttgcatcaaccagttgaaggacgggaacaaaaagcccagcccgctcactgccgccaggatgaagcagaaggcggtgatccagtggttgatacgttccggcgcggtgtagcgcacgatggtgtcacgtcgtttcatttgcgctcctcgtctttctcttcgtgcagattattctcttcctcatccgcacggttcggaccgacacccacgtagtggaagatactggctgcgaaggtagccgcaaagccaacagctgcgagcggtttccagatgcctttccagaatttcacggtttcgctgatttccgggttctccggcaagccatgatacagatttggcttgtcagcatggtgcagcacgtacataacgtgtgtaccaccgacgcctgccggatcgtacaggcccgcattgtcgtaaccgcgggttttcagctccgccacgcgctcgctcgccagcgttttcatcgactctttcgtaccgaagtgaatcgcgcccgttgggcaggtcttcacgcaggctggttcttgcccaaccaccacgcggtcaacgcacagcgtacatttgtagacgcggttgtcttccgggttgaggcgcggaatgtcgaacggacagcccgcaatgcaataaccgcagccaatgcactgctcggactggaagtcgacgataccgttggcatactgaataattgcaccttccgccgggcacgctttcaggcagcctggatcggaacagtgcatacagccgtctttgcggatcagccattccagtttgtcgttctgctccacttccgagaagcgcattaccgtccacgatttggcgcttaaatcattggggttgtcgtacaccccaatgttattgccgacggtatcgcgaatgtcgttccactctgaacacgccacctgacaggctttacagccgatacaggtggtgacgtcgatgagtttcgccacttcttcctggaagtcccgcgcctgaggcgcgggggtcagaccgttagtcgcggaacgacgaatgatatcttgagattgataagccatatgtcgtctccgttacaccttttccacattcacaaggaaggacttaaactccggcgtctgcgtgttcgcatcaccaacgaatggcgttaacgtattggcaataaagccttttttagctacgccttcataaccccagtgaatcggaataccgatggtatcgatatctttgccgttcgctttcagcgtacgaatacgtttggtcaccaccgctttggctttgatatagccacggttggaggagactttcacggtatcgccctgggcaatgccaagtttattcgccagcgactccccgatttccacaaactgctctggttgcaaaatcgcgttcaacagcgcgtgtttggtccagtagtggaagtgctcggtcagacgataggtggttccgacatacgggaacttatcggctttacccaatgcttcggcgtcgtctttaaagatacgtgcagccgggttcgagataacgtttggatgcagcgggttagttcccagcggcgtttcaaacggctcgtagtgttccgggaacggaccttccgccatcttatcgagggcaaacagacgccccatgccttcctgctgcatgataaacggcccgacgccgctacccggaggcgctgcgctgtagtccggaatatcccagccggtccacttagtgccgtcccatttcagcaactgacgcttcggatcccacgggttaccctgcggatctgcggaggcgcggttatacagaatgcggcggttaagcggccatgcccatgcccagcccagcgtgttaccgaggccagacggatcggcgttatcacgacgcgccatctggttgccttccggcgtccagctaccggcgaaaatccagcagccacaggaggttgtaccgtcatcgcgcaattgggcgaacgagctaagttgttggcctttcttgacgataaccgcaccggttgccggatcggtaatatcggccagcgccttaccgttgctctccatcgctacttcttccgacttcggctcatgcggaatggcgtagttccaggtcatgttcagcacctggtccgggttcgcgccaccctgttcggcatacatcttgcgcaagcgcaggaagataccggagaggatctcgccatcagtcagcgcaatccccggggcgtccgcacctttccagtgccactgcaaccagcgacctgagttaacgattgaaccgttctcttctgcgaagcaggtcgatggcagacggaacacttcggtctggatcttcgacgagtcaacttcgttcagctcaccgtggttctgccagaagttagaggtttcagtgttcagtgggtcgatggtgacgaggaacttcagtttcgacagacaaccgatcactttgtttttgttcgggaatgaggcaacagggttaaagccctggcagatatagccattgaccttgccctctttcatcatctcgaagtactgcaggacgtcgtagcctttatcccacttcggcaaccagtcaaagccccagctattttccgccgtcgctttatcaccaaagaaggccttcatcatagagacgaagaatttcgggtagttgccccagtagtttacctggccttccagcagcggttttggcgtgttggcggtaaggtaggtttgcagatcggtctgcttctcgcttggcagcgtcatgtaacctggcagactctgcgacagtagccccaggtccgtcagcccctgaatattggagtgaccgcgcagggcgttaacgccgccgccggccatccccatattgccgagcagcagctggatcatcgccatcgtacgaatgttttgcgcaccaacggagtgttgcgtccagccgagggcatacaggaacgaggcagttttatcgtgagcactggtttctgcgatgtattcgcagactttcaggaacgcgtcttttggcgtaccacagatgttttcaaccacatctggcgtgtagcgggaaacgtgctgtttcagcaagttccacacgcagcgcggatgttgcagcgtggtatcgcgtttggcgaagccgttttcgtccagttcataagtccaggaggatttatcgtacttgcgtttttccgcgtcgtagccggtgaacaggccatcttcaaagccgtaatcctcacgcactatcaggctggcgttggtataggcttcggtgtattcgcggttgaatttttcattgttcagcaggtacagcaatacgcctgacaggaaagcaatgtcagtaccggaacgaataggggcatagtagtcagctaccgccgccgtacgcgtaaagcgaggatcgatcacaatcagcttcgcgccgttgtgaattttggcttccatcgcccagcggaacccgaccgggtgagcttcagcggcgttaccgcccatcaccacgacgaggttggcgttcttgatgtcgacccagtggttggtcatcgcaccgcgaccaaatgttggagcaagacttgctaccgttggtccgtgtcagacacgcgcctggttgtcgaccgcgagcatacccagcgcgcgggagaatttttgcgttaaatagccggtttcgttactcgacgcggaagcacacagcatcccggtggagagccagcggttaacagtcacgccttcggcgttttgcgcaatgtagttagcatcgcggtcttctttcatcagtttggcgatgcgatcaaacgcctcttcccaactgatttgctgccatttatcagaacctggcgcacggtattccggaaacttcagacggctttcggagtggatgaaatccaccaggccagcgcctttcggacaaagtgcaccgcggttgaccgggtgatccggatcgccttcgatatggaagatagatgctttggcgttttttgctccgtcaccgaggctgtacatcaacagcccacagcctacggaacaataggtgcaggtattacgggtttcgcgggtgcgcagcagtttatactgccgggtttccgcgagcgctacgctgggtgcaaaacccagtgccgctgccgtggtgcctgccataccgccagcgcagatcttaaagaactgccttctgctgacctgcatggattgctccttgtttcgacattgtcacgtcccatttacattcgcttgctgcgtgtgcagggagtgggagttatttttctttgcggaaggggccgcaaaggtccagaattggctcaatttccctccatccaggaagggtttgtaacagaataccataatgttggtgtgtgtgttcttatctggttaagagaaagtgaaaaaaacacagcaaaaagaaatcgaaaatgtgacaaatatcacaggtgttcgtcaaattgagttatggcggcgtgatgatttacaacacccacggttagatgaggtcgcggaagaagttcccgttgcgctggtctacaacggcatttcgcatgtggtgatgatggcgtcgcccaaagaccttgagtactttgcgatcggtttttcgctttccgaggggataatagaaagtccgcgcgatatcttcggcatggatgtcgttccttcctgtaatggtcttgaagtacaaattgagctttccagccgccgctttatggggttgaaggagcgccgccgggcgctggcgggacgtacgggctgtggcgtatgcggcgtggagcaacttaatgacatcggaaaaccggtgcagccgctaccgttcacccagacgtttgatctcaacaaactggatgatgcattacgtcatctcaacgattttcagccagtggggcaactgactggttgtactcacgccgctgcctggatgttgccatctggcgaactggtcggcgggcatgaagacgtgggtcgccatgtggcgctggacaaactgttaggccgccggtcacaagaaggggaaagctggcagcaaggtgcggtactggtttccagtcgtgccagttatgaaatggtgcaaaagtcggcgatgtgcggcgtagagattttgtttgcggtgtctgccgcgaccacgcttgctgtagaagtggctgagcgttgtaatctgacgctggtgggtttttgtaagccgggtcgggcaacggtttatacccatccgcagcgtttgagcaattaattaaaataagtcctgcgatatatattaaattgcaggacttattcatttcgtgaattttattattttatttataaataaaacgcgtgtagtggcgttttcttttttcatttattatgttcactctcttatctatatatttataaggcaattaaatgaaaaggaatttattatcttccgctattatagtcgccatcatggccctcggtctgacgggttgtgatgataaaaaagccgaaacagaaacgcccccgcctgccaatagtcaacctgccgcaccagctcctgaagctcccgttgcaaaagcagaagctaaacctgaaacacctgcgcaaccggtggtcgatgaacaagcggttttcgacgaaaaaatggatgtctatatcaagtgctataacaagttacagatccctgtacagagcagtctggcgcgttatgctgactggctgaaagattttaaacaggggcctaccggtgaagagcgtactgtttatggcatctacggcattagtgaatccaacctcgctgagtgtgaaaaaggcgtaaaaagtgctgtggcgttaacgcctgcgctgcaacctattgatggcgtggcggtgagttatatcgatgctgccgtggcgttgggtaataccattaacgaaatggataaatattacacccaggaaaattataaagacgatgcgtttgcgaaagggaaaacgctgcaccagacattcttaaaaaatctggaagcctttgaagctgtaacagaatcttatcatgcggcgattcaggaaattaacgataagcgccagcttgcggaactgaaaaatattgaagaaagagaagggaaaacattccactattactctctggcagtcatgatttcagcgaaacaaattaataacctgatatcgcaagataagtttgatgcagaagcggcaatgaagaaagtgtctgaactggaaacgctggtggcgcaggccaaagaagcggataaaggcggcatgaatttctcgtttattaattcggcaggccagtatcaactcgaggctaaaaaatacgttcgccgcgtcagagataaagtcccgtactctgactgggataaagagcaactgcaggacgcaaactcaagctggatggtcgacgactctttcccgagagcattacgcgagtacaacgaaatggttgatgactataatagcctgcgttaaacgtttttgatgataaatgcagtgtcggatgcggcgcatccgacacagttcaccccttgtgaagtaactccataaatgcctcatatcctgttaacccggcaataacctctgccggatgctgacacaatacgcttgccagatagctaaatatttttagctcatgacgcgcatcggcggcggcgcactgatgaatcccctaatgattttggtaaaaatcattaagttaaggtggatacacatcttgtcatatgatcaaatggtttcgcgaaaaatcaataatcagacaacaagatgtgcgaactcgatat

SEQ ID NO: 54 - DNA, 48834 bp, Escherichia coli
  source 1..48834: mol_type = genomic DNA
tctgaggcagcacctggcacggctgggacggaagtcgctgtcgttctcaaaatcggtggagctgcatgacaaagtcatcgggcattatctgaacataaaacactatcaataagttggagtcattacccatcctctgatgatgtaaaactggattacagaattaaattatcaggtaataagatactgacgccactgaatatacctgattataaagaaatgataagcggtggtagtacgaagaatacagaaaaaatagattttactatcacaaataaaggcgatgaggctgaaggactttctctggaagtgcttgatggtaatgaagtgatttacagtgaacagcagaccggtaaatattttgataagggagagcatgcctggcaatgggatggctacagtaatcaaggcatactggatacaactaagctaaaaagcaaatcactactcgtaagactgattgctttatgtggtgatatgatgataaaagttgattatccacttcataattcaccagaggaataaaaatgggtcgatgtaaaggtagacagaaaacaaaaaacagtagatataatatggcgactggcagttagtgatggagggataaaaggaagtaatcctaagttatccccagttccttataacgacttggttaacctgaccaaaaatggagttgaattttattggtctcgaaatggaagtcgcggcggggggattggtgaaaatattgttacagcgattggtgtttttaaagtaaatgtaaaggctgagataaatattactccatccatgcgaactttttctttgatatcatcattagatcctgactttcaggcatccgttagtctatcaggatttgaaaaaatatattataactacggtgatagttataaggatattcaagatgaattacaggcgcttcttgacgctaataacagatataaatgggatagtgctcatgaaatggggcataaagtactcgatgaatatggagagggttctagccctgattattcgtggactcataaaggaacatctactcttatgcaaaaaacaataccagggaatgttatgcccgctcagggagagattgatgtaatgaaatatggaaaatatcgtcctgacatgtatactcgattggttgcagcagatgaagatgttcagggattgatctggttaagcaggataaaatttgatgactagagtagttattgctttattatttcttgccggatgtacttcgcaaatgaagtattccaatgtcgtcaggattaggaatgtatgttcctcagatattaatgtgtttattcctgagtatgtttttggaggtaatgttattaagcaacatcatatttacttacctgttaatgggattgatgttttgtcttatttttatactgaaaacatcaatgatggtttccaatatgaagaagcattcaccgtaaataaagatagctcgggtaattttgattatccgtttgttatcttatcatcaggacgtgaaaaaaaatttgggaaaaacgatctaattgaattatccagggacatttcaacaaaagacgataagaagcatggggttgtaaagtacatgatagatagtcaggatatttgcccatagtatgattcatatcataatcaactgaaaaaatgacattattaatcatttgtgattttttgatactaccaagtgaaatttgatgattagattaatattctcttttttattatgcacactgtgtgctggatgtttatctcaaccattctattcttgttccattgtcatggtaaatacatgcaaagtatctattaacatttcgacagtcaataattcaacacattatgatggtaaggtaagagataattttcatcttgatatcggagagcggaagccaattgtatactttatttacacaggtagagagtcagatgtttttaataaaaaccctgtaaatattgtttctgaacttagtattttgatatctgatggtaacaattctaaaactttatctggatatcatatctcctctttattgaaaaaatcctcatctagtatggagtccgatttttcttttgaaataaatgatccatctatatgtccttaggattctgaaaataaaaaattctaatctcactactcgttggtattaatttcaataaaaggaaagataaatcctccgatggacgacttaacccaacgctactacgaagccgaaatgcgctacctgcgtgaagcggggaaagaatttgcgcaggcttaccccgaccgcgccgcgatgctcaatcttgataaacccggcgcacgcgatccctatgtggaacgcctgttcgaaggctttgcttttttaatgggccgcctgcgcgagaagctggacgacgatctgccggagctgactgaagggctggtcagcctgctgtggcctcactacctgcgaactatcccgtcactttccgtggttgaactgtcgacagatcaccggcagatgaagcagagcgaaacgctgagcgattttcaggtattgtcgcgccctgttggcgagcgcagaacccgctgtttctacagcgccacgcgggatatcacgctgcatccgctggcgttgccggacgtgtcattgcaatatgaaccggacggacgttcggttattcgtctgcgctttgaatgcggcccgctggtcggtgactggtcacagatcgatttatcccgcctgccgctctatctcaatgccggcagtccggtggcctgtgcgctgcaccgggctttaacgcttggtacgcagcagttctggttgcgtctgccggggcaggatcgccggacgcttgacgcacacttttccccgttgggctttgaggataatgacaggctctggccaaaaggcgagtcggcgttcagcggctaccagttgctgctggagtatttcaccttccgcgagaagtttatgtttgtggcactcaacgggcttgagttggttgcatggccggaggggataaccggctttgagattgacgtggtgctgaacgagaactggcctcacgacctgccgtttgacagcgataatatccgtctgcactgcgtgccggtcatcaatctgttcccgctcgaagccgatccgttacacctttcgccactggaaaacgaatttctgctacgcccgatgcgcattcaggacgggcataccgagatttattccgtcgacaacattatttcttcgcgccataccggcagtcaggcgtatgtccccttctccagctttcgtcaccggggcgggatgctgcgccacgatgcgccggaacgctattaccacacgcgggtaaagcgcggcccttccggtctgcatgacacctggctgattctgggcggtgatgcgtttgatgctgaccggatgctggaggatgaaacgctctctttaagcctgaccggtactaacgggcatcttccccgtaaggctttacagagcacgctgctcgataggccagttcatgcctcacagaacgtcctgcgggtgcgcaacctgtgcgccccaacgcagccctgctatcccccggcgcgtgaccgcttccactggcgggtgctcagccaccttggttctaactttttatcgatgatggataacgccgaaattctgcgcggaacgctggcgctgtacgactggaccgaaagcgagatgaaccgccgtcgtctggaggcgattgtcgacgttcagcacagcctgatacagcgttttgaaagaggctttctgctgcgtggcgtggatattcaggtgacgctggacagtaacggctttgccggagaaggtgatatcacgctgtttggtgaactgctgcaccgctttttcgcactgtatgccgatatccacttattcactcaactgaccttaattctgcaacctacaggaaagtgcctgcaatggacagagcatcacagccagcgcgtaccgggctgaccgaccggctggccccggatattgcgcggatcaatttttaccgtttttgccagttgctggaacagagccagcagaacgcgccgctgggcagtaccgacaaccccgccaccgatgcggttcgctttcgtccccatcccggaatgggctttccggtcagcgagttaaagaacgttgaacgtgacgcgggcaatcccgacgtgccacccacggtgcgcaccacctttctcggcctgtacggcgtggattcgccgctgccaaccgcctatctggactacattacccagcgtcatgacggacatgacgcagtgatggcgtttctcgatatttttaaccatcgctttatcacccagtattaccgcatctggcgcaaatataactacccggcgtcgtttgaagcaggtgctatggatgacatttcccgttgtctgctgggactcatcgggctgggtattcccggcagcgagaaccatatcgccacgccggtatcccgttttctggccctgctcagcgtgatgcgcctgccgacgcgcacggcggaaggcgtcacggcactggtgggactgcttgccccgctgacgaaagcgacggtggtgcctcacgatccgcagcctgttattctcccggcccctgcgggtctgtcaaaaaattcacgcatcagcctgaaaacgcgaacgctgcaggggcgtaccggcactgacgtcaacagccagttgctgctgaaactgtataccgaagatgccgcagaagcacgtggctggctacctggcgggcagctgcacagcgatttgctggtgctgctgcgcgtttatctgggctggcgctgtcaggcccgtctgcaactgacgctgcccgtcagcctgttgcctgctgcccggctgggaaaacagcgcgtacagattagccgtaccggcatccttcgcgcctcctttgccgcgcccgcgaccggaacagtgacggtcagtctggggcgttatcagggattaatacccgctttatccattcgtaacagggagagtatgactcatgtttcctattcgttttaaacgtccggcgctgctctgtatggcgatgctgacggttgttctgagcggctgcgggctgattcagaaagtggtggatgaatcgaaaagcgtggcctcagccgttttctacaagcaaatcaaaatactgcatctcgatttcttctcccgaagtgccctgaatacggatgcggaagatacgccgctttccacgatggtgcatgtctggcaactgaaaacccgcgaagattttgacaaggcggattatgacaccctgtttatgcaggaagagaagacgctggagaaggacgtactggcaaaacacaccgtctgggtaaaaccggaaggcacggcatccctgaatgtgccgctggataaagagacgcagtttgtcgccattattgggcagttttatcaccctgatgaaaaaagcgacagctggcgtctggtgatcaaaagggacgaactggaggccgacaagccgcgctcgattgaactgatgagaagcgacctgcgactgctgcctctcaaggataaataaccgatgtcgacaccttccttatatgaaatgctgacgttcagtttcagcggcgagttaccactggaacaggtcagcgagcgggatcagcttatcctttccgtgatggacaatatgcaacgcattatcaactgtcgggcaggcacactggcgcatttgccggattacggtctgccggatctcagtctgatccatcagggtatggttgcgggtattcatggcctgatgcgtcagattgaagaaacgctgctgcgttatgaaccacgcctgagtcaaatacaggtggagttactcccccagccccgtccggggtatcttaattacctgatccacgcgcagcttcccgataccggctggatacgctttgatggcgtgttttctccggaaggacgaattgttctgcgtcatctcaaacagcaggagcgggcgtactgatggcaagtaacgcgaattttatcagccagttcgtcatgggcggcgatccctgtacttataaggaatccggtgaactacaggctgaaatgagtaaactgactcacccggcccgacctgatgtggactggcgtcgggtggaaaaactcagcctcgcgctgttccggcaaaatggcgtggaattacagacgcaggtctgttacgtactggcgataaccagacggcaggggctggcagggatggcagacggactcggttcactggacatactgctccagcgctgggctgacttctggccggtacaggtacattccagaatatcactgctcagttgggtcacagaaaaaatgcagcaggcactgagaacgctggatattcagtatcaggatctgccgcagatttaccgttgtgtacagcatctttccgccatcgaaaccacgctgcaacagtgtgaactgtggcatatgacgaaactggatgtgctggccgggcagtttcgtaatacggcgctacgtctggagcggctggcaccacagggagcggaaaccactatcactccccctgaattaccccgccgggaaatgaagcaaccagaaaagtcagaagaaagtccacagccggtttttgcaaccagacccgctcagcaaaacgataaggatgccagtccatccgcgccatcccctgaaatctcccggcagcggacatggccgatatttatggccggaatggttgtgatggcctgtctcggcggaacaggattatggggctggtcgcagcttaatcagccggacgcactaatccagcgaatacaactgtctgtcatgccattaccgcagtcgctggagagcggcgagctggcaaagctggatgtaaaggataaggcgctgctggctcaggacagaacaattgcggcaagtcagatgcaactggagcagttaaacaaattgcctgcccgctggccactggagcagggatatcgccagctacgccagcttgatgccctgtggccggataatcctcaggtcagagcgctgaacgcgcagtggcgtaaacagcgggagctgagcgccctgtccacagaggcattgaatggctacgcacaggcgcagagccagctacagcgcctgtcggcgcagctggatgcactggatgagcgtaaggggagatatctgaccggttcggaactaaaaacggcggtgtacggcatccggcagtcgttaaaggagccgccgctggaagaactgcttcggcaactggaagagcaaaaacagaccggagaggtttcgccgacgctgttgacgcaaattgatacccggttaaatcagttgctgaatcgctatgtaattttactggatacgaaggtggaacaaagtcagtaaacgtcgggggatttatgcaccaataagggatatgtgaccttgccattttttaaaaggagtctttgtgtacaaaaaagagaggaacaggccattcgaaacgcgtgaagaggttctggcatatcataagcgggaaaaaataccctgtctggagtgtggcaagttgctcatttttttaccgcgccatatctggtttgtgcatggaatacgcgctgacgaatatcgtgtaaaatggaacataccgaagcacatcgcactggcagggatttcatatctggagaaacaaagtgaatatatgaaggcgagaatagcaaagggaaagctggatcccgcagaacaaatagccatgatgagaataaagggaaggcaactaaagtcagatcctgactggcgtaatcgctccggttctatattgaagaaacaatatgcccgacgagatatccttaaaaacagggtatgggaaagatctcccagcataaaaagtgtctctgtggagttgaaaacagaagctataaggcgaatgaaaaacaggaaggtcgtcggggaaaaagtccaggatattgccgatgacctgaacgtatctatcagcagattgtatcactggctaaagatgtaggcgctcatgtgctctcaatgccttcaataaagccgctatgcgcgaaccggcacatctggtagactgttctcagtgagtcaagcaaactgcctacttttctaacttttaatcatgaataaccagcgccttgagtatagctggttcgaatatactcgttgattcacatcagataatgagtgtataattcggtagatagcttgggttcgggaacagtgaatgccttaagtttcaaaaggttagattaacctcttgactgtggcccccgcaaccaattattgaacaccctaacgggtgtttttttgtttctggtctcccataaaaaaagcgccattcagcgcctttttatcatccccttctcgccagcgtcgccccatcggcaaaatacgctttaattcccgcaagaatagactccgcaacttcctgctggaaagtcgccgttttcagtttacgctcttcctcaacgttactgataaacgccgtttcgaccagaatggagggaatatctggtgcctttagtacggcaaacccggcctgttcaacttgatttttatgcagcttgttgattttaccgagcttattcagtaccgctttaccaaacttcaggctgtcggcaatggtcagcgactgtaccatatcgaacatggtgtggtcgacatagcggtcaccgcttttgctcacgccaccaatcaagtccgaggcgttctgggtttgtgccagatattttgccgcagtactggttgcacctttggttgagagcgcaaacacagaggaaccgctcggctgacgactggtaaaggcgtcggcatggatagagacaaacaggtcagcacgctgtttctgggcttttgctacgcgcacttgcaatggaatgaagatgtcttcattgcgcgtcatgtacaccttcatattgccctctttctcgatcagagagcgcaaacggcgagctatttgcaataccacatctttttcgcgcgttttgtatttccccaccgcaccggagtcttcgccaccgtggccagggtcaagcataatgacaatcggacgatcgcgccctgctttacccggttgtggaccactttgcgctggcggcacctgcttttcgaggtcgcctttgttgtaatcctccagcagcgccagcagcgggtcctgcatatcctgtgcattggccggatagaggtccatcaccagacgctctttaaacccggcgaccggcgcaagggcaaacagctgcggttttacgttttgctttaattcaaaaaccatccgtacggtttgcgggtcaaattgcccgacgcgcgccgacttgatgaacgggtcgtctgcacgaatttgtgccgccatccccttgagtaccgagttcaggtttacatcttcgatatccaccaccacgcgttcagggttactcaacgcgaactgcttatatttcagctgacgatttgattccaccgtcacgcgggtgtagctggacgcaggccagacgcgcaccgccacgacctggctgaccgcagccagactgacctgacttacgctcaatagccacatggcacccgcgccttgcagtaaacgacgacggctgattgcagtgttggatcctgacatgcctctcccgagcaaaagaaatctaagctgtgtaacaagtaaacgactaatttgaccggaaactttagcgaaagacgcataatctgtcatctaataaacggtaaacattctttttatattcacggcattactgataaaaaagtcgctctcgcataaaatttacacttgcaccctgcgaaaaaacagaataaaaatacactaatttcgaataatcatgcaaagaggtgtgccgtggtaaaggaacgtaaaaccgagttggtcgagggattccgccattcggttccctatatcaatacccaccggggaaaaacgtttgtcatcatgctcggcggtgaagccattgagcatgagaatttctccagtatcgttaatgatatcgggttattgcacagcctcggcatccgtctggtggtggtctatggcgcacgtccgcagatcgacgcaaatctggctgcgcatcaccacgaaccgctgtatcacaagaatatacgtgtgaccgacgccaaaacactggaactggtgaagcaggctgcgggaacattgcaactggacatcactgctcgcctgtcgatgagtctcaataacacgccgctacagggcgcgcatatcaacgtcgtcagtggcaattttattattgcccagccgctgggcgtcgatgacggcgtggattactgccatagcgggcgtatccggcggattgatgaagacgcgatccatcgtcaactggacagcggtgcaatagtgctaatggggccggtcgctgtttcagtcactggcgagagctttaacctgacctcggaagagattgccactcaactggccatcaaactgaaagctgagaagatgattggtttttgctcttcccagggcgtcactaatgacgacggtgatattgtctccgaacttttccctaacgaagcgcaagcgcgggtagaagcccaggaagagaaaggcgattacaactccggtacggtgcgctttttgcgtggcgcagtgaaagcctgccgcagcggcgtgcgtcgctgtcatttaatcagttatcaggaagatggcgcgctgttgcaagagttgttctcacgcgacggtatcggtacgcagattgtgatggaaagcgccgagcagattcgtcgcgcaacaatcaacgatattggcggtattctggagttgattcgcccactggagcagcaaggtattctggtacgccgttctcgcgagcagctggagatggaaatcgacaaattcaccattattcagcgcgataacacgactattgcctgcgccgcgctctatccgttcccggaagagaagattggggaaatggcctgtgtggcagttcacccggattaccgcagttcatcaaggggtgaagttctgctggaacgcattgccgctcaggcgaagcagagcggcttaagcaaattgtttgtgctgaccacgcgcagtattcactggttccaggaacgtggatttaccccagtggatattgatttactgcccgagagcaaaaagcagttgtacaactaccagcgtaaatccaaagtgttgatggcggatttagggtaagcgatgaaaatcgtcggatgcgacatgcgtaacactcgtacgtcgcatccggcaattacgtttattcccgtgaactaaacaacgccgccagaccactgcgccgctcagtacgagtggcgattgccgcacttaatatgcgctcatcggcatacagcgacagacggcgacgcgcgcgggtcaccgcggtataaaccagctctcgcgttactaccggcgtgcgttggctcggcaaaatcaacgccgcatggtcgaactccgatccctgcgatttatgtaccgtcatcgcccacgtagtttcgtgctctggcaagcgactcggttgcacagacttaatattgccgtccggcatcgcaaaccagactcgcgtcccctgcccgcgatccagcgcaataccgatatcgccattaaacaacccaagcgcgctgtcattacgggcaatcatcaccggtcgaccttcgtaccaacgagagtgcggatgacgatgaattttgcgcttctgttgcataaactgctcaattcgctcattcagtccagccacgccaaacggcccttcccgcagggcgcacaaaagctggtactcattgaacgcctgaatgattaaatccggctcggcacgcgcttgcagcagatccagataacgtccgtaacccgcaagagcttcctcaagcatcgcaatataatcttcgccgctctgtaaaagccgtttttcgatatcagtaaaatcctgctgaaaaacggttttcactgccgttttatcaccacggttgatcgccgcagctaactgaccaatgccagaatcgctgccgaaacgatagcttttttgcagcaggcagagactgtcgcgcaaagatgccgcttctgtgccggttcctgccggaacgtgagtccccgtcaggcggcttagctgcctggcacgctcggcggtaaagcccgcgttggcataagcgcagatatcgcccagcacagccccagcctcaaccgaggccagttgatcacgatcgccgagaaagatcactcgcgcatgatcgggcaaggcgtcgatcagtctcgacatcataggcagatcgatcattgacgcttcatctaccaccagcacatcaagatgcagcgggttaccggcatgatgacgtaaacgctggctacccggctgcgcgcccagcaatcggtgcaaagtgctggcatcttccggaatgcgtttcttttgttcatcggtcagcggtaactgtcgcaaagccttgccgagagattcggttaagcgcgcggcagctttacccgttggtgcagccagacggatacggcagcgttcgccgtcggccatttgaattaacgctgccagcaacttcgctacggtggtcgttttaccggtgccagggccgccggaaatcaccgagatccgccgcgtcagcgccactgccgccgcaactttttgccagttaatttcatcgcttactggaaaaagtttgtccagggtttgcgccagtagagcttcatcaacctcaatggcatgattcacttcgttgaaaaagcgtgccactgtgcgctcgttacaccacatgcgattcaaataaagacgatcgccacagaggatcatcggcgtgggttcatctcccctgctgaccgcttgagaagccagcaagcattcttcccaattttgtagctcaccgatttcactgacacaggtcgccaacagcggatgcgacgcctcgttattttccagtcgtgaaagcggcaaacaaacgtgtccctctccggcatcatgacttaacagtgccgccgcgagggtgacggcaggatgttcatctcccgccacggtcagggcaaattgcacatccagcgggcgtagctgtttgtgctccacagcttccagtaattgcttttgcaatttcattacgcctcctccagggtcataccggcaaacatctcatccatcagggcaatcaacccggcgttgggtcgggttgtgtaaatcccctgttgcggatgttctttatcaacgccacgcaggaacagataaataacgccgccaaagtggtgctcatagtcgtaatcagcaatgcgatggcgcagataacgatgcagcgccagggtataaagctgatattgcagatcatagcggtgtgcctgcattgccgctgccatagcctgttgggtgtaagccgaactgtcttcacccaaccagttggatttatagtcgagcaggtaataacgcccttcgtggcggaacaccaggtcgataaagccttttaacatgccacgtacctgcatgaactccagcggcgggcagcctgcggatagcgggtcaaactggcggattaacgtatcaagctgactggcgataagcggttcactaatcggcagataaaactccatctccacctgtttattgcgggcggaaagttgactcaggcttacgccggtttcattgagaggtgcctggaggacagccgtgatccactcggtcaataccggttcccactgcgattcaaagccgccgagttccagtttttcccgcacccagttcgggtcaaccggctgggtaaaatccaggtcttcaaacaaactgtgcaagaacgtccccggtgacgcaccgcgcggaaactgatgtggtgttaacgtcggttcttcaacgacgctggcaacgcctgcagcatcgacatccagccgaggcatcaaatcctgggcgataccgtgaccacgctgttgcaaaccagagtagctggtgacgcgccagttatcgccgggcaatcgttgtaacgtcttcgcattcagctctgctgtagaaacatcattaacctgccagggttggttatcaccagtttgtgccgtttgccaggcaatatcatcatcgcataacgcttcaatacaggtgcgaagccctgccgcatcttgcggttcccctttttgcagcaaacgcccgagcgcactttggtggacgtcggtgtcaccttttttatcgccacgacggcgcaccagcggtgcaacgccgagactgcaatgccaaaccgaacgtgtcagcgccacgtaaagcaaacgcagatcttccgccagacgttcggcctccgcgaggtcgacgctttctggcgcagcattaagatccagaactgcctcaaacgagtggcgatcgtgataaaacgcctgctcctggacgcggaaattggtgataaacggcagccagaccaatggatattccagccctttcgatttgtggatcgtgacaatctgcaccagatgtttatcactttcgagacgcatttgttggctggaggcattactgtctggctcgaggatatgttgcgataaccagcgtaccagcgcatgttcactttccagctgcgttccggcttcttgtagcagttcgctgatatgcaagatatcggtaagacgccgctcaccgcctgccgttgccagcaagttttcagcaatgttacgcgccgacatcagcgcccgcagcatcggcataacgccacgtttgcgccagatttgccgataaccatcgaactcttcgactaccacatcccacgcatgttcgtcattgttcagcgtttcgatatccagcgcgttcagccccatcattgacgttgccagcgcactacgcagggtgttctcacgttcgggcgtcatcaccgcctgcaacaaccaaagcatttcctgcgcttccagagtttcaaaaacactgtcgcggttcgaaaggtaaacggaagggatttccagcaacgttaaggcatcgcgcacctgggcggcctcctggcggctgcgcaccagcacactgatgtccgaagcacgcaccggacgcgcgtcgtcgccgttcatcagcaacgcttcgccccgctgtccggcttgtagccagtcgcggatttgcgcagcacatacctgcgccatggtactttgataatcgccaacgccgcagctttcgccttccatcagccacattttcatcgcaggctgtgtttcacctttaaatacaaaacgtaacgcctgatttttcccggctgatttcactggaataaacggtatttcgcgaaacatgaacgcgtcatcagtctggctgaaaagcttattcacgctgttcaccattcctggtgcggaacgccagttggtgtctaaagtgtagtgggcgtgaacttcgctacgcgccttcatataagtgaagatatccgcaccccggaatgcatatatggcctgcttcgggtcgccaatcagcaacaatgcggtttccggctgatggtgccagatacggcgaaaaattcggtactgctgggggtcggtatcctgaaattcatcgatcattgccaccgggaatcgcgtacggatcgccgctgccaacacctcaccgctttcgctacgcagcgcggaatcgagccgacttaacatgtcatcaaaacccaattcgccacggcggcgtttttcacgcgctactgtttcgcggatctcagccaatgcgcgggtgatcaccagatcgcggatcgacaatggttctgcaagcagttgatcgatcgcctcaaacagtggatgtcgcggggtttcccccccggctttcgtgcgatcttctaagaaacgctgggagaatttttccagcgactctggcaactgataactgttggtctcttcttctgcccaggcgctgatcttttcgatccatttagcctgattactacggttaaacttgcgtcgatcaataccagaagattcgatcagcgcatccagttcacccactgcgtcgcgccactgctgttttaccgtatcaatacgcgccacaatttgcgcgtggcgggaagccagcgtttcatcatcgggcggcggtgctttgataaccggcgcttcgccttgcagataacgattaatatcgcgcagcaacgcctgcggccctttccaggtttcaaagacgacctgggctatttcacgcggcagcgggtagcagtggcgacgccagaaatcggcgcaggcctggtagcgtagcagagactcatcttcaatcagctgctgctcaaacagcatgccggattcaaaggcattcaggttgagcatgcgctggcaaaagccgtgaatagtaaagactgccgcttcatccatctgccgttcggctaacaacaaccactgcgcggcttgcgctttatcgtcgatctcttccagcaggcgttcgtacagtggattgtcggtggtttcacgcagacaggcgatgcgcaactcgtggatattgctacggatacgaccgcgcaattctgccgtggcagcctcggtaaaggtgaccaccagcagttcttcaacggtcagcgggcggggaaaggcggcggaaccgcctagtccaagtaacaggcgcaaataaagcgccgcaatcgtaaaggttttgcctgtgccggcagaggcttcaatcaggcgctcgccctgtaagggcaagcgcaaaggatctagtgtctcggcgacatcactcattcttttcactcatcaggggcattgtttgctgcaacgcgctgacgttctcccacactttccagccttcaggatgcacatattcggctttcccgttctggctgccggaaatctgcgacagaatagccatgccttgcggctcgaccaccgcctgatggaagaaatcagcaagtttttgcggcgtcagcagttttatctgggccacgattttatcacgcgaatcgaagcgcatattgccgcgatcgaaatctttacttaacttcgatgcttcttcgccgagcgtttgcggtgcctgcagcatctgggtaattaccgcctgctggatttgcgcaaactcttctggcttcatcgcccgcaattttgcctctgcggttgggaaaaacgccttgtaacgctcccacaagaatgaaggctgtttatcattgctttgcaaaaggaagcccatgccccactgacgccccacgctcattgggaatgcaaacacggcatagcccaactgttcttcggtacgcaactgattgtagaaccacggctgtacgatctgccccaacagagagctataggctgagctggtgtattcatcgtagccagtcggtacaaataccgctgccagtgcggagtcggtgctgttaccggctttttcaaagatgacggattgttttttatcgaccacgacatctttgttacgacaccattctgaaccatcagcgcccaactgtttttgcacatcgcgtgccagcgttgttgcctgggcctcggtcatgttgccgataaccataaactctggtcgagcccctgattttaaggcgtcgcgataggccagcacctctttcaacgtaatggagggcaaaattttgcgccgttcatctcgcgagaagtacggcacttgcgagagcatctgcgcgggcataatcgcctgctcaaacgctttgcccttttctgcggaatccatcatctggttataccaggattttgcctgctcaagctgatcttccgtggcggtatagctaaagtacccctcgagcaatgcctggaacagctgcggcagacgctgggtgtaaccattagcattaaccataaggccgttgttagcgttggtggaaaaacttatgccaccaaccgacgcctggttgcttaactgatcaagcgccagccctgcgagataatcattgagcgcaaacatcacctgattgcgggcgctgtccatggctttcggattacgcaaaatcaggctgacatcagctttgggttcgctggaaaaataacggcttggcgcatacaccacacgcagattcgactcatcaacaatcagctctggatggtcatatttcttctctgacttaatcagcgagaaatcgtcaggaatataggggttaagctctggcaaagagagcgcaatgtcggcggcttttttctgccagtcggcgaaagtttgtgcgctgattttatcgacctgatacggcgcatcgacaaaataagccgttttattgtgcggctctttcgggctgatataccagatacgcgcattctgcggcgtcatcatcgccagacgttcttttactgctttagcatcgtaccgatcggcaatattgactgcatccagcgtatgctcaacaggaacgcgaatcatggtatctgccagccattcgacgtaatccatatcacgggtgattgacggataacggaagtcgatatccagcacattcgccagttcatcgaagtattgtttatcgatccctttttcacgtaacaaattgaggtagctaaaaatagccgccacaacctgatcgcgattcgccagacctttatcggttaaagacgcagagatcgctaatacgccgctgttgccgttgacgataggatcggagttggcgctaatgccctcaactaatccctgcttttgcagccagtcggaaagtgtacctgggctgcgattaccaatcagataggtaatcaattcatcggttttgctacggaatttcgccgagttgttatcaatacgaaactctacgcgcaacactttacgcggcagcgccgggacgtaatgaatgataatgcccttttgcgcgtcggtgactaccggcacggtgatttccggttttttgctctctttgttcggcacgcgaccaaaggtgtccgccgccatttttgccaactccggcagcggtttattgctgtaaataaccgccttcatcagattggcggaatagtacttctcgtggaaatctttcagcgcctgctgcaccggattaccaggtttgtcgcttaaagtttcgaggttaccaccagaaaactttgaaccggggtgtgccgggttaatggtttctgcgctgacctgtgccatgcgcatcccgtcacgcgtacgcgccatggttaattcagcgttcactgcattacgctcacgttcggcgtatttcttgtcgagcaagggttctgcaatagcatcagccaggcggtctaccgcaccaggcaaggcgtcgttctcaacttccagatagaaagccgtgcgatacggcgcagtgctggcattgtgactaccgccgtgcattttgagatattcggccagactgtcagcctgcgggtactttttcgaccccatcagactcatatgttcaaggtaatgtgccagcccctggtacgcctcgggatcttccagcgacccaacgggcaccaccagcgccgagagcgatttaactgcctgcggatcagaaaccagcaagaccaccataccgttatccagacgtatagcctgatactggcggttatctttatcacttttacggatggtttcctgaatcggctgccatcccgtttctgcctgacttaagggtgcccaaagggcaactaacaacaataatgctttgaaccaggtgctgcggggcattcacggacctcataatcaacttaattttctgtccagattcaacacgttaacgcaaatcatctgccagaatttaatcttgtgctgcacgagtcagcctatgtttatataaccatcagtccgtgactggtgcgcatcataaagtaagcggatagattgcgcaatttttatacagcactcatgactgattaaagcgaaacagcggtaacaggaaacgttgcgactgttcaacgatggcctccattgtctctggtgttaattgccgccagagcctttgataccagatatcatcaccttcgccacgcaccatcatgttgccttcgtaagcctgaaggaatttcgtacgggctttttgcaacgtggaatcgtcatccagcatggcatcgttttgcgcgtcataacaggtttttagccacgcgccgccactttcaggtaacaccagcaatggcgcggacatcccttcacgatacccctcaatcagttgtgagaggtaatgcaaagcctgttcggctgcaagcggcggaaaacgccactcgccgtctttgcgtagaaaaaggcgactttcaccattaccaccgctggcacagtagacaaggtgttccagccaaagttgcattccctgcgccacacttaataaagagggacgccagcgcaacaggccatccggctgcacctgcggcaaccagccagttatctgcacaccgttgcaggcgagatcaatttccatactctgccccggctggcgacaggcaatgactctgtcggcaagctgctgcatctcctggcactgtgtttcccagaaaatttcaccaaaagcgccatacggtaaatcccctgccgcccggaagcggcggaacaagcgttcggcatcatcctgctcaaccagtgcattcaataactgctgattgatttgataacggctaagcccttccagaataaatggctcggtgtctgggatttcgctgtcttcagtacggaagttcacctgcaaacgcatctggaagaacgcccgcaccggatgtgcccagaatcgttgtagcgtttccagcggcacggtttccggtaaggtaaacggcagcggctgaacaaattcagaatgtgctttaccagcctggctggccgcaggtagccattcacgagcatagctttgtcgttcgcctggctggtagttttgcggatcaaacggcatccgggtatggaggcaagtaagatgcgcttttacccttgcctcgctttcatcacagttgagcgcttcatcgcccggtagataatgactttgcccgatgtagtcgatcagttcctgcaccagtaccgacgggaaacgttcactgttatcctgaatggaacgcccgatatagctgatatagagtttttgctgcgcggaaattaacgcttccaggaacaggtagcggtcgtcatcgcgacggctacggtcgccacgcttcggtttctggctcatcaggtcaaagcccaatggcgcaagctgacgtggataaacgccgtcgttcattcccagcaggcaaaccactttgaacggaattgaacgcattggcatcagagtacaaatgttaaccggtccggcgagaaaacgctggctgatacgttcttgatccagacgctgcgccagttcatcacgcaatagtgacagcggcaccgcgtcgccatactgcgcacctaaaccttcggcgataatcgcctgccattgttgttcgatcagcgtcatcgccgcttcggtttccgcatccggcaggaagaaggcgttgagcatatcgcgacaaaccggcaaccactcttctagcggacgctcctgtgccagcccgcgacgccagatgtttagctgcattagcagtgaagccagatgccccaccagttctgcaattaagccgctcgattcatcataaggtagaaccgattgccactcgccctgcgcgctctccatcgcgtagcccagcaacatacgcgtcaggccaaatcgccaggtgtgttgtccggtggcggggagttccagctcgcgaacgttgtcgtcatctatcccccaacgaatgccggattcgttgacccactggcgtaaataacgcagcccttcttcggtgatgtcaaaccgcgccgccagcaccggcacatccagtaatgccagcacgtcttccgacacaaagcggctgtctggcaacgataacaggctgataaacgcttccagtaccggatgcgactgccgcgcccgacggtcggaaatggcgtaaggcaggtaacgatccgcaggtgcgctaccaaacacagcctgaataaacggactgtagctgtcgatatcagccaccatcacgatgatgtcgcgcggagtaagtgtcgggtcttcttccagcatcgccagcaggcgatcgtgcaaaacttcaacttcacgctgcgggctatggcaaacgtggaaggtgatactgctatccagtggatcaagcgggcgtttgttatcgctacgggaaaactcttcgatgttcacaccagcaacggcacggttttccagttccagaatgtcagactgaatgttatgcagcaggttatctggcgtgacatcgacaaaggcgtccagctcctggctgctctccaggtcagaaaggagataaatgtagtcgcgcccaagcttaccccatgaagccagcagcgggttgccgacatcctgttcaccatcgctgttaaagagctgcccggcattttcgctatcacgaaatagcggcaattcgcgatcttcaaaactgtgtcgacgctgacgggtcagcagtttcgccagataagcaggatctttaatatcgccccagtaataacggcaggggttggtaaacaggagatggatttcaatatgtttacccagcgcctgtagcgcctggagataaacaggcggtaacgcggaaataccgcatataaagacgcgcgaaggtagccccggcgggcaggtcgtcgcggactccagcgtttcgataaagcgctgatagagattggcgcggtgccagcgcggttgcccgagttgatgggtatattccaccaacgccttccacaacggcgcttgccaggcctgtgcttctcccagcccttcaaccaaatgtcctgtttcccactgtgccagccagtccggacgatagaccagatactggtcaaacaggtccgccgcttttgaagaaagctggaacagttttcgcttgtcgctatcgtcagtcagataatgccgcaacagggtaaagtcttcgcgctccaacaattgcggcagcagagtcatcagtttccagctcatgctctgtttgttaaaggcgctctctttggggatttccggtaacacccggacgaacatatcccagataaagctcgctggcagcggaaaatcaatgtttgccgcaataccaaacttttgcgacagggtcatttgcagccactgcgccataccggtactttgcaccagaatcatctctggttcgaaaggatcgtccagccgttcgcgttcgacaataaactccatcaacgcttccagcacgtccagacgattggaatggtagacccttaacatagcggctcctgactactgacgattcgggcaatgcaggcgggtcatctcgccttctctgcccccgggtgaaactagcgtaacgctgatgctgacacatcccgcctgcgatgtctgcattcggttgacctgccagttggcaggtggcgaaatcgcgcgcagttgcgtttgctgccaaccatgccgccagagctgttggtactggtttctgctggcgagactgttcattaatgttcgctggatacccgataacgcagtgacaatcatcaccatcagcaccatcgcaaccattacctccggcaggctaaagccttgttgattcttcagggaagctgacataacgccctctctttcagcggacaaaaatcgctccagccgcgtggcgaaaaaacaatgtttccatcaatgacttcgcctgttcgccacaacgaaacgccttcataaccggcaatcaataaggcttcattatctgccagtaaacgcaaacaaacctgggcatcggttccagcgtactgcgagcactgaactgctgtctgcgtctgccaggagtgcatttttccccacgccagcgccgactgaacgatggcctggcggcgcaatgactgactttccatgctcacgcgagaggcaaaactgcgatcctgctgactcattccttgcaatagcaagctacccaaaaccagcagcatcaggaccagagccagtgacgaaacacctttttcgcggttcacaggttgaatcctgtcacgctatagctggcatccaccacggtttgcggttcagacttactggcagcacgcatattaaccgtcaacaccggcgagaagccgctgacatcctgacgtacgacctgaaaagtgtcgataatgatggcatccggattagtgactttatcccagcccttaccttcacaggatgtcgcaccgcgtagcgtttccagcacatgctccttcagacgaaatccaatctggtcagactcttttaccggttcgcgatcccagataccgttactgttcgcatcccactgcacaatgatacagtcaccctgtccgacaatttccagcccttcgccggtacagctgccatgacaataacccgccctctggagatgcttcgcgacggtaaatacccgcagccagatttcatcttccagcgccagcttacgggtgctcgttaaactttcacgctgtaacgcaggcagaaagcgtgcagcccccagcaacaatacgctactgatcgccatagcaatcaacacttccagcagagaaaaaccttgctcttttacaggcatccttctgtttctccttgctgacaaagccggagtcttccccacggcgaaaccaccagccaccactcgcccgttgagtttttgaagcgaatatgcccggcccatgcggtattgcgcaggccaaagaaagcaagcgaaggtgtcaggtcgctcatttcgacttcgggccagcgtggcacaaagaccaatggtgaactgccatgacaggtattggccccagcagcggaactcacaaggcaccataacgtcccctccctgataacgctgatactgtggtcgcggttatgccagttggcatcttcacgtaaatagagcaaatagtcccgcgcctggctggcggtttgccatagccgttgcgactgctgccagtattgccagccatagagtccacttgcgcttagcatgaccaaaatcagcatcgcgaccagcgtttcaatcagcgtataaccacgttgtgttttcatgccggcagtatggagcgaggagaaaaaaagacgagggccagtttctatttcttcggcgcatcttccggactatttacgccgttgcaggacgttgcaaaatttcgggaaggcgtctcgaagaatttaacggagggtaaaaaaaaccgacgcacactggcgtcggctctggcaggatgtttcgtaattagatagccaccggcgctttaatgcccggatgtggatcgtagccttcaatctcaaagtcttcgaaacggtagtcgaagatggattcgggtttacgtttgataatcaacttcggcagcggacgcggttcgcggcttaattgcagatgagtttgatccatatgattgctgtacaggtgcgtgtcgccccccgtccagacaaaatcgcccacttccagatcacactgctgcgccatcatatgcaccagtaacgcgtagctggcaatgttaaacggcaggccgaggaaaacgtcacaggagcgctgataaagctggcaagagagtttgccgtctgccacatagaactggaagaacgcatggcacggtgccagcgccattttatccagttcgcctacgttccacgctgaaacaataatgcggcgcgaatccgggtcgtttttcagctggttcagtaccgtagtgatctggtcaatatgacgaccatccggcgttggccaggcgcgccactgtttaccatacactggcccgaggtcgccgttttcatcggcccattcgtcccagatggtgacattgttttcgtgtagataagcaatgttagtgtcgccctgcagaaaccacagcagttcatggatgatggaacgcaggtggcaacgtttagttgtcaccagcgggaatccatcctgcaggttaaaacgcatctgatgaccaaaaatggaaagcgttccggttccggtacggtcgtttttctgtgtgccttcgtcgagcactttttgcatcagttctaaatactgtttcatggttcctcaggaaacgtgttgctgtgggctgcgacgatatgcccagaccatcatgatcacacccgcgacaatcatcgggatggaaagaatttgtcccatgctgatgtactgcacccaggcaccagtaaactgcgcgtcgggctggcggaaaaactcaacaatgatgcgaaacgcgccgtaaccaatcaggaacaaacctgagacagctcccattgggcgcggtttacgaatatacaggttgaggataataaacagcactacaccttccagcaacagctcgtaaagctgtgatgggtggcgcggcagcacaccgtaagtatcgaaaatggattgccactgcgggttggtttgcagcagcaaaatatcttctgtacgggagccagggaacagcatggcaaacgggaagttcgggtcaacgcggccccacaattcaccgttaataaagttgcccagacgcccggcaccaagaccaaacggaatgagtggtgcgataaaatcagagacctggaagaaggaacgtttagtacggcgggcgaagataatcatcaccacgataacgccaatcaggccgccgtggaaagacatgccgccgtcccagacacggaacagatacagcggatcggccataaactgcgggaaattgtagaacagaacataaccaatacgtccaccgaggaagacgccgaggaagcccgcatagagtaagttttcaacttcatttttggtccagccgctgcccggacgattcgcccgtcgtgttgccagccacattgcaaaaatgaaacccaccagatacatcaggccgtaccagtgaagcgccacgggtcctattgagaaaatgaccggatcaaactccggaaaatgcagatagctactggtcatctgtcaccacaagttcttgttatttcgctgaaagagaacagcgattgaaatgcgcgccgcaggtttcaggcgctccaaaggtgcgaataatagcacaaggggacctggctggttgccggataccgttaaaagatatgtatatgatccgcgctataaccctccgcgaatcagcccgcccatgccgcgacgctccataaaggctgcaacctgatggcgaacttcggtcgccagttgcgcttccagactacgctgcgcaagattttctgcgtcggcataatcaatgcgccgcagcaggtattttacccgcgctacagaacgtccgttcatagacagatggcgatacccaagcccaatgaggattgccacgcacatgggatcgcccgccatttcaccgcacaaacggagatcgattccatgtatttccgcttcccgggcgatcatcgccagagctcgtaacattgcaggatgaagactgtcataaatgttcgccacccgggtattgttgcgatcaacggccagaatgtattgagtcagatcgttggtgccaacagagatgaaatcgacccgctttgccagatgcggcagcataaataccattgacggcacttccagcatgatgccgatacgtggtttgggaatttcgtaaccgatcatctcctcgacttcacgtccggcacgttcaatcaggcggcgtgcttcatcaacttcatcgaggcttgtgaccatcggcaacagaatattcaggttgcccgtagcggcattagcacgcagcatcgcccgcacctggatcaagaagatctccggctgatcgagcgtaatgcgaatcccacgccaacccaggcatggattctcttcgctgatcggcatgtaaggcagctgcttatctgctccgacatccagcgtacgcaaggtgacgggtttatcattgaacatttgcagcatcccctgatactgcgccacctgttcttcttccgacgggaaaccactttgcagcatgaatgggatttcagtgcgataaagaccgatgccatcaatacggctgcccagtttttcttcatgttccgggcttaaaccagcattgagcatgacttttatacgctcaccgctttttaactgcgcgggtaaattgacgtcatcttccgccagacggctaagctcaatctcttcactaattagccgctgatattcttgcagcagtaccggctccggatcgaccagcaattcaccgcgatagccatcaacgatcagcgtcctacgatgcagcaccgaaggctgaatatccgcgcccatcacggtagggatccccagcgcacgtaccatgatcgcagcatgggagttggctgcgccatctcgcacgacaacaccgactaagcgatcctggggcagctcagcaagagttgtcgctgacagttcatctgccaccagaatgaaacgttccggccaggcgttcggcccttgattagcgtcatcaagatgaaacagcaatcgctgacccagcgcacgtaaatcgccagcccgctctttgagatagttatcgcttagcgcggcaaactgtttggcaaatttttcaatgaccgtttttaccgcccactctgccaccgagcctttatcaacctcggcaaacaattcgcgacgcagccgggtgtccgaaagcaggtgcgagtaaagatcgaaaatagccgccgtttctttttgtgcaccggcggcaaagcgtttgctgtagcggcgaaactcgtttgccgcttcttccagcgccccggtcagtcgttcgcgttccagagccggatccagcgttgatgcctgatacacctgttccattaaaggtaacgtggcatcctgccagccttcggcaatcgccacaccaggtgctgccggtaatgcgcggattcgcgtctggcgatattgcccaaacagggcagtcaactgcgactgagaaagaatagctgccatctgggtggcaagcgtcaccaggaaggattcttcactttcgtcatactggcgcaactctcgttgctgtaccaccagtacaccaagcaactggcgacgttgaataattggtacgcctaaaaacgcgcggaaacgttcttcttttacggaggggatgtatttgaagctggggtgcttttgcgcatctgcaaggtttatcggttccgccagcctgccaaccaggccgacgatcccttcatcaaacgcgagcgttacagtgcgaccgcgtggttttttcagcccccgggtcgccatcaggtagtaacaacgtcgatcatgatcggccaggtagaccgaacagacctcggtatccatcgcaagacagatgtcggtaaccagaatatttaacgcctcattcaggcgtggtgcgctggctaccttttcgactatttcgcgcaggcgagtgagcataattggcgtgacttaacctcttttacgtcgataagcagatgcgttttgtggttttggcgtattttcctgcagtgacatcaccacactcgcgaactctttcattaccctacggtagacatcacgtttaaatgacaccacctgtctgaccggataccagtaacttacccatcgccagccgtcaaactctggtgtactgctggtttgcatattgatttctgcatcgccgctcaccagctgcaagagaaaccatttttgtttttggccgatacaaaccggcttcgtgtcccaacgcaccaaacgtttcggtaatttgtagcgcaaccagttacgcgttgaagcaaggattcgaacgtctttgcggcttaatcctacttcttcaaacaattcacggtacatcgcctgctctgcggattctccggggttgattccgccttgcggaaattgccaggagtgctgaccaaatcgccgggcccacattacctgcccctggcgattacaaatcacgatacctacgtttgggcggtagccatcgtcatcaatcaccggactacctcaaaataaagctttatatacgaatgattgtttcatactccaggaagacggtaaaccactctctgcagggcattacacactaataacaattgaataactcacagttatgtgcagagttataaacagaggaaggggtggatagccgtttttattcaccttttctgtggatagagttgtgaagaactacggaattactacgggaaaacccggagcattctgaataagcccgatatagacattttaaaatattcattattagtcaatgcattacatgtaatttgagtaatgaaaaagagtaattcgtgacccaggtcacacctctcatttacgggttggcgaaagatcaaccaatgccgtatttatccacagaatgtgccactaagttaagcactgaaccactaaaaactggagtttcgtcgcacgtcaaggctgtaaatggaaacagtagtggaggtttttcacagttatcccagctttctgtggataacatggtgtaagatcctgtttattttcagtgaccagatttggaaaacccgttgcagtgttgcgcaactcgattaccggcaacctaaaaagcaatataaatcagagaattgaacaacgcatgtggaaaaagttacactgcgaatattcggcacataattgctgtttgttttttaatcaaggtatcatgacatgtcccaacctcgcccactgctctctcctcccgaaactgaagaacagttgttagcgcaagcacagcaactttctggttatacattgggagaactggcggcacttgccgggctggttacgccagagaatttaaaacgcgataaaggctggattggcgtgttactggagatctggctaggtgccagcgcagggagtaaacctgagcaagattttgctgctctgggcgtggaacttaaaactatccctgtggatagtcttggtcgtccgctggaaacaacattcgtttgtgttgccccgttaacgggcaatagcggggtgacctgggaaaccagccacgtgcgccacaaactcaaacgcgtactgtggataccagttgaaggcgagcgcagcatcccgctggcgcagcgtcgcgttggatcaccgttgctgtggagcccgaatgaagaggaagaccgacagctacgcgaagactgggaagaattaatggatatgattgttctcggtcaggttgagcggattaccgctcgtcacggggaatatttacagatacgaccgaaagcagcgaatgcgaaagcgcttaccgaagccattggtgcccggggcgaacggattctgacgctgccacgcggcttttatttgaagaagaatttcaccagtgcgctactggcccgtcattttctgatccagtagccatcgctttgacctgccgctttccgggcatataattaccgcttcatttttttggcagggctttttagatgttatttgcatggataaccgatcctaacgcctggcttgcgctcggtacgctgacgctgctggagatcgttcttgggatcgacaatattattttcctttctctggtggtggcaaagcttcccacagcacaacgtgctcatgcgcgccgtctggggttggcgggagccatggttatgcgtctggcgctgctggcatcaatcgcctgggttacgcgcctgacaaatccgctttttacaatattcagtcaggaaatttccgcccgtgatttgattctgcttctgggtggcttgttccttatctggaaagccagcaaggaaatccacgaatccattgaaggtgaagaagaagggctgaaaacacgcgtttcatcattcctcggcgctatcgtgcagattatgctgctggatattatcttcagcctcgactcggtgattaccgctgtgggtctgtcagatcacctgtttattatgatggccgccgtggtgattgccgtaggcgtgatgatgttcgccgcgcgctcgattggtgattttgtcgaacgccatccttcggtaaaaatgctggcgctctctttcctgattctggtcggctttaccctgattctggaaagtttcgacatccacgtaccgaaaggttacatctacttcgcgatgttcttctctattgcggttgaaagcctcaacctgattcgcaacaaaaagaacccgctctgatactccgtacgctctcctgcgggagggcgtactcactcctgttaccctcacagtttaagattttcctgctttcaagatatataacgtcggtttataaacagactattatcataggtgggccaaatgaggataaccggatgaaaaaatgggcagtaataatttctgcagtcggactggcgtttgctgtttccgggtgttccagtgattacgtcatggcgaccaaagatggccgtatgattttgaccgatggaaaacctgaaattgatgatgataccgggctggtgagttatcacgatcagcaaggtaacgcgatgcaaattaaccgtgatgatgtttcgcaaattattgaacgttaacaaataaggtcagcatccggctggccttaagatttttctctttcccttttcccttccctctgccatttttatattccttatgtcgtgattataaaaaggaaacggctatgcaatatcaccgtataccccacagttcgctggaagtcagcacgctggggcttggcacgatgacgtttggtgaacagaacagcgaagccgacgcccacgcacaactcgactatgccgtcgctcagggcattaaccttatcgacgttgccgaaatgtacccagtacctccgcgccccgaaacgcaagggttaaccgaaacctacgtcggcaactggctggcgaaacatggcagccgcgaaaagttaattatcgcctccaaagtgagcggaccgtcgcgcaataatgacaagggcatccgcccggatcaggcgctggaccggaagaatatccgcgaagcgttgcatgacagcctcaagcgcctacagactgattacctcgatctttatcaggtgcactggccgcagcgcccaaccaactgctttggcaaactcggttatagctggacggattctgcgcctgcagtttcgctgctggatacgctggacgcactggcagagtaccaacgcgcgggaaaaattcgttatatcggcgtgtcgaacgaaactgcatttggcgtaatgcgctacctgcatctggcggacaaacacgatctgccgcgtattgtcaccattcagaacccttacagtctgttaaaccgcagttttgaagtaggtctggcagaagtcagccagtatgaaggggtcgaactgctggcctattcgtgcctgggtttcggcacgctgaccgggaaatatctcaatggtgcaaaacccactggcgcacgtaatacgctctttagtcggttcacccgctatagcggtgagcaaacgcaaaaagccgtcgcggcgtatgttgatattgccagacgtcatggactggatcctgctcagatggcgctcgcgtttgtacgccgtcaaccgtttgttgccagcactctgctgggcgcaaccacgatggagcagctgaaaactaacgtcgaaagtttgcatctggagttaagcgaagacgtattagctgaaattgaagcggtgcatcaggtttatacttatccggcaccataagattaacgccggttaaaaccggcgttaaatattaatgacggcgctgccagatccacagcgccgttattgccagcgcaaacagcgcaccgaagccaatgccaatgggcacgaccgggatgcctaccattaccgccagcgagtaaatgcccagcatcaacaacatggcgctgttttcgccaaggttttgtactgcaatcgcattccccgccccgacgctttttttaccccgctcctgtagcaacgcattgagcggaacgacaaaaaagccccccatcacgccaatcagcatcaacaaggcataggctggcagcagctcgtgttgcagggaaaaaatcagtaccaccacgccaatcaaaatcccggctggcatacagcgtgacacggtttccagcgtaactaacttcgctgccgcacctgcgccaaccacgataccaatcgctaccatcgcgttgagataggtgggcgtagcgttatcggtaatgcccagcgccaccggtacccacagcaccaacaggaaacgcagcgtgacacccgctccccagaataaactggtgcccaccagcgaaaaacgcgtttcaccattgcgccatagcgaggtgcaggcattcaggaaactgcgggtcatgttgatgagattccaggactgccccggacgcgccgccgccagtttgggaatgtagatattggcaacgaccgcaccaccgtaggccagtgcgcatgcggccagggcgacgaggacatgccagtcagccagcacaccaccggctacggaaccgagcaaaatcgccgctatggtagaagcttccattaaaccgttagctttcactaacttactacccgtggttaattcgccgagaataccgtatttcgccggtgaataggctgcagcaccaacacccaccagcgtatagccgagaaacggattgataccaaagcagatactggctgcgcccagcagcttcaggccgttggcaaacatcatcacccggcctttggcgaagctatccgccacctgcccgacaaacggcgcaaaaagaatgtaagcacctacaaacaccatttgcaggatgggctggctccactccggatagaactgcgctttcagtaacgccagagtggcaaacagtagggcattatcgccaaacgcagagagaaactgcgccacgataaccgctttcatccccttcgaccacaacgaagtgttagtgtgcactgactcactcatcgtgttgttccgcttcgtctacccagcttttcaacgtgacaaagtcaggtttgccgctgccaagtaatggcatctgtttcagatagcgaatatcgcgcggtacagcaagctccggcacgccgtgctcgcgggcatactgttgcaacttatcgcgcgtcagttcgttatctgtggtgaaaagcaccagtgcctcgcctttgctggcatcgctcttaatcgcagtggcatggactttatctggcgaaacaccaagtgccagttgttccaccatttccagcgacaccatttcgcctgcaattttggcaaagcgttttgcgcggccctgaatctgcacaaagccctgctcgtcaaaacgcacaatatcgccagtgtcataccagccgcgctccatttcgccgcgaacattctcggcggtgggcacttccagtacacctggcttctccacccgcagatagccgttcattatgttcggccctttcagttgcaggcgtccgccctcttcgataccaggaaccgacaacaggcgcgcatccattcctggtagaatacgccctaccgtaccgggtttcgccgccatcggtacgttgatagaaacgacaggcgcgcactcggttacaccatagccttcaaggatgcgcaggccaaatttatcctgccaaagctgtttggtactttcttgtagtttttctgcgcctgccaccacatagcgtagacgatagaagtcatacgggttggcgaaacgcgcgtagtgaccgaggaaagtcgaggtaccgaacaacacggtgcaactgcggtcatacaccaactccggcacaatgcggtaatgcagcgggcttggataaaggaacacttctgcacctgtaagcagtggcgtaaacaggcctaccgtcagcccaaaggagtgaaacagcggtaatgccgacataaagcgatcgttggtggtgaagtcggcaatcgttttaatctgctcgacgttcgccagaatgcttttatggctatggacgacgccttttggatggccttcagaaccggaggtaaagaggatcagcgcctcttcttccggctgctgttttacctgcgccaggcgcggcatcagcaaatgagcgaagatccatactttgtcggcagtggtgacatctgcttttaaatcttccagatagacccagcgcacctgagtaagttgctccggcagatgccagagtttgcctttatcgagaaactggcgggaagtgaagatggttttgatttcagccgccgtaatagcactggtcagcccttttaccccagcagtgtagttcatcattgcgggaatgcggcgacgcgcgatggccccaaaaatcactgccgcactgatgcctgcattgggcagcattaagccgatgcgttcgccttcaacactgtatttttcaaggatgcgtccaacaaacagcgttttcgtaagcaatttgcgataggagtctggggtaaagttgacgtcttcgacacatttcttcccggctccgaagcggtacattgcactcagtaaagattcgtacagagtttcacgcgggcgcaccgccatacgcgcttccatcattatttgatgcagcatttcgccagcgattttgcgacggtcacgggcacgcggcgcatccggcatcgccacctgcgttggtggcaaaatatgcagagtaatttgcgggaacaagcgacgtttaaccagacctttcaggcggctgaagtgcgtaagttccgccccttcaatacgcacaggaataaccgttgcaccagacttcgccgcgacaaaacccgcgccatcgtagattttcatcagcgagcctgtagtggtgatgcgtccttcagggaaaatcaccactggtcggccctgttccaccagacgtaccagatgtttaatagccataggttgcgtcgggtcgagaggaacaaagtcgataaatgatttcagccaacgcatataccactgttggcttattgaggtgtaaacggcaaacactggacgcacaggtaaaaacagtccaagcaaaatgccatcaataaaagagacgtgattaggcgtaattagaacgcgctcgcccttcagtgcctgggtgtcacccgtaacgcgaacgcgatacaaaacacggcacaaatttcgaaaaaagctaaaaagcattccaactccctttgctctgattcagtaaaagcgaatggagggagattacacgagataaagaacgcgagcgacagtaaattaggtgcgaaaaaaaacctgcgcatccgcgcaggttggtgcaagagacagggtacgaagagcgtaccgaataatctcaccaatcaatacctctgggatcttgattgtggtctgcacgacgactcttcgccagcgagaaaacgcaaaggaatgaagggaaatgcaacaaggtgtgtaaattgtcggttactgttacagattgatgaccggccaaaaaaaacctgcgcatctgcgcaggctggtgtaattcatgtgctcaacccgaagttgacttcacctatcaatacctctgggatcaccactttagcaacctgaagccaaacgccaccagcggtcaatcgcaacagcatttcgcaaagtgtaaccaaaggtttgcaatctctttttttgtcttacttatttgcgtttggctcacattcccacgatgaaaacacgccaccccttgaaccaacgggcgttttccgtaacactgaaagaatgtaagcgtttacccactaaggtattttcatggcgaccataaaggatgtagcccgactggcaggcgtttcagtcgccaccgtttcccgcgtcattaataattcacctaaagccagcgaagcttcccggctggctgtgcatagtgcaatggagtctcttagctatcacccgaacgccaacgcccgtgcgctggcgcagcagaccactgaaacggtcggtctgatcgttggtgatgtttccgatccgtttttcggtgcaatggtgaaagcggtcgaacaggtggcttatcacaccggtaatttcttattgattggcaacggttaccacaacgaacaaaaagagcgtcaggctattgagcaactgatccgccatcgctgtgctgcgttggtcgtccatgccaaaatgatcccggatgccgatttagcctcattaatgaaacaaatgcccggtatggtgctgatcaaccgtatcctgcctggctttgaaaaccgttgtattgctcttgacgatcgttacggtgcctggctggcaacgcgtcatttaattcagcaaggtcatacccgcattggttatctgtgctctaaccactctatttctgacgccgaagatcgtctgcaagggtattacgatgcccttgctgaaagtggtattgcggccaatgaccggctggtgacatttggcgaaccagacgaaagcggcggcgaacaggcaatgaccgagcttttgggacgaggaagaaatttcactgcggtagcctgttataacgattcaatggcggcgggtgcgatgggcgttctcaatgataatggtattgatgtaccgggtgagatttcgttaattggctttgatgatgtgctggtgtcacgctatgtgcgcccgcgcctgaccaccgtgcgttacccaatcgtgacgatggcgacccaggctgccgaactggctttggcgctggcggataatcgccctctcccggaaattactaatgtctttagtccgacgctggtacgtcgccattcagtgtcaactccgtcgctggaggcaagtcatcatgcaaccagcgactaaccgcagttaaagcaattccagcgccagtaattcttcgatggtctggcgacggcgaatcaaccgcgcctgaccattatcaaacagaacttctggtaacagcggacggctgttgtagttggatgacattgatgcgccatatgcccctgtatcatgcagtaccagataatcacccgccttcacttccggcaaggcgcgggtttcaacatttcccccttcctgctgggtaaagacatcgcccgattcacataacggtccggcgacgacggtttccaccgttggcgcgtgttccagagaacgaccatcagctgccagggcactgatatggtggtaactaccgtacattgccgggcgcatcagatcgttgaacccggcatcaaccagcacaaagtggcggctccccatttgtttgacgctccgcacctgagtaattaatacgccagactgcgctaccaggaagcgacccggttcaatttccagtttcacagggtggcccaaatggcgggcgatttgctcacgcgcggcattccacagaccataataatgttcggtatcaaccgcctcttcaccctgttgataaggaacagaaagcccaccgcccgcagaaatagcctgtaaatcctgaccgaattcgatgacctgacgcaccatagcaccacacacctgttccagatgggcataatcaacgccagaaccaatgtgcatgtgaatgccgaccagctgcagatgatgacgttgtatcacgtccagtgcggcgggcagatcggtgtaccagataccgtgcttgctgttttcgccaccggtattggttttttggctatgtccgtgaccaaaccccggattaacgcgcagccatacccgatgccctggcgaaaccaggcccagttggtcgagcatatcaacagaacccgcattcaccggaatttgcaattcactgacgcgttcaagcgtcgccttatcgataacatctgccgtaaaaacaatatcatcggggtgcgtttgcggattgtaacccgccgccaacgcacgctctatttcgcctaacgagacggaatccactttcacgccctgctcacgcattaagcgcaaaatatgaatattggaacaggctttctgtgcaaagcgcaccacatcaaactgtttcagcgctgcaatctgccgacgaataatttgcgcatcgtagacccacaccgggcagccaaattcagcgggcaaacgcagcagattttcggcggtgagatcggtatcggtgctgaacagtgaatgtggcataacaaactccagataagtgcttttttatgattacgccacatcataaaaagaataaaaaatatcgatttatgtcgagtctatgcaaaaatgatatggattaccggattgcgagagagcgctaatggccgccgttaacttacgtcatattgaaatttttcatgcggtaatgaccgccggaagcctgactgaggcagcacacctgctacacacctcacagccaaccgtcagccgcgaactagcgcgctttgagaaggtgatcgggctaaaattgtttgagcgcgtacgtggacgattacatcctaccgtgcaaggactgcgtctgtttgaagaagtgcaacgatcctggtacggactggatcgcattgtcagcgccgcagaaagtctgcgcgagtttcgccagggagaactgtctattgcctgcctgccggtcttttcgcaatcttttttaccgcagctcctgcaaccctttctggcacgttatcccgatgtcagcttaaatatcgtgccccaggaatcaccgctacttgaagagtggctctcggcccagcgtcatgatttaggactcactgagacactccatacgcctgcgggaacagaacgtaccgaattactctctttagatgaagtgtgtgtgttacctccgggtcatccgctgacggtaaaaaaggtattaacgccgggtgattttcagggtgagaactacatcagcctttcccgtactgacagctatcgccagttgctggatcagctatttactgaacatcaggttaaacgacgcatgatcgtagaaacccacagcgccgcgtcagtctgcgcaatggtacgggcgggggtaggtgtttcggtggttaacccgctcaccgcactggattatgcggcaagcggtttagtggtgcggcggttcagtattgcggttccgttcaccgtcagcctgatccgccccctgcaccgcccgtcatcagcgctggtgcaggcgtttagtgagcatttacaagcggggttaccgaaactggtcacttctcttgacgctattttgtcgtcagctacgacagcataaaagcgacagcatcctcggcatggatcgccgcagtatcaaacacaggcaaaacactgcgctcttctggcaccagtaaaccaatttctgtgcagccaaaaatgacgccctgtgcgccctgttctgcaaggcgagcaatcacttgcgcataataagcgcgtgacgcttcggtaaattgccccagacacagttcttcaaaaataatctgattaattttcgcccgttcatccgcttcaggaataagacaattgatggaaaattgttccgtcagccgcccgcgataaaaatcctgttccatggtgtaacgcgtacccagcagcgccacacgagtcattccggccccggtaattgcacgtccggtggcatccgcaatgtgtaagaaaggcagagtgcaacgtgactcaatggcatccgccactttatgcatcgtattggtacataacacaataccttctgcgcccgcccgctgtaagccaagcgccgcctcagccagaatgtccccggttttatcccattccccgcgacgctggcactcttctatttcatgaaaatcgacgctatgtagcagcacttgcgcagagtgaagcccaccaagccgctgtttaatgccttcatttatcagacgatagtaaggaatggtggattcccagctcattcctcccagcaaaccaattgttttcattcctctctcctgatgtgtgttaccgcaacaaggctgaataaggaacgagacaaacgcctcaacggccaggtgcccgatctctattaacgaaaaaagggccggatgtacagcacatccggcccgtgaaatcagacgccgatatttctcaacttctcgcctgccatcagtttgcgttcgatatgttccagcgtgacatttttggtttccggaatgagccagaaagtgatgcccacaaacgcaatgttcagcgcagtgtagagccagaacgtaccggcagcgccaatgctatcaagcagtgtcaggaaggtcgcgccgataatcatattcgacacccagtttgtcgtcgtcgaacaggtaataccgaaatcgcggcatttcagcggctgaatttcagagcacaggatccacaccactggcgcggcgctcatcgcataaccggcaatacacatcatcgtcatgccaacagagagccaggacaagccactggaagccgtaccgttatcaaactgcatcaggcaatagcccagcaccagagtgcctaacgccatcacgctgaaaccaattttcagagccggtttacgacctgctttatctaccgtaaagaccgcaatgaaggtcgcgaacataaaggtcagtcccacgaccagagtcgcaatcatctgttgttctgtggtcgtaaagcccgccattttgaagatacgcggcgcatagtacatgatgatgttcataccggtaaactgctgcatcgcctgcaacaacataccgagaaacacagcacgacggacgttacggttgatcttaaacagtgcccaaccgccttgttttaacttcaggctttcacgaatttcgttgagttcttctcgcgctttttccgacgtatcgcgcagcatacgcaacacttcttccgcctcaatatgacgccccttttccgccagccagcgcgggctatttggcaggaagaccaccagaataatcagcaggactgctggtaaagcaagaacccccaacattgcgcgccagttaccgctataactgaacgctgtatcggataaaaacgccagcacgatgccgagtgtgaccatcaactggtacatactgatcatcttaccgcgaacgttttcacttgccatttcagaaagatacagaggagcggtgtaagacgcgatcccgacagcaatgcccagcaccacacgagcggcgattaacatctctacgctggtcgcaaaagcggaccctatagaaccgagtacaaacaggatggcccccgccatcaggctgtatttacgacccaggcggaacgacagccaaccattaaacagcgcaccaattgctgcgccgagcatcatgctactaaccacccattcctgcaaacgactggtcagcacaaagtgatcggtaatgaacggcaacgctccggcgattacgccgatatcaagaccaaataacaatcctgcgaccgcagcagctaccgaaacaaacatattcatacgccgcgtatcccgcaaagaacgtggcgttaaagcagattccgtattgatagtaaccattttttcctgccagcagagagtaagacatagtgaaaaaatacgtgaacaactcacgcagatgtcaggtcggaaacagcataaatatggattaaattgctgcgacatgtcgttatgtgatggatattccaattttcaaattaagttgaattattgagattattattaaccacctaattttacagcagataaaattcataaagttcattaattgataattaatatggattatttcataaccatgatatggattatgatgatctacaggtataaaaaaccctgccatgcggcagggtcataaaagtaagaagaatgaattaacgcgccagccaaccgccatccacggcaatggtataaccattcacataatctgaagcgctggaggcaaggaacactatcggccccatcaggtcactcggcagtccccaacgaccagctggaatgcggtcgagaatttccgcgctacgttgttcatctgcccgtagttgttgagtattgttggtcgccatgtaacccggagctatcgcattaacattaatgttgtgtttagcccattcgttcgccatcaatcgcgtcacacccatcacgccgctttttgatgcggtataagaaggcacacggatcccgccctggaaggagagcattgacgcgatattgataatcttgccgccattgccttgcgcgataaagtgtttcgccgctgcctgagacatgaagaatacgctcttgatattcaggttcatgacatcgtcccagtctttttcgctgaactcgagagcgtcttcgcggcgaatcaatccggcgttattcaccaggatatcaatatgaccaaattcagctaccgcgcgatccagcagtccaggaatgccatcaatctttcgcagatcggcggtcaggcttaaaaaacgacgccccagcgccgtgacctgctcgatggtttcagtcggttcaacgatgttaatgccaacaatgtcacagcccgcttgcgccagccccaacgccatcccctggcccagcccagtatcacaaccagtgacgaccgcaactttaccttcgagagaaaatgcacttaaaatcataacaataccttattcgtttatgcccacaactagcgcaaatctttaacggccacatggtccatatcatcaaagacctggttttcaccgaccatgccccagataaaggtataagctttggttccgacgccggaatgaatcgaccagctcggggagatcaccgcctgctcgttatgcatcacaatatgacgcgtttcttgcggctgccccatcatgtggaaaacgcaggcgtcatcatccatattgaaatagaaataaacttccatccggcgctcgtgggtgtgacacggcatggtgttccacaagttacccggagccagctccgtcagccccatactcaattggcaggtttccagtacatccgggacaaaatatttgttaatcgtgcgacggttactggtgaggttatcgcctaacgtgactggagatacttcgtccggtgtgacttttttggtgggatacgtcgtatgcgcgggtgcgcaattgtaataaaacttcgccggagtgccggtatcaatactggcaaagacaacttcttttgcacctttaccaacatacagggcgtcgcggtgaccgatttcatagcattggccatcgacagtaatcgtaccggcaccgccaatattgataacacctaactcgcgacgttcaaggaaatagcttacgccgagttgtttaccaacttccccgccaacggaaaccgttttagttatcggcataatgccgccaacaataattcggtcaatgtggctgtaaaccatggtgtactcatcggcgacaaataccttttcaaccaaaaattcattgcgcagcccttgggtatccagcgtttttgcgtgcgcactgtggatgctctgtcttacgtccacatcaacctccgataatcagtgaagcgtgaaaatagaaaacgatagtgaaacactgtttcgttttctctataaagggatgatatgcccatgggctagggttttcaattaaaaataaaacaatgtttcatttttaagttaaggattaaaaaaagtgcagtgtcgatcacgaatatgtcatgagaatggaaaaatgagggagcccagaaaatgtatgtcgacttgccagccatcattattcaacagattaatgacggcagatatttatcggtaaggaggaaatgcagagctattcgtcacgttcaatggtcaatgccacgccctggcccccgccgatacaaagcgttgccagtcctttgcgggcattacgtttcaccatttcatgaaccagagaaaccaggattcggcaaccggaagcgcctatcgggtgaccaagtgcgatcgcaccaccattgacattgacccgacgctcatcccactcaagcatcttgccaaccgaaagcgcctgtgcagcaaacgcttcattagcctcgataagatcgacatcagccaactgccagcctacacgctccaggcaacggcgggtcgcatacaccggcgcaattcccatcaatgccggatctacaccaacgctggcaaatgcgcgaatgcgggccagcacgggtaaattcaacgctcgtgctttggcttcgctcatcatcattaccgcagctgcgccatcgtttatggatgatgcattacccgctgtcacagaaccgagactatcaaatgaaggatttaaacgggctaaaccttctgcactggcgtcagtgcgtggctgttcatcggtatcaacaaccaacgtctgaccgttactttgggtcattaccgggacgatctcatctttaaatcgtccggcgtcaatcgccgctcgcgctttttgttgcgagctaagtgcgtaagcatcctgcaattgacggctgatgccatattcgcgagccagattttcggcggtgacaccaatatgataatcattgaaggcatcccataacccatcatgcacaagactgtcaaccagctggctattgccaagctgtgcaccggtgcggctatcagtcagaacatgtggtgcgcggctcatgttttcctggccaccggcgatgacaatatcagcctcgccacactgtatcgcctgagtagccagatgcagtgctttaagtccggaaccgcagacgtcattaatcgtgattgcagaaacgctattaggcagaccacctttaatagccgattgccttgccggattctgccctgcccctgcagtcaacacctgaccaagaattacttcatccaccgcatatgcaggaacgccggtacgttctattaacgctttcacgaccagactaccaagttccacggcggaatgacccgctaacgcaccgcgaaagcagccgataggtgtccgtaacgccccgacaatcacaacgtctttcatcacaacctcgcaccaattaacagtgcaatagtaaatgattgttaattacagttatcttaattgtttaaaaaaagtgatttttatcacaaaggaaatatgcctgagcagtagtcagagtcataactggcacgtaaggtttgcaaccactaacccaccaatagaggggtagatagggcgttaatctcccatacttaacctggtttatggtaaattgccctccattttgtttaatttgtagatgatacgttcagataatgtctaatatttggtctaaagaagaaactctgtggagtttcgcgctctacggcacagccgttggtgcaggcacgctcttccttcctattcagttaggttcggcaggggctgtggtcctgtttattactgctctggtcgcctggcctttaacatattggccacataaagccttatgccagttcatcctctcatcgaaaacatcagcaggtgaagggataacgggcgcagtaacacactactatggcaagaagattggtaatctgattaccacgctgtacttcatcgccttttttgtcgtcgtgttgatatatgcagtggcaattaccaactcacttacggaacagctggcaaagcatatggttattgatcttcgcatccgtatgttggtgagtctgggtgttgtattaatcctgaatctcatttttctgatgggacgccatgcaaccattcgggtaatgggttttttggtattcccattgattgcctatttcttatttctttccatttaccttgtcggtagttggcaacctgatctattaacgacccaggtagagttcaatcagaatacccttcaccagatatggatatcgattcccgtgatggttttcgcctttagccatacgcccattatttctacgtttgccatagacagacgtgaaaaatatggcgaacacgctatggataaatgcaaaaaaattatgaaagtcgcttatctcatcatctgcataagtgtactgttctttgtctttagctgcctgctttctattccaccttcgtatattgaagcggctaaagaagaaggggtcaccattttatcggcgctttctatgctgccgaacgccccagcatggctgtcaatttccgggattattgtcgcagtagttgcgatgtcgaaatcattcctgggtacgtactttggcgttattgaaggtgccacggaggtcgtcaaaacaacactacagcaggttggtgtaaagaaaagtcgtgcatttaaccgcgcactatcaattatgttggtatcgctgatcaccttcattgtttgttgcattaacccgaacgcgatttcgatgatttacgcgatcagcggcccgctcattgccatgatacttttcatcatgcctacgttgtcaacgtatctgatcccggcgcttaaaccctggcgttccatcggaaatctgattacgctgatcgtgggtatcctgtgcgtatcggtaatgttctttagctgatatccattgtgaatggttcaaaattgctacaattttgaaccattccagttttcataatgttcattcgttattattccgcactatcacttccctcatcatatcctagtattatcagttagttaaacacacaaagagatctgaacatcttaaataagactatttaagatgcataacttagattcgcaagatatcttctggtcattcaaaaacaatttgcgatatagatattctcataccatgagatagttatctgaaccaccctcaaccaggtaagattaaatcagtgaaacataatcatatttaataacgagaaatgcattttaaaatgtcttaatcagaattatagcaaatacagattaatcgcaattttttccagcaaaattacaaaatcatggtgtattgacatcatcaatcaccaatgaaattatgcaattatatacggatagggaggttcttaacatggggctttgtagtcgttataaaagtcttacatgcaatagttgctcaatgcattgccaaataatgccagaagagtcaccgcgtttgcagtactgcgcaaactcgtgtttttgtatgtggcccgaagaaagttcatattttaatcgtggtgtggtagaaggtatcttaacaaaaaaccacaatgcgagattaagcggatatatttttgtcgatttttcagtaagttttttacgtctattccttgaaaaagactggattgactatcttgcaagtactgacatggggattgttttagtcagcgaccgcaatatgcaatcgttagctaattactggcgaaaacacaactcagcaatatctgctgtcatatataatgatgatggtcttgatgttgccaatgaaaagatcagacaactatttattggtcgttatttatcatttaccagaggtaacacattaactcagatggaattcaccataatggggtatatggtttctggttataatccatatcagattgctgaagttctggatatggatatccgtagcatctatgatcttacccagcaatagtggacacgcggctaagtgagtaaactctcagtcagaggtgactcacatgacaaaaacagtatcaaccagtaaaaaaccccgtaaacagcattcgcctgaatttcgcagtgaagccctgaagcttgctgaacgcatcggtgttactgccgcagcccgtgaactcagcctgtatgaatcacagctctacaactggcgcagtaaacagcaaaatcagcagacgtc

SEQ ID NO: 55 - DNA, 48558 bp, Escherichia coli
  source 1..48558: mol_type = genomic DNA
aaatggcgaagaaacggtctaaataggctgattcaaggcatttacgggagaaaaaatcggctcaaacatgaagaaatgaaatgactgagtcagccgagaagaatttccccgcttattcgcaccttccttagctatccggcggatgacattaaaacgttgatgacgacggcgcgcgccagtctgacgcaatccaccacgctgtttaaaagttttatggcgatgactgcgggcaacgagcacgtcagggcattgcaaaaagagacggagaaaagttttgcccgctggcacaacgatctcgaacatcaggcgacctggcttgaaagtaatcaactttcggatttcctcactgcgccggtgcagggatcacagaatgcgtttgacgttaactttgaggcctggcagctggagatcaaccatgtgctggaagccgccagtgcgcaaagccagcgtaactatcagatttcggcactggtgtttatcagcatgattattgttgcggcgatctacatcagcagtgcgctgtggtggacgcgcaagatgattgttcaaccactggccattatcggtagccattttgacagcattgctgcgggtaatctggcgcgtccgattgcggtatatggtcgtaatgagatcaccgccatttttgccagtctgaagaccatgcagcaggctttgcgtgggacggtaagtgatgtgcgtaagggaagccaggagatgcacattggtatcgcggagattgtcgcaggcaataacgatctctcaagtcgtaccgaacagcaggcggcatcgctggcacaaacggccgccagtatggagcaattaaccgccacggtagggcaaaacgccgataacgcacgacaggcgtcggaactggcaaaaaatgccgcgacaacggcgcaggcgggcggtgttcaggtcagtaccatgactcacaccatgcaggagatcgccaccagctcgcaaaaaattggcgacattatcagcgttatcgacggaattgctttccagaccaatattctggccctgaatgcggcagtggaagcggctcgcgccggagagcaggggcgtggttttgcggtagtggcaggtgaagtgcgcaatcttgccagccgtagcgcgcaggcagcaaaagagatcaaagggctgatcgaagagtcagtcaatcgtgtccagcagggttcgaaactggtgaataacgccgccgcgaccatgatcgatattgtcagttcggtgacccgcgtgaacgacattatgggagaaattgcctctgcgtcggaagaacaacagcgggggattgagcaggttgcacaggctgtcagccagatggatcaggtgactcagcagaacgcctcgctggtagaagaagcggcggtggcaacggaacaactggcgaatcaggccgaccatctttcgtcgcgtgtggcggtatttacccttgaagaacatgaagtagcacgacatgagtcggcgcagttacaaattgcgccagtggtatcctgaagtgattgagaaggcgctatgacttcatctctgccctgtgggcaaacgtctttattgttacagatgaccgagcgcctggcgctttccgacgcgcattttcggcggataagtcaattgatctatcaacgagccgggatcgttctggctgaccataaacgcgacatggtttacaaccgactggttcgtcgtttgcgttcgctgggactgacggatttcggtcattatctgaacttgctggaatctaatcagcacagcggtgagtggcaggcgtttatcaattcgctgaccacgaatctgacggcatttttccgtgaggcacaccatttccctctgctcgcggatcacgcacgtcgccgttctggcgagtatcgcgtatggagcgcggcggcttcgaccggcgaagagccgtacagcattgcgatgacgctggctgacacattgggcaccgcgcccggacgctggaaagtgtttgccagtgatatcgacaccgaagtgctggaaaaagccagaagcggtatttatcgccatgaagagttgaaaaacctgacgccgcagcaactgcaacggtatttcatgcgagggacgggaccgcatgaagggctggtacgcgtgcgtcaggagctggcgaactatgttgattttgccccgctgaatctactggcgaaacagtacaccgtgccggggccgtttgatgcgatcttctgtcgtaacgtcatgatctacttcgatcaaaatacccagcaggagattttgcgccgctttgttccgctccttaaacccgacggattgctgtttgcgggtcactctgaaaactttagccaccttgagcgccgcttcacgctgcgtggtcagacggtgtatgcgctaagtaaggattaacgatgagcaaaatcagggtgttatctgtcgatgattcggcactgatgcgccagatcatgacagaaatcatcaacagccatagcgacatggaaatggtggcgaccgcgcctgatccgctggtcgcgcgtgacttgattaagaaattcaatcccgatgtgctgacgctggatgttgaaatgccgcggatggacggactggatttcctcgaaaaattaatgcgtttgcgtccaatgcccgtagtgatggtttcttccctgactggcaaagggtcagaagtcacgctgcgcgcgctggagctgggggcgatagattttgtcaccaaaccgcaactgggtattcgcgaaggaatgctggcgtatagcgaaatgattgctgaaaaggtgcgtacagcagcaaaggcgagccttgcagcacataagccattgtcagcaccgacaacgctgaaggcgggtccgttgttgagttctgaaaaactgattgcgattggtgcttcaacgggtggaactgaggcaattcgtcacgtactgcaaccgttgccgctttccagcccggcattgttaattacccaacatatgccgcccggtttcacccgctcttttgccgacagacttaataagctttgccagatcggggttaaagaagccgaagacggagaacgtgtcttgccggggcatgcctatattgcgccgggcgatcggcatatggagctgtcgcgtagtggcgcaaattaccaaatcaaaattcacgatggcccggcggttaaccgtcatcggccttcggtagatgtgttgttccattctgtcgccaaacaggcggggcgtaatgcggttggggtgatcctgaccggtatgggcaacgacggcgcggcgggaatgttggcgatgcgtcaggcgggggcatggacccttgcgcaaaacgaagcaagttgcgtggtgttcggcatgccgcgcgaggccatcaatatgggtggtgtctgcgaagtggtcgatcttagccaggtaagccagcaaatgttggcaaaaattagtgccggacaggcgatacgtatttaaatcaggagtgtgaaatggcggataaagaacttaaatttttggttgtggatgacttttccaccatgcgacgcatagtgcgtaacctgctgaaagagctgggattcaataatgttgaggaagcggaagatggcgtcgacgctctcaataagttgcaggcaggcggttatggatttgttatctccgactggaacatgcccaatatggatggcctggaattgctgaaaacaattcgtgcggatggcgcgatgtcggcattgccagtgttaatggtgactgcagaagcgaagaaagagaacatcattgctgcggcgcaagcgggggccagtggctatgtggtgaagccatttaccgccgcgacgctggaggaaaaactcaacaaaatctttgagaaactgggcatgtgaggatgcgactatgatgcaaccatcaatcaaacctgctgacgagcattcagctggcgatatcattgcgcgcatcggcagcctgacgcgtatgctgcgcgacagtttgcgggaactggggctggatcaggccattgccgaagcggcggaagccatccccgatgcgcgcgatcgtttgtactatgttgtgcagatgaccgcccaggctgcggagcgggcgctgaacagtgttgaggcgtcacaaccgcatcaggatcaaatggagaaatcagcaaaagcgttaacccaacgttgggatgactggtttgccgatccgattgaccttgccgacgcccgtgaactggtaacagatacgcggcaatttctggcagatgtacccgcacataccagctttactaacgcgcaactgctggaaatcatgatggcgcaggattttcaggatctcaccgggcaggttattaagcggatgatggatgtcattcaggagatcgaacgccagttgctgatggtgctgttggaaaacatcccggaacaggagtcgcgtccaaaacgtgaaaaccagagtttgcttaatggacctcaggtcgataccagcaaagccggtgtggtagccagtcaggatcaggtggacgatttgttggatagtcttggattttgatttgtattgcctgatgtggcgtgaccacgtcatatcaggcggtctgataaggcgatgacgccgcatccgacaaacgcacactatgcttgatgtgtggcagcaaaagccctaaatcccacctgttttgccccttactcaaaccattgaacgctttgcgctctggcatcattcacgcttaatactctttccaggattggcgacgtgtctgacgagagcgacgacaaaacagaagcccccacacctcaccgactagaaaaagcgcgggaagaggggcaaatcccgcgttcccgtgaactgacctcactgctgattttgctggtgggcgttagtgttatctggtttggcggtgtgtcgctggcccgtcgattgtcgggcatgctctccgctgggctgcattttgatcacagtattatcaaagacccgaatctgatcctcgggcagattattctgctgatcagagaagccatgctggcgctgctgccactgattagcggcgtggtactggtggcgctcatttctccggtcatgctgggagggctggtatttagcggcaaatccttgcagccgaagttttccaaactcaacccgctaccgggcattaaacggatgttctcggctcagactggcgcggagttgcttaaggcaattttgaaaaccatcctggttggtagcgtgacggggttttttctctggcatcactggccgcagatgatgcgcttaatggccgagtctccgattaccgccatgggtaatgcgatggatctggttgggctatgcacactgctggtggtgattggtgtcattccaatggtgggatttgacgtctttttccaaatcttcagccacctgaaaaagctgcgaatgtcgcggcaggatattcgtgatgagttcaaacaaagcgaaggcgacccccatgttaaaggacggatccgtcagatgcagcgagctgccgcacggcgtcggatgatggccgatgtgccgaaagcggatgtcattgtcaataacccgacccactattcggtagcgttgcagtatgacgaaaacaaaatgagcgcaccgaaagtggtcgctaaaggtgcagggctggtcgcgctgcgaattcgtgaaattggcgctgaaaataacgtcccgacgcttgaagcgccgccgctggcacgagcgctgtatcgacatgcggagattggtcaacaaatcccgggtcaactgtacgccgcggtggcggaagtgctggcctgggtctggcaactgaaacgctggcgtctggctggtggacagcgccctgtacaacctactcatcttccggtgccggaagccctggattttattaacgagaaaccgacccatgagtaatctggccgcgatgctgcgcctgcccgcaaacctgaaatcgacacaatggcagatccttgccggaccgattttgatcctgttgatcttgtcgatgatggtgctgccactgcccgcattcatactcgacctgttgtttaccttcaatattgccttgtcgatcatggtgttgctggtggcgatgtttacccagcgcacgcttgagtttgctgcgtttccgaccattctattgtttactacgctgttgcgtctggcacttaacgtggcttcaacccgtatcattttgatggaagggcataccggcgcggcggcggcagggaaggtggtcgaagcgttcggtcacttcctcgttggtggcaatttcgctatcggtatcgtggtgtttgtcattctcgtgatcatcaactttatggtcattaccaaaggtgccgggcgtatcgcagaagtgggtgcgcgctttgttctcgatggtatgccgggtaagcagatggcgattgatgccgaccttaacgccggattgattggtgaagatgaggcgaaaaaacgccgctccgaagtcactcaggaagccgatttttacggctcaatggacggggcaagtaagtttgttcgcggcgatgccatcgccgggatcctcatcatggtcattaacgttgtcggcgggttgctggtcggtgtgctgcaacatggcatgagcatgggacacgcggcggaaagttatacgctattgaccattggcgacggtctggtggcacaaattccggcgctggtgatttctaccgccgcgggggtcatcgttacgcgtgtcagcaccgatcaggatgttggcgagcagatggtgaatcagcttttcagtaacccaagcgttatgttgttaagcgccgccgtgctcggtttactcggcctggtgcctggaatgccgaacctggtatttttgctgttcactgccggattgctcgggctggcctggtggatacgcggacgcgaacaaaaagcgcctgccgaacccaaaccggtaaaaatggcagagaataatacagttgtcgaagcgacgtggaacgatgtacaactggaagattctctgggaatggaagtgggttatcgactgatcccgatggttgatttccaacaagatggcgagttgctgggccgtattcgtagtattcgtaagaaatttgctcaggaaatgggcttcttgccgccggtggtgcacattcgcgacaatatggatctgcaacctgcccgctatcgcattttgatgaaaggcgtggagataggcagtggtgatgcttatccggggcgttggttggcgattaaccctggtaccgctgccgggacgttacctggtgaggcgaccgtcgatccggcatttggcctgaatgctatctggattgaaagtgcgctaaaagaacaggcgcagattcaggggtacaccgtggttgaggccagcacggtagtggcaacgcatcttaaccacctcattagccagcatgccgcagagctgtttggtcgtcaggaggcgcaacagctgttggatcgcgtcgcccaggagatgccaaagctgacggaagatctcgttcctggcgtcgtcacgctcaccacactgcataaagtgctgcaaaatctcctcgatgaaaaagtaccgattcgcgatatgcgcaccattctcgaaacgctggcggaacatgcgcccatccaaagcgatccacatgaattaaccgccgtcgtgcgcgtggcgttgggacgggcgattacccagcagtggtttcctggcaaagatgaagtccatgttattggcctcgatacaccgctggaacgtttgttactacaggcgctgcagggcgggggaggactggagccagggctggcggatcgtttactggcgcaaactcaggaagcgctatcccgtcaggagatgctgggtgcgccgccagtattgttggtgaaccacgcgctgcgaccattattgtctcgcttcctgcgccgcagcttgccgcagttagtggtcctgtcgaatctggaactgtctgataaccgacatatccgcatgacggcgacaattggcggcaaataatgagaaccttattagcaatattattgtttccgctgctggtgcaagccgccggggaggggatgtggcaggcaagtagtgtaggaattacgctaaatcatcgcggtgagtcgatgtcgtctgcgcctctttctacgcgacaacctgcttcaggattgatgacgctggtagcgtggcgttatcagcttatcggcccgacaccttcaggactgcgggttcgcttgtgttcgcaatctcgttgtgtcgaattagaggggcagagcggaaccaccgtggccttttccggtatagcggcagcagaaccgttgcgatttatctgggaagtgccaggcggtgggcggttaattccaccgctaaaggtacaacgtaatgaagtgattgtgaattatcgctgaaggacaaaaaaattacgcgctcgcgagtatgtttaataactcagtgaaaaaggctcgatgtcttgttgcaattatttatcaggaatagcttgcaacaaaacatgccaaaaagatgtgaattatcctcttgtcaaagggcttggataaaaatcttcagagttacggtatagctgcaactggcgagttcgcgtattggtctgtatgatcatacatgagagccattctgattcagaataagggtcacttaaatcctgaacgtcctcatttgaaaggattaattcacattctttgtccctaaaatccagccaggctcgctgtgattttttaagcaagttaagttgttcggtatcaggtttttttacacctgtgcgtggcacttgttctatataacgataagcttcaccataggctttatttaattgcgcatcgacgagattgtattcttgtcgcaggcatgatttgatcacgttaatgtcagtatcatcatctgaatttttttgccaacaatctttgatggctgaaatgtcatggtcgtttactataaccgtatcttctgcgtaagcctggcaagagataatgcctaatgttaatacaagaaatttaaacactgcggtattccttaaattcaaccgttatcgtttccctggggccggatattacgcttctggcctcttatccaacagtcagaaaacaatggcatgtccattttcagaatacatttagatggcaataaaaaagcctgatcaggtaaccctgatcaggctttactctcacgaaaaatcgattacatacgctctactgtctcaatacccagcgtatccagacccagctttagcgtcttcgctgtcagttgtgccagtttcagacggctgttacgcacttcttcgttttctgcgctgaggatcgggcagtgctcgtagaagccagagaacagaccagccagatcgtacaggtaagcacacattacatgcggcgtgccttcacgggcaaccacggtgagggtttcttcaaactgcagcaggcgagctgccagttgcgcttcacgatcttcacggatgattaccggagctgcagccagttgctcatcgtcaatttctgctttacggaacacggacaatacacgcgtgtatgcatactgcatgtatggcgcggtattaccctcaaacgccagcatgttgtcccagtcgaagatgtagtccgtggtgcggtttttggagagatccgcatatttcaccgcaccaataccaaccgcgttagccagtttttccagctcgtcggctggcatatccgggttcttttctgccaccagacggcgtgcacgttccagggcttcatccagcagatcggccagtttcacggtaccacccgcgcgggttttgaacggtttgccgtctttacccagcatcatgccgaacatgtggtgttccagcggtacggattccggtacatagcctgctttacggacgatcgcccatgcctgcatcaggtgttgatgctgacgggagtcgatgtaatacagcacgcgatcggcatgcagtgtttcataacgatatttcgcacaggcgatatcagtggtggtgtagagatagccgccatctttcttctgaatgatcacgcccatcggttcgccttccttgtttttaaactcatcaaggaatacgacggtcgccccttcgctttctactgccagacctttggctttgagatccgccacaattcctggcagcatcgggttgtagaggctttcgcccatcacgtcatcacgggtcagcgtcacgttgagacgatcgtaagtgatctggttctgcgtcatggtgatgtcgaccagtttgcgccacatctcgcggaaatattcgtcaccgctttgcagttttaccacgtagttacgtgcacgctcggcaaactcttcatcttcgtcgtaatgctttttcgcatcgcggtagaaaccttcaaggtcagccagctccatttcaccggcgttttcctgctgctgcttttccagccatgcaatcagcataccgaactgagtgccccagtcgccgacgtggtttgcgcgaatcactttgtgaccgaggaactccagagtacgcactgctgcgtcaccaataatggtagagcgcaggtgaccgacatgcatctctttcgccacgtttggcgcagagtagtcaaccacaatggtctgtttttctggcgtagaaacaccgagacgatcggacgccagcgcctgctgaacatgttcagccaggaatgccggatcaaggaaaatgttgataaagcctggaccggcgatctcaactttgctggcgataccgttaagatccagatgagtcagcacctgctctgctaattgtcgcggtgccatacccagttttttagcaactgccatcatgccgttagcctgatagtcgccgaactgaacttttgctgactgacgaacctgcggttcgcaatccgcaggcgcgcctgccgcaatcatggcctgacggactttttctgagagaagagcctgaatattcaccggaataccttacattgatgaagcgagcaaaaattgcccgcaccagttaaagaaattagggcgggagtatactgcaaatggctgttttcgtcagcaacgtgcgcgtggcgtattgccgttttcactattgcatcagaagcggcgtgaaatcagcggttggttggcacagggcaacagggtaaattaacgcttttactgaaagacgaagagtgattatggcgaactggcaatctatcgacgagctgcaggatattgcatcggatttaccgcgatttacccacgcattagatgaactttcccgccgtctggggttggatatcactccgctgactgccgatcacatttctttgcgttgccatcaaaacgtcaccgctgagcgctggcgtcgcggttttgaacagtgtggcgagcttttgtcagaaaatatgatcaatggcagaccgatttgtctgtttaaattgcatgaaccggtacaggttgcgcactggcagttttccattgtggagctaccgtggcccggggaaaaacgttacccacacgaaggttgggaacatattgaaatcgttctgccgggtgatccagaaacgctgaatgcccgtgcgctggcattgctttctgatgaaggactcagcctaccggggatctcagttaaaaccagttcaccaaaaggtgagcatgagcgattaccgaatccgacgctggcggtcaccgatggcaaaacaactattaagtttcatccgtggtccattgaagagatcgttgccagcgagcagtcagcgtaattaaggagcaaaaatggcattactggaaatttgctgttacagcatggaatgtgcgctaacggcgcagcaaaacggcgcagacagagttgaattatgcgcagccccaaaagaggggggcttaacgccgtcgttgggtgtactgaaatccgtgcgccagcgggtgacgatccctgtgcatccgataattcgcccacgcggtggtgatttttgctacagcgacggtgagtttgccgccattcttgaggatgtgcgcacggtccgcgaattaggttttcctggactggtgacgggcgttctcgatgttgacgggaatgtcgatatgccacgaatggaaaaaataatggctgctgccggtccgctggcagtgacttttcatcgcgccttcgatatgtgcgctaaccctctaaatacactcaataatcttgcggaattgggcattacccgggtactgacatcagggcaaaaatcagacgcactgcaaggtttatcaaaaattatggaacttattgcccatcgtgatgctccaatcattatggccggagcaggagtccgtgcagaaaacctgcaccacttcctcgatgccggagtgctggaagtccatagctccgcgggagcgtggcaagcttcaccgatgcgttatcgtaatcaaggattgtccatgtcatcagatgcacacgcggacgagtattcgcgttatgtcgtagacggggcggcggttgctaaaatgaaaggaatcattgaacgccatcaggccaaatgatttttaccgttgcatcatgtcgcccaatatgatgcttgctcgtaccaggcccctgcaatttcaacaggggcctttttttatccctgaacagtataaaaaatgaacgataaccgcgatctgttgagcgggtgacagtgcgcatagcgttgtgctaaaaatattatatatattcacattaattatgtgatttaaattgctaaaactgacaaatatatattctaaataacaacagggttattccttagcaattaatgattacattgtaataaatcatattcattatcgattatttcaggcagtgttgtgccgaattaagcaaacggtcaattcgttgtatatatacttatacaatgatttcggtgttctggaatttatttagaggaatctatgcgagggaaaaaacgcattgggttattttttctgctgatagcggttgtggttggtggcggcgggttattgctggcgcaaaaagccttacataaaacgtcggatacagcattttgcctttcctgccactcgatgagtaaaccttttgaggaatatcagggaactgtccacttttcgaaccagaaagggatacgtgcggaatgtgccgattgccatattccaaagtcagggatggattatttatttgctaaattaaaagcatctaaagatatttatcatgaatttgttagcggcaaaatagacagtgacgataagttcgaaactcatcgccaggaaatggccgaaacagtatggaaagaattaaaagcaactgactctgcaacgtgccgtagttgccattcttttgatgccatggatattgcctcgcaaagtgaatctgcgcagaaaatgcataacaaagcacaaaagggcggcgaaacctgtatcgattgtcataaaggcattgcccattttccgccagaaataaaaatggatgacaacgcggcgcatgagctggaaagtcaggccgctacttcagtgactaatggcgcacatatttatcctttcaaaacttctcgcataggcgagctggctaccgtgaatcctggtaccgatctcaccgtcgttgatgccagtggcaaacagccgatcgttctgttgcagggttatcaaatgcagggcagtgaaaacacgctctacctggcggcaggtcaacggctggcgctagccacattaagtgaagaaggtatcaaggcgctcacggtaaacggggaatggcaggctgacgaatacggcaatcaatggcgtcaggcgtctttacagggtgcgcttaccgatcccggattagcggaccgtaaaccgctatggcaatacgctgaaaaacttgacgatacctattgcgctggttgtcatgcccctattgccgccgaccattacaccgtcaatgcgtggccgtccattgccaaaggaatgggggtacgaaccagcatgagcgaaaacgaactggacattttaacgcggtatttccagtacaacgccaaagatattaccgagaaacagtgatcctcgttgatcagggaggaagttatgacattaacaagacgtgaatttattaaacacagcggtattgccgctggagcgctggtggtgacatcggcagcaccgctacccgcatgggcagaagagaagggcggtaaaatcctcaccgcgggacgttggggagcgatgaacgtagaagtgaaggacggcaagattgtttcttcgacaggcgcgctggcgaaaaccataccgaactccttacagtctacggcggcggatcaggtacacaccacggcgcgtattcagcatccgatggtgagaaaaagctatctcgacaatccactgcaaccggcgaaaggtcgtggcaaagatacctatgtacaggtgagctgggaacaggcattaaaactgattcatgagcaacatgagcgtattcgtaaagcaaacggaccatcggccatttttgccggatcttacggctggcgctcttctggcgtgttgcataaagcgcaaaccttactgcaacgttatatgaacctggcgggcggttattccgggcatagcggcgattattcaaccggggcggcacaggtgatcatgccgcatgtggtcggttctgtagaggtgtatgaacagcagacctcctggccgctgattctggaaaacagccaggttgtggtgctgtgggggatgaacccgctgaataccttaaaaattgcctggagcagtaccgatgagcaagggctggaatacttccatcagctgaaaaaatctggcaaaccagtgattgccattgatcctatccgctccgaaaccatcgaattctttggcgataatgccacctggatcgcgccgaatatgggcaccgacgtggcactgatgttagggattgcgcataccctgatgacacaaggcaaacacgataaagtgttccttgaaaaatacaccaccgggtatccgcagtttgaagagtatctgacaggtaagagcgataatacgccgaagagcgcggcctgggcggcggaaattactggcgtaccggaagcgcagatagtcaaactcgctgaactgatggcggcgaatcgcacaatgctgatggcaggctggggaattcagcgccagcaatatggtgaacagaaacactggatgctggtgacgctggcggcgatgttagggcagattggtacaccgggcggcggttttggtttctcttatcattactccaatggtggcaacccgacacgtgttggcggcgtgctgccggaaatgtctgcggcgattgccggacaggccagcgaggccgctgatgatggcggaatgagggcgattcctgttgcccgtatcgtcgatgcgctggaaaatcctggcggcaaatatcagcataacggtaaagagcaaacgtatccgaatatcaaaatgatctggtgggcgggtggcggtaactttacccatcaccaggatactaatcgtctgattaaagcatggcagaaaccggagatgatcgtcgtttctgaatgctactggaccgcagcggctaaacatgcagatatcgtattaccgatcaccacatcgtttgagcgcaatgacttgacgatgaccggtgattacagcaaccagcatattgtgccgatgaagcaggctgttgctccgcaatttgaagcgcgaaacgattttgatgtgtttgccgatcttgcggaattactgaaacctggcggaaaagagatctataccgaaggtaaagatgaaatggcgtggctgaaatttttctatgatgccgctcagaaaggggcccgtgcgcaacgcgtcactatgccaatgtttaatgccttctggcagcaaaataaactgatcgaaatgcgccgcagcgagaagaacgaacagtacgttcgttatggtgatttccgcgccgatccggtgaaaaatgcgctgggtacgccaagtggcaaaattgagatttactccaaaacgctggaaaaatttggctataaggattgcccggcacacccaacctggcttgcgcctgatgagtggaagggtaccgccgacgagaagcagttgcagcttctgaccgcacatccggcacaccgtttacacagtcagcttaactatgcgggactgcgtaaaaaatatgcggttgccgatcgtgaaccgatcactattcacaccgaagatgctgctcgatttggtattgcgaatggcgatctggtgcgtgtctggaacaaacgtggtcagattttgacaggcgcggtggtgactgacgggatcaaaaaaggcgtggtatgcgtgcatgaaggtgcatggccagatctggaaaacggcttgtgtaaaaacggcagtgcgaacgtgttaacggcggatatccccagctcgcagctggcaaatgcctgtgccggtaactctgcgctggtgtatatcgaaaaatatacgggtaacgcaccgaagttaacggcatttgataagcctgctgttcaggcgtaagaagtgaatagcgcccggaaacgggcgctgaggttatgcaaacgtaaaactgcctgatgcgctatgcttatcaggcctacatagtccctgcaatagattgaattagcaagggtttgtaggccggataaggcattcacgccgcatccggcagtaataccagacctttacggcttgcgcgcaatcagcaccgcgcgtttaggcgcaggataaccttcaactgtcttactcggatcatgtgggtcgaggaaatcggacagagattcggtaaccatccattcagtgcgtcgctgctcttcagtagtggtaacgcacacatccacaatgcggatatctacaaaaccacacttcttcagccagtttttcagcgccagcgcggaagggatgaaatagacattacgcatttgcgcgtaacgatcgcctggtaccagcaccgtgttctcatcgccatcaataaccagcgtttccagcaccagttcaccctcattcaccagttgatctttcaactgccagagatgctccagcggcgaacggcgatggtaaagcacgcccatcgaaaagacggtatcaaaggctttcagtgccggaagctgttcaatacctaacggtaacaaatgtgcgcgctgatcgttacccagtagtttacgcaccgcttcaaactggcacagaaacagttgcgtagggtcgatccccaccgcgaggtgcgcgcctgcgccaatcatgcgccacatgtgataaccgctgccgcagccgacatccagaatggtgcgtccggttaaatcagaaagatggggcagaacacgatcccatttccagtcggaacgccattcggtatcgatgttgacgccatacagtgagaacggccctttgcgccatggcatcaggttccgcataagcgtttcaatgcgtttaatttgcccggtgctcagtggctcttcgctttcggcggttacgctatgcaataaatccagacgatacggtttaatttcaggcagaaattccaccgcgttggaccactgcttaaacagcccgtgctgctgctcgcgctgccagttagcaatctgcgcgggcagcgtttcgagccagtgtgaaagatgatttttggcaatcagagaataaaagttaccaaagtcgatcatgcagcgtcctctgcttttaatgccaccagtgaaccaaagttaaagcactggaaccacagctcgctatgctcaaaaccggctttatgcaggcgtgctttatgggtttccacggaatcggtcagcatcacgttttccagcatgctgcgcttctggctgatctccagttcgctgtaaccgttggcacgtttaaagtcgtggtgcatgttgaacaacagttcaccaactttggcatcttcgaaactgaatttttccgaaagcaccagcgcgccgcccgggttcagtccttgataaattttatccagtaatgcctggcgctcggaaggttccaggaattgcagggtaaaattcagcaccaccatcgatgcgttttcaatggcgatatcgcgaatatcaccttcaatgacgtctactggcgtaggggctttataggcgtcaatatgacgacggcagcgttcaatcatcgccggggagttgtcgatggcaataattttgcaattatcatgatgaatgttgcgacgcaccgagagcgtcgccgcgcccagagaacaacccagatcgtaaacctgcgtaccaggttgaacgaagcgctcggctaacataccaatcatggaaataatattggaatagccgggaacggaacgctggatcatatccgggaagacttcagctacccgttcatcaaaggtccagtcgcccagtctggcgataggggcagaaaatagcgtgtcgcggtgagacataacgtaaaaatccgggaaaaagaaagtggcgtattgtgcgctaacgcagggagaaaaccaactcccagggcatataccaaagattcgccagcaccatcagcaacagcgcacaccaggtggcgctcatgccggaacgtcgccagcggaacagacggtgatgaaaaccgtaataatgcatcagacgaccagcaagcaaaacgatgccgcaaatatgcaccatccaggtttctgcgccattcatttccataaacagcatcagcacaatcgcgatgggaatatattccaccgcgttaccatgaatgcgaatagcgctttgcagttcgctaaaaccaccgtcaccataggcaacgcggtactgcaaacgcaagcgaacgacatcaaaagagaacttcattaataacaacgcacttaaaacggcatacagcgcgcttaccatacaaactccctttaaaatggccgatggcacctgtctatgataggtggcaaattcagaaaagagaagattgctgtggaatagccggaactgctccgatctctggaagcgttttacgtaagtcttcccacagggtatgtaccagttccggggcctgggcaatgtctggcgtatgtaaaaaaagataaggcgtagtggtctgatgccactgcgctaatttttgtaaccagacctgaaataattcccggttttgcgtcatatcatcactaccgataaaacggatcagcggatttgtcgccgtcagtacagcatgtaccggaactttaggtttttttcgttgagcgtcgcgaatagcttcactgtgtggacgtgctgcatgaaccgggcggctgtctaaaatcacccgattaacgccgcgctgatgtaaaccgcgattaagcgtttgttcctcttcccctttggcgaaaaactgtggatggcggacttccacaccataattaaattcgccagggagagaatcgagaaaatgccaaagcgcaggcagctcccgtgggccgaatgtggcaggcagttgcagccagtattgcccaatgcgcggagccaacggtgacatgcgggtcaaaaattcagtcactaaatcatcgcaatgtcgtaatgctgcctgatgcgaaatggtcgccggaaacttaaaacagaagcggaagtcatctgtggtctgttcacgccagcgcaggacaacctcgggtttcggcagggcgtaaagcgtggtgttgccctccacgcagttaaagtggcgggcatactcttcaaggctggtgattcccaaccgcacccatttaggatgcgaccattgcggtagaccgatgtaaatcataacgcgtgaaggatctcttccacgctacgcacacgggcgatgcgtgggtagatatggttgatgctgttattgtgctgctcggcgctggcggcactacaggcgtcttcggcaatcaccagattaaagccaagttcccaggcattgcgggcggtggattcaacaccgatattggtcgagatcccacataacactattgtatcgatacctcggcggcgcagttgcaactccagatccgtaccgtaaaacgcaccccactgacgtttgatgatttcgatatcactgtcagttgcacctaatgcagctggatgttgccaccagttttcgggcaacactttagcgggggagggggcatcaaccggctgttttaatgcttcggcgtgatcggcagaccagccaacgcgcaccagaaacacgggctgaccgctggcgcgaaatttcgccgccagcttcccggcgcgattaactacctcatcggcagtatgtggaccaccggcaaaaggtaagatgccttcttgtaaatcgatcaccaccaacgcagtggttttagcattaagttcaagcatgctgactcctgaaaaaacaaaatcgtgcctcacaccttaatgcgattagccgatggcggaacgacaaattttgttaatttttatgagttcgggcaacacctttatagcaaactggcgtagagtctgatttcaggcccgatataaagtggtaacgaggcgttccagcgcgggccaggctcttacggtgcggcagaatttccagtataatagccgccttttttcattcagttgtgacatacagctaacgctgcgacttggtcacctgcgcagcagggggcatccgccggcagctaagttaagggatatctcatgcgtacagaatattgtggacagctccgtttgtcccacgtggggcagcaggtgactctgtgtggttgggtcaaccgtcgtcgtgatcttggtagcctgatcttcatcgatatgcgcgaccgcgaaggtatcgtgcaggtatttttcgatccggatcgtgcggacgcgttaaagctggcctctgaactgcgtaatgagttctgcattcaggttacgggcaccgtacgtgcgcgtgacgaaaaaaatattaaccgcgatatggcgaccggcgaaattgaagtgctggcgtcctcgctgactatcatcaaccgcgcagatgttctgccgcttgactctaaccacgtcaacaccgaagaagcgcgtctgaaataccgctacctcgacctgcgtcgcccggaaatggcgcagcgcctgaaaacccgcgctaaaatcaccagcctggtgcgccgttttatggatgaccacggcttcctcgacatcgaaactccgatgctgaccaaagccacgccggaaggcgcgcgtgactacctggtgccttctcgtgtgcacaaaggtaaattctacgcactgccgcaatccccacagttgttcaaacagctgctgatgatgtccggttttgaccgttactatcagatcgttaaatgcttccgtgacgaagacctgcgcgctgatcgtcagcctgaatttactcagatcgatgtggaaacttctttcatgaccgcgccgcaagtgcgtgaagtgatggaagcgctggtgcgtcatttgtggctggaagtgaagggcgtggatctgggcgatttcccggtaatgacctttgcggaagcagaacgccgttatggttctgataaaccggatctgcgtaacccgatggaactgaccgacgttgctgatctgctgaaatctgttgagtttgcagtatttgcaggtccggcgaacgatccgaaaggtcgcgttgccgctctgcgcgttccgggcggcgcatcgctgacccgtaagcagatcgacgaatacggtaacttcgttaaaatctacggcgcgaaaggtctggcttacatcaaagttaacgaacgcgcgaaaggtctggaaggtatcaacagcccggtagcgaagttccttaatgcagaaatcatcgaagccatcctggatcgtactgccgcgcaagatggcgatatgattttcttcggtgccgacaacaagaaaattgttgccgacgcgatgggcgcactgcgcctgaaagtgggtaaagaccttggtctgaccgacgaaagcaaatgggcaccgctgtgggttatcgacttcccgatgtttgaagacgacggtgaaggcggcctgacggcaatgcaccatccgttcacctcaccgaaagacatgactgctgcagaactgaaagctgcaccggaaaatgcggtggcgaacgcttacgatatggtcatcaatggttacgaagtgggcggtggttcagtacgtatccataatggtgatatgcagcagacggtgtttggtattctgggtatcaacgaagaggaacagcgcgagaaattcggcttcctgctcgacgctctgaaatacggtactccgccgcacgcaggtctggcattcggtcttgaccgtctgaccatgctgctgaccggcaccgacaatatccgtgacgttattgccttcccgaaaaccacggcggcagcgtgtctgatgactgaagcaccgagctttgctaacccgactgcactggctgagctgagcattcaggttgtgaagaaggctgagaataactgatatggcttataagcgtcccgtttcgatcttagtggtcatctacgcacaagatacgaaacgggtgctgatgttgcagcggcgtgacgatcccgatttctggcagtcggtaaccggcagcgtggaagagggggaaaccgcgccgcaagctgccgtgcgcgaagtaaaggaagaggtcaccattgatgttgtcgctgaacaactgaccttaattgactgtcagcgcacggtagagtttgaaattttttcacatttacgtcatcgctatgcgccgggcgtgacgcgtaatacggaatcatggttctgtcttgcgctcccacacgagcggcagatcgttttcactgaacatctggcttacaagtggcttgatgcgcctgctgcggcggcgctcactaagtcctggagcaaccggcaggcgattgaacagtttgtaattaacgctgcctgaacaggcagggctatctggagatatttttatggcaggtcatagtaaatgggccaacaccagacatcgtaaagctgcgcaggatgcaaagcgcggtaaaatcttcactaaaatcattcgtgagctggtaaccgcggctaagctgggcggtggcgatccggacgctaacccgcgtctgcgtgcagcaattgataaagcactgtctaacaacatgacccgcgacacactgaaccgcgcaattgcacgtggtgtgggcggtgatgatgatgcaaacatggaaaccatcatctacgaaggttacggtcctggcggcacggcaatcatgattgaatgtctgtctgacaaccgcaaccgtaccgttgctgaagtgcgtcatgcattcagcaaatgtggcggtaacctcggtacagatggttccgtagcctatctgttcagcaaaaaaggcgtgatctccttcgagaaaggcgatgaagacaccatcatggaagcagctctggaagcaggtgctgaagacgttgtgacctatgatgacggcgcgattgatgtctacactgcatgggaagaaatgggtaaagtgcgcgacgctctggaagcggcaggtctgaaagcagacagcgcggaagtttccatgatcccgtccaccaaagctgatatggatgcagaaaccgcaccgaaactgatgcgtctgatcgatatgctggaagattgcgacgacgtgcaggaagtttaccataacggtgaaatctctgatgaggtcgcagcgactctctgatgaggcctgctaaacagcaaaacggagacgcgtgatggctattattctcggcattgatccgggttcgcgcgtgaccggctatggcgtaattcgccaggtaggcaggcaactgtcctacctgggtagcggatgcatacgcaccaaagtggatgatttaccgtctcgtctgaagctcatctatgcgggcgtgacggaaatcatcacccagttccagcctgattatttcgccattgaacaagtctttatggcgaagaacgctgactcagccctgaaactgggccaggcgcgcggcgtggcgattgttgcggcggtgaatcaggaattgccggtatttgaatacgcggcacgtcaggtaaagcaaacggtggtaggtattggtagtgccgaaaaaagccaggtgcagcatatggtccgcaccttgctgaaactgcccgctaatccacaggcggatgccgccgatgcgttagctatcgcgattacccattgtcacgtcagtcagaatgcgatgcagatgagcgaatcgcggctgaacctggcgagagggcgactgcgttaagttataccgcctcggtcagttcaggctgaggcgtttcaactccctccgcgtgaatcaacaccaaacccggatgatgccacaaactggctggcgtgacggttttacgctcccacggaatagaacctaagaaccagaatttccagaaagtgagttttgcattcggattgctatttaacagttgtccaaacgtctctatttcacccaccggaatacatagcgcctctttataaatatcaaagacaaattttgaacagaactggcgggaagattcgtatttaaaacccgtgtggtaaagtttgcgtagccgggaaggaacctgttcaacaattcgttgtttttgttgttctgtcagcccagcgtctaatcgctttatagcatagcgttgattagacgaacgtttaataaaacgagatagcgtggtgatggttgaaaggggaacccggctttctgcaaccaggaagtcttcaccgttatgaccgataatgatcccgacgtgattactccagcaatttgatgcagctgatatttgaccaaataaggcagcacctatacatgtaaagacgatatctccaatttcatattcagcagggtaattaatattcacgttgtcattccattgaaatcgatacgaatatacgtaatagcataaaaaatttattttttcaggagtcgcaatgtatatttttattacgcatttcttcactgaatatgtaatattcaaatatttgcttccaatataacctgttgaataaattatactctgccatttttcagatcatcgggacacctcgcaagttttcttcatccttcgctggatatctatccagcatttttttatcatacagcattatctttgattcattacgcaggagcgtcatgtgataggcagactcagaggcatcatcattgaaaaacaacccccgctggtgttaattgaagtgggcggcgtaggctatgaagtgcatatgccgatgacctgtttttatgaactccctgaagcgggtcaggaagcgatcgttttcacccactttgtggtgcgtgaagacgcgcaactgctgtacggttttaacaataaacaagagcgcacattgttcaaagagttgatcaaaaccaacggcgtcggcccgaagttggcgctggcgatcctctccggaatgtcagcgcagcagttcgttaatgccgttgagcgtgaagaagtgggggcgctggtgaaactgccgggtattggcaaaaaaaccgccgaacgcttgattgttgaaatgaaagaccgatttaaaggtttgcatggcgatctctttacgccagccgccgacctggtactcacatcacctgccagcccggcgaccgacgatgctgaacaagaagcagttgccgcgctggtggcgctgggctataaaccacaagaggcaagccgcatggtgagcaaaatcgctcgccctgacgccagcagtgaaacattaattcgcgaagccctacgcgccgcgttatgaggtaaaggatgattgaagcagaccgtctgatttctgccggtaccactttgccggaagatgtggcagatcgcgccattcgccctaaattactggaagagtatgttggtcagccgcaggttcgttcacagatggagattttcatcaaagcagcgaaactgcgcggcgatgccctcgatcatctgttgattttcggtcctccggggttgggtaaaactacgcttgccaacatcgtcgccaatgaaatgggcgttaatttacgcacgacttctggtccggtgctggaaaaggcgggcgatctggcagcgatgctcactaaccttgaaccgcatgacgtgttgtttattgatgagatccaccgtctttcgccagtggtggaagaggtgttgtatccggcaatggaagactaccaactggatatcatgattggtgaaggtccggcggcacgctccattaaaattgatttgccgccgtttaccctgattggtgcaaccacgcgcgcaggttcgctgacatcaccgttgcgcgatcgttttggtattgtgcagcgtctggagttttatcaggtgccggatctgcaatatatcgtcagtcgcagcgcacgctttatggggcttgagatgagtgatgacggcgcgctggaagttgctcgtcgagctcgcggtacgccgcgcattgccaaccgtctgctgcgtcgagtgcgtgatttcgccgaagtgaagcacgatggcaccatctcggcagatatcgctgctcaggcgttggatatgttgaatgtcgatgctgaaggtttcgattatatggaccgcaagttattgctggcggtaatcgataagttctttggtgggccggtaggtctggataaccttgcggcagccattggcgaagaacgtgaaaccattgaggatgtgctggaaccttatttgattcagcaaggctttttgcagcgtacaccgcgtgggcgtatggcgacgacgcgggcgtggaatcactttggcataacgccgccagaaatgccgtaagtcggattggtcgctcgcaccgcatccgacattggcagtgtgcctgatgcgacgctattcgcgtcttaccaggcctaccagagatagcgaaccgtaggtcggataaggcgctcgcgccgcatccgacaaatgtgttcagcgatagattagctggcctgctttttcatcatactgagaataaataacagtgccgcacatagcaccaccgacggacccgccggcgtatcgtaaaacgcggaaaaggttaaaccgccagttactgccaccatccccaccaaaacagcgacaccagccatctgttccggcgtacgggcaaagcgacgcgcagtagctgcaggaataatcagcaacgaagtaataatcaacgcaccgacaaatttcatcgctacaccaatcgtcaatgccgtcaccagcatcaacaacaatttcacgcgctgtaatttcacaccatcaacaaacgccagatccgggctaatcgtcatcgacagcaaattgcgccattgccagaacaaaatagccaccacgatgaccacgccaatcgcaatagagatgagatcttctggcgtcactgccagcaaatcaccgaacaggtaagccatcaaatcaacacgaatattagacatcagactaacgaccaccaggcccagcgacagggcactgtgcgccataatccctaataacgtgtcgatcgccagctgtggacgcttctccagccataccagaccgcccgccagcagcagcgtaacggcaatcaccgcatagaatggattcacgtccagcaacaaaccaaacgcgacaccaagtaatgaggcatgagccagcgtatcaccgaaataagacatacgacgccagactacaaacgaacccagcggacccgcggcacaggcgagcatgatcccggctaaccaaccgggaaataataattcaatcatgagcgatcatttccccgacgcaaaacaattcgtccctgtaaatcgtgacgatgattatgatgatggcgatagatacccagttgttcagcaccacgaggaccaaacattgaaataaactccggatgcagggaaacaacttccggtgtgccggaacaacaaatgtggtgattcagacacagcacttcatcggtttttgccattaccagatgcagatcgtgagagaccattaaaacgccacaatccagttcgcgacgcaactggtcaataaggtcatataacgccacctggccatttacatccacgccttgagtgggttcatccagcactaataattgcgggcgatttaacaatgctcgcgctaacagtacacgctgcgtttcgccaccagagagcttttgcatcggtgcgttaatcaggtgcccggcctggacacgtttcagtgcaggcaaaatatcttctttatgtgtaccagggcgtaagcgtaaaaaacggtttacggtcagtggcaacgtggtgtcgagatacagcttctgcggtacatagccgatgcgcagttttccattacgcttgataaccccttcatcgggtgttactagcccgagcactacccgtaccagtgtcgacttacctgcgccatttggcccaagtaaagtcaaaatttttccaggtttaagttccagcgacacatcagagaggacgcggcgttggccaaaagaaaccgagacattttccagggaaaccagacttgtcatgttaattttagtcttgcagtagtcatgaaatgttataatatcacacttctcatattcattacgatgattggtcgcattatgttacataaaaaaacgcttcttttcgcagcattatccgccgctctctggggaggtgcaacacaggccgcagatgccgccgttgtcgcttcgcttaaacccgttgggttcatcgcttctgccattgctgatggtgtaacagaaacggaggttttactgcctgacggcgcttcagaacatgattattcactgcgtccatcggatgtaaaacgcttacagaacgcggacttagtcgtttgggttggcccggagatggaagcgtttatgcaaaaaccggtaagtaaattaccagaagcgaaacaggtaacgattgcacagctagaagatgtgaaaccgctgctgatgaaaagtattcacggcgatgatgatgatcacgaccacgcggaaaaaagtgacgaagatcaccatcacggcgatttcaacatgcatctttggctttccccagagatagcgcgggctacagcggttgcaatccatggaaaattagtggaacttatgccgcaaagtcgagccaaacttgacgccaacctgaaggattttgaggcacaattagcctcaaccgaaacgcaggttggtaacgagctcgcgccgctcaaggggaaaggttatttcgtttttcacgatgcttacggctatttcgaaaaacagtttggactgacaccgcttggtcattttaccgttaaccctgagattcaacctggcgcgcagcgtttacatgaaataagaacacagttggttgagcaaaaagcaacctgcgtttttgctgagccacagttcaggccagcggtcgttgagagcgtcgcacgagggacatccgttcgtatgggaacgttggatcccctggggacgaatatcaaactgggtaaaacaagctattcagaattcctgagtcaattagccaaccagtatgcgagctgcctgaaaggagattaatgaggaagtgattacgtgcaacagatagcccgctctgtcgccctggcgtttaataatttaccgcgaccacaccgcgttatgttggggtcgctcaccgttcttactctggccgtcgctgtctggcggccttatgtttatcaccgtgatgccacgccaattgtcaaaaccattgagctggaacagaacgaaattcgttcgctcttacctgaagccagtgagccgattgatcaagctgcacaagaagatgaagccattccccaggacgaactggatgacaaaatcgccggtgaagcgggcgtgcatgaatatgttgtttccactggcgatacgctaagcagcattctcaatcagtatggtattgatatgggtgatatcacccaactggctgctgccgacaaagaattgcgtaatctgaaaatcggtcaacaactctcctggacattaaccgcggacggcgaactgcagcgcctcacctgggaagtgtctcgtcgtgaaacccgaacctatgaccgtactgctgctaacggttttaaaatgaccagcgaaatgcagcaaggagagtgggttaacaatctgctgaaaggtaccgtcggggggagctttgttgccagcgccagaaacgccggtttaaccagcgccgaagtgagcgcagtgattaaagccatgcagtggcaaatggatttccgcaaactgaaaaaaggcgatgaatttgcggtgttaatgtctcgagaaatgcttgatggtaaacgtgagcaaagccagctgctgggcgtacgtttgcgttcagaaggtaaagattattacgctatccgcgctgaggatggcaaattctacgatcgtaacggtactggtctggcgaaaggattcttgcgattcccgacggcgaaacagttccgtatctcgtctaactttaacccgcgtcgtactaatccggtgacaggtcgcgttgcaccacacagaggtgttgatttcgccatgccacaaggtacgccagtgctttcagtgggtgacggtgaagtggtggttgccaaacgcagtggcgcagcaggttattatgtggctattcgtcatggtcgcagctacaccacgcgttatatgcacttgcgcaagattctggtgaaaccgggacagaaggtgaaacgtggcgaccgtatcgcgctttccggtaataccggacgttcaaccgggccgcatctgcactatgaagtatggataaaccagcaggccgtaaacccgctgacggcaaaactgccgcgtaccgaagggctgaccggctccgatcgtcgcgaattcctggcgcaggccaaagagattgtgccgcagctacggtttgattaattaacatccattcgcagccggtacgcagtcagtaccggctttttttatttggtgcggggcaagttgcgccgctacactatcaccagattgatttttgccttatccgaaactggaaaagcatggaaacgaaaaaaaataatagcgaatacattcctgagtttgataaatcctttcgccacccgcgctactggggagcatggctgggcgtagcagcgatggcgggtatcgctttaacgccgccaaagttccgtgatcccattctggcacggctgggacgttttgccggacgactgggaaaaagctcacgccgtcgtgcgttaatcaatctgtcgctctgctttccagaacgtagtgaagctgaacgcgaagcgattgttgatgagatgtttgccaccgcgccgcaagcgatggcaatgatggctgagttggcaatacgcggaccggagaaaattcagccgcgcgttgactggcaagggctggagatcatcgaagagatgaggcgtaataacgagaaagttatctttctggtgccgcacggttgggccgtcgatattcctgccatgctgatggcctcgcaagggcagaaaatggcagcgatgttccataatcagggcaacccggtttttgattatgtctggaacacggtgcgtcgtcgctttggcggtcgtctgcatgcgagaaatgacggtattaaaccattcatccagtcggtacgtcaggggtactggggatattatttacccgatcaggatcatggcccagagcacagcgaatttgtggatttctttgccacctataaagcgacgttgcccgcgattggtcgtttgatgaaagtgtgccgtgcgcgcgttgtaccgctgtttccgatttatgatggcaagacgcatcgtctgacgattcaggtgcgcccaccgatggatgatctgttagaggcggatgatcatacgattgcgcggcggatgaatgaagaagtcgagatttttgttggtccgcgaccagaacaatacacctggatactaaaattgctgaaaactcgcaaaccgggcgaaatccagccgtataagcgcaaagatctttatcccatcaaataaaaaagcctctcgcgaggagaggccttcgcctgatgataagttcaagtttgcttcagaatattcgaaatctgttgaactatcattgaactgtaggccggatgtggcgttttcgccgcatccggcaacgtacttactctaccgttaaaatacgcgtggtattagtagaacccacggtactcatcacgtcgccctgggtgacaatcaccaggtcaccagacatcaagtaacctttatcgcgcagcagattaaccgcttcgctggcagctgctacgccgtcattagcgctatcaaagtgcaccggcgtaacgccacgatagagagcagtcaggttcagcgtacgttcatggcgcgacatggcgaaaattggtagaccagagctgatacgggaggtcatcagcgcggtacgacccgattcggtcatggtaataatcgccgtaacgcctttcaggtggttagctgcgtacattgctgacatggcaatagcttcttccacattgtcgaactgaacgtccagacggtgtttagaaacgttgatgctcgggattttttccgcacccaggcaaacgcgcgccatggctgcaacagtttctgacggatactgccctgcggcagtttctgcagacagcatcacagcgtcagtaccatccagaacggcgtttgctacgtccatgacttctgcacgcgtcggcatcgggttagtaatcattgactccatcatctgggtcgccgtgattaccgctcggtttagctgacgcgcacgacggatcaacgctttctgaatgccgaccagttccgggtcgccaatttccacaccgaggtcgccgcgtgcaaccattaccacgtcagaggcgagaataatgtcatccattgcatcctggctgcaaacggcttccgcacgttcaaccttggcaacaattttcgcatcacatcctgcatcgcgtgccaggcgacgggcatagttcagatcttcgccgcagcgtgggaaggagacagccaggtaatctacgccaatcaacgccgcagtcttaatgtctgctttgtctttttcggtcagcgcttcagccgacaaaccgccgccaagtttgttgatacctttattgttggagaggggaccaccgacggtcacttcggtgaacactttcatgccctgaacttccagtacttttaactgaacgcgaccatcgtccagcagcaggatgtcgccaggcacaacgtcagcaggcaggcctttgtagtcgataccgactttttctttgtcgccttcacctttacccaggttggcgtcgagcaggaatttatccccaatattgaggaaaactttgccttctttaaaggtggatacacggattttgggcccctggaggtcacccagaatagccacatgacgccccagtcttgcggcaatctcacgaactttatccgcgcgcattttgtgatcttcaggcgagccgtgagaaaagttcatacgtacaacgttggcacccgccgcgataactttttcaagattattatcgcgatctgttgctgggcctaacgtggtaacgatttttgttctgcgaagccttctggacatgtaatactccgttgactgaaacaaccaggtgttgcttgaacatgaaatccgaatgaaataacgccgcgatggcgataaattaatctcattcggatgtcgtataagattaggacagtgacagtcgtttttagcgatcgtcacttaaattaagtaactgcttatcaaaacgcgattccttcagcgcttccttgacccgcttcaagttatctctgaattttgcaccgcgtcgcaaagtaaatcctgtcgccagcacatctatcacggtcagctgtgcaagtcgagaaaccatgggcatataaatgtcagtatcttccggtacgtcgagggtaattgccagcgttgcttcccgggcgagcggggtacccgcagaggtgagggcaatcaccattgcgtcgttttcgcgagccagctgcgccagctcgaccagattttttgttcttccagtgtgagaaatcagcaccaccacgtctccgtcgctacaattcatacaactcatgcgttgcagcacgatatcatcggagtacaccaccggaacattaaaacgaaagaacttattcatcgcatcgtgggcaacggcggctgaagagcctaatccgaaaaaggcgattttttttgcctgagtgagcaagtcgacggcgcggttgatggcagatttatccagtgaatgacggacatgatcaagcgttgccattgcggactcaaatattttccctgtgtatgattcaacgctgtcatcttcattgacattgcgattaacatagggagtgccattcgccagactctgtgccagatgaagtttaaaatcaggaaaaccgcgcgtgtccatgctgcgacagaaacgattcaccgtcggttcgctaacattggcttccagtgccatagcagcaatactcgaatggatcgcgttatcgggcgaagccagaatgacctcggcaactttgcgctctgatttgctcaaatgttccagctgagactggattttttccagcatattcatgatgtaaagagactcacgggtaatgacgatttccgcactgaaagaaatcgaaatgcagttttgtcagatattacgcctgtgtgccgtgttaatgacaaaagcagataaaaaagttgttattttttttcataacatgatcagtgtcagatttttaccgaatggaaaacgatgatttttttatcagttttgccgcactttgcgcgcttttcccgtaatcgcacgggtggataagcgtttacagttttcgcaagctcgtaaaagcagtacagtgcaccgtaagaaaattacaagtataccctggcttaagtaccgggttagttaacttaaggagaatgacatggcggtaacgcaaacagcccaggcctgtgacctggtcattttcggcgcgaaaggcgaccttgcgcgtcgtaaattgctgccttccctgtatcaactggaaaaagccggtcagctcaacccggacacccggattatcggcgtagggcgtgctgactgggataaagcggcatataccaaagttgtccgcgaggcgctcgaaactttcatgaaagaaaccattgatgaaggtttatgggacaccctgagtgcacgtctggatttttgtaatctcgatgtcaatgacactgctgcattcaaccgtctcggcgcgatgctggatcaaaaaaatcgtatcaccattaactactttgccatgccgcccagcacttttggcgcaatttgcaaagggcttggcgaggcaaaactgaatgctaaaccggcacgcgtagtcatggagaaaccgctggggacgtcgctggcgacctcgcaggaaatcaatgatcaggttggcgaatacttcgaggagtgccaggtttaccgtatcgaccactatcttggtaaagaaacggtgctgaacctgttggcgctgcgttttgctaactccctgtttgtgaataactgggacaatcgcaccattgatcatgttgagattaccgtggcagaagaagtggggatcgaagggcgctggggctattttgataaagccggtcagatgcgtgacatgattcagaaccacctgctacaaattctctgcatgattgcgatgtctccgccatctgacctgagcgcagacagcatccgcgatgaaaaagtgaaagtactgaagtccctgcgccgcatcgaccgctccaacgtacgcgaaaaaaccgtacgcgggcaatatactgcgggcttcgcccagggcaaaaaagtgccgggatatctggaagaagagggcgcgaacaagagcagcaatacagaaaccttcgtggcgatccgcgtcgacattgataactggcgctgggccggtgtgccattctacctgcgtactggtaaacgtctgccgaccaaatgttctgaagtcgtggtctatttcaaaacacctgaactgaatctgtttaaagagtcgtggcaggatctgccgcagaataaactgactatccgtctgcaacctgatgaaggcgtggatatccaggtactgaataaagttcctggccttgaccacaaacataacctgcaaatcaccaagctggatctgagctattcagaaacctttaatcagacgcatctggcggatgcctatgaacgtctgctgctggaaaccatgcgtggtattcaggcactgtttgtacgtcgtgatgaagtggaagaagcctggaaatgggtagactccattactgaggcgtgggcgatggacaatgatgcgccgaaaccgtatcaggccggaacctggggacccgttgcctcggtggcgatgattacccgtgatggtcgttcctggaatgagtttgagtaatatctgcgcttatcctttatggttattttaccggtaacatgatcttgcacagattgtagaacaatttttacactttcaggcctcgtgcggattcacccacgaggctttttttattacactgactgaaacgtttttgccctatgagctccggttacaggcgtttcagtcataaatcctctgaatgaaacgcgttgtgaatcatcctgctctgacaactcaatttcaggagcctttatgaatccacaattgttacgcgtaacaaatcgaatcattgaacgttcgcgcgagactcgctctgcttatctcgcccggatagaacaagcgaaaacttcgaccgttcatcgttcgcagttggcatgcggtaacctggcacacggtttcgctgcctgccagccagaagacaaagcctctttgaaaagcatgttgcgtaacaatatcgccatcatcacctcctataacgacatgctctccgcgcaccagccttatgaacactatccagaaatcattcgtaaagccctgcatgaagcgaatgcggttggtcaggttgcgggcggtgttccggcgatgtgtgatggtgtcacccaggggcaggatggaatggaattgtcgctgctaagccgcgaagtgatagcgatgtctgcggcggtcgggctgtcccataacatgtttgatggtgctctgttcctcggtgtgtgcgacaagattgtcccgggtctgacgatggcagccctgtcgtttggtcatttgcctgcggtgtttgtgccgtctggaccgatggcaagcggtttgccaaataaagaaaaagtgcgtattcgccagctttatgccgaaggtaaagtggaccgcatggcactactggagtcagaagccgcgtcttatcacgcgccgggaacatgtactttctacggtactgccaacaccaaccagatggtggtggagtttatggggatgcagttgccaggctcttcttttgttcatccggattctccgctgcgcgatgctttgaccgctgccgctgcgcgtcaggttacacgcatgaccggtaatggcaatgaatggatgccgatcggtaagatgatcgatgagaaagtggtggtgaacggtattgttgctctgctggcgaccggtggttccactaaccacaccatgcacctggtggcgatggcgcgcgcggccggtattcagattaactgggatgacttctctgacctttctgatgttgtaccgctgatggcacgtctctacccgaacggtccggccgatattaaccacttccaggcggcaggtggcgtaccggttctggtgcgtgaactgctcaaagcaggcctgctgcatgaagatgtcaatacggtggcaggctttggtctgtctcgttatacccttgaaccatggctgaataatggtgaactggactggcgggaaggggcggaaaaatcactcgacagcaatgtgatcgcttccttcgaacaacctttctctcatcatggtgggacaaaagtgttaagcggtaacctgggccgtgcggttatgaaaacctctgccgtgccggttgagaaccaggtgattgaagcgccagcggttgtttttgaaagccagcatgacgttatgccggcctttgaagcgggtttgctggaccgcgattgtgtcgttgttgtccgtcatcaggggccaaaagcgaacggaatgccagaattacataaactcatgccgccacttggtgtattattggaccggtgtttcaaaattgcgttagttaccgatggacgactctccggcgcttcaggtaaagtgccgtcagctatccacgtaacaccagaagcctacgatggcgggctgctggcaaaagtgcgcgacggggacatcattcgtgtgaatggacagacaggcgaactgacgctgctggtagacgaagcggaactggctgctcgcgaaccgcacattcctgacctgagcgcgtcacgcgtggggacaggacgtgaattattcagcgccttgcgtgaaaaactgtccggtgccgaacagggcgcaacctgtatcactttttaagacgacaaatttgtaatcaggcgagagaaaactctgatgaaaaactggaaaacaagtgcagaatcaatcctgaccaccggcccggttgtaccggttatcgtggtaaaaaaactggaacacgcagtgccgatggcaaaagcgttggttgctggtggggtgcgcgttctggaagtgactctgcgtaccgagtgtgcagttgacgctatccgtgctatcgccaaagaagtgcctgaagcgattgtgggtgccggtacggtgctgaatccacagcagctggcagaagtcactgaagcgggtgcacagttcgcaattagcccgggtctgaccgagccgctgctgaaagctgctaccgaagggactattcctctaattccggggatcagcactgtttccgaactgatgctgggtatggactacggtttgaaagagttcaaattcttcccggctgaagctaacggcggcgtgaaagccctgcaggcgatcgcgggtccgttctcccaggtccgtttctgcccgacgggtggtatttctccggctaactaccgtgactacctggcgctgaaaagcgtgctgtgcatcggtggttcctggctggttccggcagatgcgctggaagcgggcgattacgaccgcattactaagctggcgcgtgaagctgtagaaggcgctaagctgtaaaagtcaaaacgcccgatctacgatcgggcatttttgtagcgtttttttgccgggtttaaccctgtacttttacctgtccggcggcgtgcttcgcgcgttcaatggcgtcaacaacactctcagcggtcgccagcgcaacacccagacgacggctgccatcaatttccggcttaccaaataaacgaatctgcaaatctgcgcctacggcattctgcacattatcaaacgtgacattctgactggtcagttgtggcagaataacggcagaagctgcaggaccatactgacggatcccgccaacaggaagtccgaggaaggcacgtacatgcagggcaaactctgagagattttgagaaattaacgtcaccatcccggtatcatgtggacgaggggagacctcactgaaaatcacctcatcaccacagacaaacagctcgacaccaaacagaccataaccgcccagtgccagcaccactttacgggcaatctcctgcgcacgttcaagggcaagcgggctcatttgctgtggttgccaggattcacggtagtcgccatcttcctggcgatgacctactggtgcacagaaatggacgccatccaccgcgctgacggttagcagggtaatttcgaagtcaaacttaacgacgccttcaacaattacgcggcccgctccggcgcgaccgccttgctgagcgtattcccatgcctgagcaagttgctctgcagaacgaataaacgtctgccccttgccggaagagctcatcaccggttttacaatgcagggatagccaatggcggcaaccgcctcgcggaaaaggctttcgctatcggcaaaacgataagtggaagtgggcagctgcagctcttctgccgccaggcgacggataccctcgcgattcatcgttaatttcgttgcgcgagcgcaggggacaacattcagtccttcctcttcaagttggatcagcatatcggtggcaatagcttcgatctccggcacgatataatgtggtttttccagttcaaccacacggcgtaatgcatcaccatcaagcatattaatgacatgggagcgatgcgcgacatgcatggctggtgcgtcggcatagcgatcgacggcaatcacctctacgccgagacgctgacactcgattgccacttctttacccagttcaccggagcctaataacatcacgcgagttgctgccggacgcagcgcagtgcctaataacgtcataacgaatatcccctgattaattccgcgcgcagtataaacgaaaacgtttgcgtgtgtctttattgctgatgttgatttctcaaccgaaaagaaatatactgtataaaatcacagttattatgagaggctgcaaatggcggttgaagttaaatacgtagtcattcgtgagggcgaagagaaaatgtcgtttaccagcaaaaaggaagccgatgcttatgataaaatgcttgatacggcggatctgcttgacacctggctgacaaattctccagtgcaaatggaagacgagcaacgtgaagccctttcgctatggctggcagaacaaaaagatgtgctgagcaccattctgaaaaccggcaaattaccgtccccacaggtcgtcggtgctgaatccgaagaggaagatgcctcacacgcggcctgaagcaacttgcgctcctgacaatttgtaccatgctttctcctgaatcattgtgctatggagaaaaacatgaaaaaaagaggggcgtttttagggctgttgttggtttctgcctgcgcatcagttttcgctgccaataatgaaaccagcaagtcggtcactttcccaaagtgtgaaggtctggatgctgccggaattgccgcgagcgtaaaacgtgattatcaacaaaatcgcgtggcgcgctgggcagatgatcaaaaaattgtcggtcaggccgatcccgtggcttgggtcagtttgcaggacattcagggtaaagatgataaatggtcagtaccgctaaccgtgcgtggtaaaagtgccgatattcattaccaggtcagcgtggactgcaaagcgggaatggcggaatatcagcggcgttaatggcttctgataattcgattgaccgttggcggatgcggcgcgagtgccttgtccgccccagaacgcaccacaatcgtaggcctgagaagacgcaacagcgtcgcatcgggcaatcagcatcaaacaatgccactcaaaacgacaaactactttcacctaaaatacccttatcacctgatatacagtaaataccttacctggcgcgaatttctttgaataacggcctaccgccccgcttatttgcgcatcttttgtctcgatatacattttctgacatcctcatccgctatgctacaggcactaaaaatggttattgaggagcaaatatggctaactggttaaatcaactgcaatccctgcttgggcaaagcagttcttctacctcctcgtctgcggatcagggattgggcaaactgttagtgccaggcgcattaggcggactggctgggctgctggtcgcaaataaatcagcacgtaaacttcttacgaaatatggcaccaacgcgttactggttggcggcggagcggtagcgggtacggtgctgtggaataaatacaaagataaaattcgcgcggcgcatcaggacgaaccgcagtttggcgcgcaaagtacgccgctggatgagcgtacagaacgtttgatccttgcgctggtctttgccgctaaaagtgatggtcatattgatgccaaagaacgtgcggcaatcgaccagcaattgcgtgaagccggcgtggaagagcaggggcgtgtactcattgagcaggcaatcgaacaaccgctggatccacaacgcctggctaccggggtccgcaatgaagaagaggcgctggaaatctatttcctgagttgcgcggctattgatattgaccattttatggaacgcagttacctgaatgcactgggtgacgcgctgaaaatcccccaggatgttcgtgacggcattgaacgcgatctcgaacagcaaaaacgcactttggcggaataattccgctctctggatagcctgaagttgactatttcgggctatccagaatcgcacagccatttgaacaggctgattttctctgtctgcataacattcgatatccgcgccattacctgtcatcatctaagcaatgactcccctgtttcgcttgcatccccggtgagttttgccacccttataagatgtttcaaccagaaagaacaataacatgctaccaaaagccgcccgcattccccacgccatgacgcttcatggcgatacgcgcatcgataattactactggctgcgggacgatacgcgttctcagccagaagtcctggactacctgcaacaagaaaatagttacggtcatcgggtgatggcctcacaacaagccttgcaggatcgcatcttaaaggaaatcatcgaccgcattccgcaacgagaagtttctgcgccctacatcaaaaatggctaccgctatcggcatatttatgaaccaggctgtgaatatgctatctaccagcgtcaatcggcattcagtgaagagtgggatgagtgggaaacattgctcgatgccaataagcgcgcagctcatagtgagttttattcgatgggcggaatggcgattacgcccgataacaccattatggcgctggcagaagattttctttcccgacgccagtacggcattcgttttcgtaatctggaaactggtaactggtacccggaactgctggataacgttgaacccagctttgtctgggcaaatgactcctggactttctactatgttcgcaagcatccggtgacgctgctgccttatcaggtctggcgtcacgccatcggtacgccagcatcgcaagataaactgatctacgaagaaaaagacgatacctattacgtcagcctgcataaaacgacctcgaagcactatgtagtcattcatttggccagcgccaccaccagtgaagttcgcctgctggacgcggaaatggccgatgccgagccgtttgtttttctgccgcgccgcaaagatcacgaatacagccttgatcactaccagcatcgtttttatctgcgttccaaccgccacggcaaaaactttggcttataccgtacccgtatgcgtgatgagcaacagtgggaagagttaattccgccacgcgaaaacatcatgctggaagggtttacgctgtttaccgactggctggtggttgaagagcgtcagcgcgggttaaccagtttgcgccaaattaaccgcaagacccgggaagtcattggtattgcctttgatgatccagcctatgtgacctggattgcctacaatccagaacctgaaaccgcgcgattgcgttatggttattcttccatgaccacaccagacactttgtttgaactggatatggataccggtgagcgtcgtgtattaaaacaaacagaagtgcccggttttgatgcggcgaattaccgcagtgaacacctgtggatagtcgcccgtgatggcgtcgaagttccggtttcgttggtctaccatcgcaaacattttcgcaaaggacacaacccgttgctggtgtatggctatggttcttacggcgcaagtattgatgccgatttcagttttagccgcttgagtttgttagatcgtggctttgtctacgccattgtccatgttcgcggcggtggtgagctggggcaacaatggtacgaagacggaaaatttctgaagaagaaaaatacgtttaatgattatcttgatgcctgcgatgcattgttaaaactgggctatggctctccttcgctttgttatgcgatgggcgggagtgcggggggcatgttgatgggcgttgcaattaatcaacgcccggaattattccacggcgttatcgcccaggtaccgtttgttgatgttgtaacaacgatgcttgatgaatcaattcctcttaccactggtgagtttgaagagtggggtaacccgcaggatccgcaatattacgagtacatgaaaagctacagcccgtatgacaacgtcaccgcacaggcttatccgcatttactggtaacgaccggtttgcacgattctcaggtgcaatattgggaaccggcaaaatgggtcgctaaattgcgcgagctgaaaaccgatgaccatcttttattgctctgtaccgacatggactcaggccatggcggtaaatctggtcgctttaaatcgtacgaaggcgtagcgatggaatatgcttttctggtcgcgctggcgcagggaacattacccgctacgcctgcggactaagtattttccagataatgtttcagtgttaaacgcagctccgggctcatgctgtccaggttattaaataaccagcgcagatagcccggatcgcgttcggcaacgtcggaaaccgctttgccacggtatttgccaaaggtgaaggtcgtcatcaacgacggacgtccggtgatatcggccatctgttctgccgtccagccggaggtgttcataatatcgataagcaacgcggcggtgatataacagtcatacaacgcgcggtgatgatgcaggcccggcggcgtctgtacattgagcttgcgtgttttatataacgccatattgctgtacttgatcccaggccacaaacgacgggccagtttcatagtgcaaatccactcaccgggcatctcaggcagtacgcggcggtcaaagctggcgttatgcgcgacataccattcactaccgtaatagtgtgggatcacatcttcaatccacggtttatcggcgaccatggcttcggtgatgcgatgaatcgccatcgcttgtggactaataggacgatcggggcgcaccaggtggctcatggggttgacgatttttccgtcaatgacatcaacagaggcaatctcaacgatccctccctgcaaaccgcaggtttctgtatcgataatgcgcaacatggcatgctccaggccgaaaaagcctagcgtaatggaatgatatcgccttgccaaccctgtgatgaacgctgaccgactaacaataatgaaccacgatcggcgcgaacgatgagacgaccatattcatcccatagtgcactgttaccacgggcatttgccatcagcacggcaatcgagtactgatgtgaaaaaaattgtaagcgacgggccgacgccagcaggtcgggttctcccagacattgccctgtagtaaacagtgaacaggtcgggtccatatccataccttgcggttgttcatcgaccaccgtgatggttctggaacgacggcccagacatgcaccatgactctgatggtagatcccaggcgtttttcgccacggtgcgaacaccgcaattccacgaataaagcgatcgttatattcaacgggaaggccggcaatgatggtcattcgccaggtcgttgcggcataacaaagcgggtctaacagtgagagatcgggtggggcaggaagggcacgtcgcgaataatcacaccccagtaaagaaagcgatggaaaaactaacagctgacattgttgcctggcggcggccctcacaaactccagatgatgagctacctgttcggtgagtgaggttttacgaggctcatattgcgctgctgcaactttccagaacgacataatgacttccttttcaaaatgactgcaaattatgggtgcggtttagaaaatactcataatttagcaggcgttatgtaagaaagtgtaactctgtataagttttatttaagtttgggctcgtaaggtaaacgtgacagattgaccgaagccaaacggtgggcaataagccgctcgcgaaaccagctgcgcaaatgttcaggctgttcacgttcaaccgcttcagcgatcaccggcatattgtagcgttctttaaatgccaccccggccgccgccaaatcgacattcactttatccatttctgtttgatccagtttagccagattcttcagcattcttaatctcctcatcattcgcgggcaaaagttactaagagtgagccaggatggcaagccggaattgatgatcctcgactcagacattagacaaggttatgctctgtaaaaaagttattacaaaaaggaatagataatatgacttcaactgcacgctcccttcgctacgcgctggcaatcctgaccacttcgttggtgacaccttccgtctgggcacatgcgcatttaacgcatcagtatcctgcggcaaacgcgcaagtgacagctgcaccgcaggcaatcactttaaacttctcggaaggtgttgaaacaggattcagtggtgcaaaaatcacggggccaaaaaacgaaaatattaaaacattaccggcgaagcgaaatgagcaggaccaaaagcaactgattgttccactggccgattcgctgaaacccggaacctacatcgttgactggcatgttgtttcggtggacgggcataaaacgaaaggacactacacctttagcgtgaaataaatcatgctggcgtttacctggatcgcgctgcgatttatccatttcacctcgctgatgctggtctttggcttcgcaatgtacggtgcctggctggcccccttaacgattcgtcgcttgctggcgaagcgttttctgcgtttacaacagcacgctgccgtctggagtttgatcagtgccactgcaatgctcgccgttcagggcgggttgatgggaacgggatgggcagatgtattttcgccaaacatttggcaggctgttttgcaaacgcagtttggtggcgtctggttatggcaaattgttctcgccctcgtaacgttgatcgtcgcccttatgcaaccgcggaatatgccacgtttgctgtttatgctcactaccgcgcaatttattctgctggcgggaatcgggcatgcgacactgaatgaaggggtaacggcgaaaatccatcagactaatcacgcgattcacctgatttgtgcggcggcgtggtttgggggattactgccggtgctctggtgtatgcaactcatcaaaggccgttggcgacaccaggccattcaggcgctgatgcgtttttcctggtgcgggcattttgcggtgatcggcgtactggcaagcggcgtgcttaatgcattgttgattaccggatttccccccacgcttacgacttactggggccaactcttattgctcaaagccatcctggtgatgattatggtggtcattgcgctggctaatcgttatgttcttgtaccgcgcatgaggcaagatgaagatcgtgcggcaccctggtttgagtggatgactaaactcgaatgggcgataggtgcggtagtgctggtgatcatcagcctgcttgcgactctcgaacctttttgatggattacgaaaatgatgaaaaaaagtattctgacgtttctgttactcaccagttctgcagcggcgctggctgcaccgcaggtgattaccgtcagtcgttttgaagtgggtaaagacaaatgggcgtttaatcgcgaagaggtgatgctgacttgcagaccgggtaatgctttgtatgtcattaacccaagtaccctcgtgcagtatcctttaaacgatatcgcacaaaaggaagttgccagtgggaagactaaagcccaacccatttcggtgattcagattgatgatcctaacaatcccggcgaaaaaatgagtctggcaccgtttatagaacgagctgaaaaactctgttaattacctaaaatagccttttgatttccaataaaaaaaccgcctcagttctttcaccagaacgggcggtttttaacatttcagctgatgaccaccacgctttttattgaccattttgcacgcaaactggaaaacctggcgtcgtcatctattcttaaagggcaaggcaactaagcctgcattaatgccaacttttagcgcacggctctctcccaagagccatttccctggaccgaatacaggaatcgtgttcggtctctttttatctgttaaaagccagaagcatttccttcgctgactttatagtcaaccataacacacactctactgtctgagtccagcgttttttaacattcttgttaagattatgtgatctttagcgcgggaggaaaatattgatgaaacagcctgcgcccgtttatcagagaattgcgggtcatcaatggcgccatatctggctttctggcgatatacacggttgtcttgagcagttgcgccgcaaattatggcattgtcgttttgatccgtggcgagatttacttatctcagtaggagacgttatcgatcgtgggccgcaaagtttacgttgtctgcagttactggaacaacattgggttcgtgcggtaagaggcaatcatgaacagatggcgatggatgcgctggcatctcagcagatgtctttgtggttgatgaatggcggcgactggtttattgcgctggcagataatcaacagaaacaagcgaaaacggcgctggaaaaatgtcagcatttgccctttattcttgaagtacacagtcgtaccggcaaacatgttattgctcatgccgattatccagatgatgtttatgaatggcaaaaggacgttgatttgcatcaggtcttgtggagccgctcgcgattaggtgaacgccaaaaagggcagggaattacaggtgctgatcatttctggtttggtcatacaccgttgcgacatcgcgtggatattggcaacctgcattatattgataccggtgctgtctttgggggcgaactgactcggtgatgctgccaacttactgatttagtgtatgatggtgtttttgaggtgctccagtggcttctgtttctatcagctgtccctcctgttcagctactgacggggtggtgcgtaacggcaaaagcacc

SEQ ID NO: 56 - DNA, 47214 bp, Escherichia coli
  source 1..47214: mol_type = genomic DNA
aaggcagtccgctgcataaatctacgcaacaggttagaacccaaggcccgatacggcatgcggactgcaggcagagaaaactggccgattttctctgcactggagggataatacaaggcctgataagcgtagcgcatcaggcatttttgcggttgccatcagtttcaaacccgcgtcagtgagtttttgcttttggtgcacagggtaagatgaataaatatctacggtattaataatagactttgtaagaagttattaagtctatattgcatttaaaaggtcgtaattatacgtatagtcctctctggtaaaatattgattctctgagttatatgcttcatatgtgttatattccccgacctcaaaaccattgtccggagaattttcgtctttctcgagggtgttatctgaaagtaactcttctgagctagagtcttctatgtttaaatccatagtataattaatttggggaattaccagataagcattttcttttatattttcataatcttcaatgattatgtcgatataatcatgtattttttctgatgagaaatctatcatctctggtaatttaattctgttcaagcaattattgattttcgatgagcttttatatatttcttttgttaattcattttctaatttatctgtaagagttgctcttggtatagattttataattgcaaatctcatgatttttaattgttcttcggtaatatctccaagctcatttaaacaactttcgacaagcttaattttttcttcagaatacatatcgctaatgcttgttagaacaggcgttatttttagtaaataatcccaggagattgtggtgttttgttttgaactaacgaaatttacctgaaacatgttggcattagtaaaatctgtgtcatccaatttaaaaggatttaaaattgcattggccatatgtttatctgtaaaatcataaagttctaaatcgatattccgtaagtccagagaggatagatcaactatacctccagtcccacaactaaaaattacgtttaacctcctgatttcattgtaaatatcttttaatgggcaattaatattgatattacctgtggatatttcctggttttttaacgtttcattaatggtaagttcacaagtattgtccgatcgttgaataatttgggcgttataacctaaaaaatccagacgaagagacgagacattataaagaattacattttgtaagtacgctaattctttttgaaaatcaccagtgataatgcattttccaccaggttgtaacgtgttaagtaaagtgaccatttcaatagaggtctgttttagtttttctatacctggtgctagtgcttcgaggttatttcctgttgggctttcaggaaggtcattcatttttcgacggactaaatcactactaatatcattaccaattgatgaaacagggaacattattttatcctttataaataatcaataaaaatcattattaaaatgatcgggtgaaaaaaagagaatttgccaacaatctgaagtaatgctggttttattaaagtgcacaaggggtgttaagatggcttcttttcgggtgaattttgcacaatacttagaaatcgtctccttaatacattccagctcttttttattgacggctgagcaagtacattgttcaccaaaaggtgcaaaagtgcctacatctaatgtttgtatgatataatcatcatgttctcctgtagaaatatctataatgaatggactcatattttccggttggattcggatcatgacagaaggaacatcgccatgatagaaatttaatgcagttattgcagataatactctccgcagttcattacttatactgtaaattttattaacgtcattggtggagacaatttctgcaaactttctttttaccgtccaataatcaatatttctattgtgattgttaaccactgcgtgcattggcgggattgaagggtgaaaaatatgcgcaattgggaagcctttcattgatgcctgccttgtcatcatgacaaacaataatagatgcttattttcctcgcagggttctttcgcactatcaaaaaacgctcatttacccggcgttacagtaaacgaagcaacattctgtggcctacgccgatcaaaagctctgtgaaaatttcccttgttgtctttgtctgaccttatcgcggcgatcagcaattattcgttttgtgatcctcaacacaaaatgctattcgtcgcctatgaggggagaagaatttatggaaaacgattgcattcacaaaatgacgtcctgtcagaagagaaaaagttgacgttaatcaattgttcgagatgatcaatacatgtattcgaaattttaaaatattgataaaataaatgtttgttctccaacaaatagcgtgaaaaaatgtgacatgccgcattatttatcactgaaaatggtttatttataataaaatttgagaacttgctcattaaatttaactcaaattttgcctggtaattatccggtaattgcttgaaatatggtctcagccccttttttgtattaaccacataacgaatgatgttatcgccataaaatatggttatccccgtcattttttttgacaaaaatcagggtttatgctgatttttatactttaacttgttgatatttaaaggtatttaattgtaataacgatactctggaaagtattgaaagttaatttgtgagtggtcgcacatatcctgttcatttcattttgatacacttcatgccgtcaatgaggtaattaacgtaggtcgttatgagcactattcttcttccgaaaacgcagcacctggtagtctttcaggaagtcattagaagtggttctatcggctcggctgcaaaagaattagggttaactcaaccggccgtcagtaaaatcattaacgatattgaagattattttggtgtggaattagtggtgcggaaaaataccggtgtaacattaacacctgccggtcaattgttactctcccgttccgaatccattacccgtgaaatgaaaaatatggttaatgagataagcggtatgtcttctgaggcggtggtggaagtctcatttggttttccttcattgattggttttacttttatgtcagggatgatcaacaagttcaaagaggtgttcccgaaagcgcaggtttctatgtatgaagcgcaactgtcttcgttcttaccggcaatccgcgacggtcgactggattttgcgattggtacgttaagtgcagaaatgaagcttcaggatttacatgttgagccgctgttcgagtccgagtttgtgctggtagccagtaagtcccgaacatgcaccggcaccaccacgctggagtcgttgaagaacgaacagtgggtgttgccacaaactaatatggggtactacagcgaactgcttactacgttacaaagaaatggcatcagtattgaaaacatcgttaaaaccgactcagtcgtgacaatttataatcttgttctcaatgctgatttcttaactgtaattccttgtgatatgacgtcaccttttggttctaatcaatttattactattccggttgaagaaacattacctgtggcacaatatgccgcggtatggtcgaaaaattatcgtattaaaaaagcagcatcggttttggtggaattagccaaagagtattcatcttataatgggtgtagacgaaggcaattaatagaagttggttagttatttgtttttatttaaacataaataatccacctgtctgtcttgcaggtgtcggttacggttacctacatatttaattcaggcgaagaggttttataatgcatattacatacgatctgccggttgctattgatgacattattgaagcgaaacaacgactggctgggcgaatttataaaacaggcatgcctcgctccaactattttagtgaacgttgcaaaggtgaaatattcctgaagtttgaaaatatgcagcgtacgggttcatttaaaattcgtggcgcatttaataaattaagttcactgaccgatgcggaaaaacgcaaaggcgtggtggcctgttctgcgggcaaccatgcgcaaggggtttccctgtcctgcgcgatgctgggtatcgacggtaaagtggtgatgccaaaaggtgcgccaaaatccaaagtagcggcaacgtgcgactactccgcagaagtcgttctgcatggtgataacttcaacgacactatcgctaaagtgagcgaaattgtcgaaatggaaggccgtatttttatcccaccttacgatgatccgaaagtgattgctggccagggaacgattggtctggaaattatggaagatctctatgatgtcgataacgtgattgtgccaattggtggtggcggtttaattgctggtattgcggtggcaattaaatctattaacccgaccattcgtgttattggcgtacagtctgaaaacgttcacggcatggcggcttctttccactccggagaaataaccatgcaccgaactaccggcaccctggcggatggttgtgatgtctcccgcccgggtaatttaacttacgaaatcgttcgtgaattagtcgatgacatcgtgctggtcagcgaagacgaaatcagaaacagtatgattgccttaattcagcgcaataaagtcgtcaccgaaggcgcaggcgctctggcatgtgctgcattattaagcggtaaattagaccaatatattcaaaacagaaaaaccgtcagtattatttccggcggcaatatcgatctttctcgcgtctctcaaatcaccggtttcgttgacgcttaattaattcgttgaggataggatatgagtacttcagatagcattgtatccagccagacaaaacaatcgtcctggcgtaaatcagataccacatggacgttaggcttgtttggtacggcaatcggcgccggggtgctgttcttccctatccgcgcaggttttggcggactgatcccgattcttctgatgttggtattggcataccccatcgcgttttattgccaccgggcgctggcgcgtctgtgtctttctggctctaacccttccggcaacattacggaaacggtggaagagcattttggtaaaactggcggcgtggttatcacgttcctgtacttcttcgcgatttgcccactgctgtggatttatggcgttactattaccaatacctttatgacgttctgggaaaaccagctcggctttgcaccgctgaatcgcggctttgtggcgctgttcctgttgctgctgatggctttcgtcatctggtttggtaaggatctgatggttaaagtgatgagctacctggtatggccgtttatcgccagcctggtgctgatttctttgtcgctgatcccttactggaactctgcagttatcgaccaggttgacctcggttcgctgtcgttaaccggtcatgacggtatcctgatcactgtctggctggggatttccatcatggttttctcctttaacttctcgccaatcgtctcttccttcgtggtttctaagcgtgaagagtatgagaaagacttcggtcgcgacttcaccgaacgtaaatgttcccaaatcatttctcgtgccagcatgctgatggttgcagtggtgatgttctttgcctttagctgcctgtttactctgtctccggccaacatggcggaagccaaagcgcagaatattccagtgctttcttatctggctaaccactttgcgtccatgaccggtaccaaaacaacgttcgcgattacactggaatatgcggcttccatcatcgcactcgtggctatcttcaaatctttcttcggtcactatctgggaacgctggaaggtctgaatggcctggtcctgaagtttggttataaaggcgacaaaactaaagtgtcgctgggtaaactgaacactatcagcatgatcttcatcatgggctccacctgggttgttgcctacgccaacccgaacatccttgacctgattgaagccatgggcgcaccgattatcgcatccctgctgtgcctgttgccgatgtatgccatccgtaaagcgccgtctctggcgaaataccgtggtcgtctggataacgtgtttgttaccgtgattggtctgctgaccatcctgaacatcgtatacaaactgttttaatccgtaactcaggatgagaaaagagatgaatgaatttccggttgttttggttattaactgtggttcgtcttcgattaagttttccgtactcgatgccagcgactgtgaagtattaatgtcaggtattgccgacggtattaactcggaaaatgcattcttatccgtaaatgggggagagccagcaccgctggctcaccacagctacgaaggtgcattgaaggcaattgcatttgaactggaaaaacggaatttaaatgacagtgtggccttaattggccaccgcatcgctcacggcggcagtatttttaccgagtccgccattattaccgatgaagtcattgataatatccgtcgcgtttctccactggcacccctgcataattacgccaatttaagtggtattgaatcggcgcagcaattatttccgggcgtaactcaggtggcggtatttgataccagtttccaccagacgatggctccggaagcttatttatacggcctgccgtggaaatattatgaagagttaggtgtacgccgttatggtttccacggcacgtcgcaccgctatgtttcccagcgcgcacattcgctgctgaatctggcggaagatgactccggcctggttgtggcgcatcttggcaatggcgcgtcaatctgcgcggttcgcaacggtcagagtgttgatacttcaatgggaatgacgccgctggaaggcttgatgatgggtacccgcagtggcgatgtcgactttggtgcgatgtcctgggtcgccagccaaaccaaccagagcctgggtgacctggaacgcgtagtgaataaagagtcgggattattaggtatttccggtctttcttcggatttacgtgttctggaaaaagcctggcatgaaggtcacgaacgcgcgcaactggcaattaaaacctttgttcaccgaattgcccgtcatattgccggacacgcagcttcattacgtcgcctggatggaattatattcaccggtggaataggagagaattcaagcttaattcgtcgtctggtcatggaacatttggctgtattaggcgtagagattgatacagaaatgaataatcgctctaactcctgtggtgagcgaattgtttccagtgaaaatgcgcgtgtcatttgcgctgttattccgactaacgaagaaaaaatgattgctttggatgccattcatttaggcaaagttaacgcgcccgcagaatttgcataatttagttgaagtattgtagagagattatttttcatgaaggtagatattgataccagcgataagctgtacgccgacgcatggcttggctttaaaggtacggactggaaaaacgaaattaatgtccgcgattttattcaacataactatacaccgtatgaaggcgatgaatctttcctcgccgaagcgacgcctgccaccacggaattgtgggaaaaagtaatggaaggtatccgtatcgaaaacgcaacccacgcgccggttgatttcgataccaatattgccaccacaattaccgctcatgatgcgggatatattaaccagccgctggaaaaaattgttggcctgcaaacggatgcgccgttgaaacgtgcgctacacccgttcggtggcattaatatgattaaaagttcattccacgcctatggccgtgaaatggacagtgaatttgaatatctgtttaccgatctgcgtaaaacccataaccagggcgtatttgatgtttactcaccggatatgctgcgctgccgtaaatctggcgtgctgaccggtttaccagatggctatggccgtgggcgcattatcggtgactatcgccgcgtagcgctgtatggcatcagttatctggtacgtgaacgcgaactgcaatttgccgatctccagtctcgtctggaaaaaggcgaggatctggaagccaccatccgtctgcgtgaggagctggcagagcatcgtcatgcgctgttgcagattcaggaaatggcggcgaaatatggctttgatatctctcgcccggcgcagaatgcgcaggaagcggtgcagtggctctacttcgcttatctggcggcagtgaaatcgcaaaatggcggcgcgatgtcgctgggccgcacggcatcgttcctcgatatttacattgagcgcgactttaaagctggcgtactcaatgagcagcaggcacaggaactgatcgatcacttcatcatgaagatccgtatggtacgcttcctgcgtacaccggaatttgattcgctgttctccggcgacccaatctgggcgacggaagtgatcggcgggatggggctggacggtcgtacgctggtgaccaaaaactccttccgctatttgcacaccctgcacactatggggccggcaccggaacctaacctgaccattctttggtcggaagaattaccgattgccttcaaaaaatatgccgcgcaggtgtcgatcgtcacctcttccttgcagtatgaaaatgacgatctgatgcgtactgacttcaacagcgacgattacgcgattgcctgctgcgtcagcccaatggtgattggtaagcaaatgcagttctttggtgcacgcgctaacctggcgaaaacgctgctctacgcaattaacggcggggtggacgagaagctgaagattcaggtcgggccgaaaacagcaccgctgatggacgacgtgctggattacgacaaagtgatggacagcctcgatcacttcatggactggctggcggtgcagtacatcagcgcgctgaatatcattcactacatgcacgacaagtacagctacgaagcttcgctgatggcgctgcacgatcgtgatgtctatcgcactatggcatgcggcatcgcgggcctgtcggtggcgacggactccctgtctgccatcaaatatgcccgcgtgaaaccaatccgtgacgaaaacggcctggcggtggactttgaaatcgacggtgaatatccgcagtacggcaacaacgacgagcgcgtagacagcattgcctgcgacctggttgaacgctttatgaagaaaattaaagcgctgccaacctatcgcaacgccgtccctacccagtcgattctgactatcacttctaacgtggtgtacggccagaaaaccggtaatacgccggacggtcgtcgcgccggaacaccgttcgcgccgggcgctaacccgatgcatggtcgtgaccgcaaaggtgccgtggcctcattgacgtcggtggcgaaactgccgttcacctacgccaaagatgggatctcgtacaccttctcaatcgttcctgcggcgctgggcaaagaagatccagtacgtaaaaccaaccttgtcggcctgctggatgggtatttccaccacgaagcggatgtcgaaggcggtcaacacctcaacgtcaacgtaatgaatcgggaaatgctgctggatgccatcgagcacccggaaaaatatcctaacctgacaatccgtgtctctggctacgccgtgcgcttcaacgcactgacccgtgaacagcaacaggatgttatttcacgtacttttacccaggcgctctgacgccggaggatgtatgaaaaagattatcgaaacgcaacatgccccaggcgcaatcggcccttatgttcagggcgttgatttaggcagcatggtcttcacctccgggcaaattccggtttgcccgcagaccggtgagatcccggctgatgtgcaagatcaggcgcgtttaagcctcgaaaacgtcaaagcgatcgtggttgctgccgggctgagcgtgggcgatatcatcaagatgaccgtgttcatcaccgatctgaatgattttgccaccatcaatgaagtctataagcagttcttcgatgagcatcaggcgacctacccgacccggagctgtgtgcaggttgcgcgtttgccgaaagatgtgaagctggaaattgaagctatcgcagtacgtagtgcgtaaagcctcgtgagcgggacggtcgcaaggtcgttccgctccacttcactgaacggcaatccgagggtgtggatatgattagtgcattcgatattttcaaaattgggattggtccctccagttcgcataccgtggggccaatgaatgccggaaaaagttttattgatcggctggaaagtagcggcttattaaccgcgacgagccatattgtggtcgatctgtatgggtcgttgtcactgacgggcaaaggccatgccacggatgtcgccattatcatgggactggcaggaaacagtccgcaggatgttgtcattgatgagatccctgcatttatagagttagtaacgcgcagcgggcggctgccagtggcatctggtgcgcatattgttgattttcctgtagcaaagaacattatcttccatcccgaaatgttgcctcgccatgagaacggaatgcggatcactgcctggaagggacaggaagcgctattaagtaaaacctattactctgtcggcggcgggtttattgtcgaagaagaacacttcggcctgtcgcacgatgtcgaaacgtccgtaccttacgatttccactcagcaggtgaactgctgaaaatgtgtgattacaacggcctgtctatatctggcctgatgatgcacaacgagctggcgctgcgcagcaaagcggaaattgacgcagggtttgcccgtatctggcaagtgatgcatgacggtattgaacgcgggatgaacactgaaggcgtgctgcctggtccgctcaatgtgccgcgtcgtgccgtagcgctgcgtcgtcagctggtttccagcgataacatctctaacgatccgatgaatgtcatcgactggatcaacatgtacgcgctggcggttagtgaagaaaacgcagctggcgggcgcgtggtaacggcaccgactaacggtgcgtgcggcattattccggcagtgctggcttattacgataagttccgtcgtccggtaaacgagcggtcaattgcccgctattttctggcagcgggggctattggcgcgctgtataaaatgaacgcctccatctctggcgcggaggtcggctgtcagggggagattggcgtggcctgttcaatggcggcggcagggttaactgaactactgggcggcagtccggcgcaggtatgcaatgcggcggaaatcgcgatggagcataaccttgggctgacctgcgatccggttgccggacaggtacaaatcccgtgcattgaacgtaatgccattaatgccgtgaaagcagtaaacgccgcgcggatggcgatgcgccgcacctcggcaccgcgtgtttcactcgataaagtgatcgagacgatgtatgaaaccggcaaagatatgaacgataaataccgcgaaacatcacgcggaggactggccattaaagtggtctgcggctgacattgctgtcagctttcatccttgggtgcacaaatgtgcaccttttttttgtgatctgccgcaaatagagaatgaatattctcttgcgattaatttagtagaaaattcttatccatctccgttatttcaaagtcttgattgtgaagattttctctgacctcgcgcgtatcatttctttattctaataactcgcctgcaaaaacgtagaccgcatatcgccttgatgcggctcggaaaaaaataataagccctacaaaatattgagcgagaaattatggaaattgcatcgaataaaggcgtcattgcagacgcttcgaccccggcgggtcgtgctggaatgagtgagagcgagtggcgagaagcgatcaaattcgacagtactgacaccggctgggtgattatgagtatcgggatggcgattggcgcggggattgtttttctcccggtgcaggtcggtttgatgggattgtgggtatttttgctctcatcggtgattggttacccggcaatgtatctgtttcagcggttgtttattaatacgctggcagaatcaccagaatgtaaagattacccgagtgtcattagcggttatttaggtaaaaactggggcatcctgttaggtgcgctctatttcgtaatgctggtgatttggatgttcgtctattccaccgccatcaccaacgatagtgcttcctatctgcataccttcggcgtgacggaagggttgctgtcagacagtcccttttatggtctggtactgatttgcattctggtggcgatctcttcacgcggcgagaaattgttattcaaaatttcgaccggcatggtgctgaccaagctgctggtggtcgcggcgctgggcgtgtcgatggtgggaatgtggcatctgtataacgtcggttcgctaccgccgctggggctgctggtgaaaaacgccattattacgctgccgtttaccctgacgtcgattctgtttatccagacgttaagcccgatggtgatctcttatcgctcgcgggaaaaatcaattgaagtggcgcggcataaagcattgcgggcaatgaatatcgcgtttggcattttgtttgtcaccgtctttttctacgccgtgtcgttcacgctggcgatgggacatgacgaagcggtaaaagcctatgagcagaatatttccgcgctggcgattgccgcacagtttattagcggtgacggcgcagcgtgggtgaaagtggtcagcgtcattctcaatatctttgctgtcatgactgcattctttggcgtctatttaggctttcgcgaagcaacgcaagggatcgtaatgaacatcctgcgtcgcaagatgcctgccgagaagattaacgaaaatcttgttcagcgcggcatcatgattttcgccattttgctggcctggagcgccatcgtactgaacgcaccggtgttgagcttcacctctatctgtagcccgattttcggcatggtagggtgcctgatcccggcgtggctggtttacaaagtaccggcattgcacaaatacaaagggatgtctctgtacctgattatcgtcactggtttgttgctttgtgtttctccgttcctggcattttcttgatttacctgaaattttaaggtttttaatatgtttgattcgactttaaatccgttatggcagcgttacatcctcgccgttcaggaggaagtaaaaccggcgctgggatgtactgaaccgatttcactggcgctggcggcggcggttgctgcggcagaactggaaggtccggttgaacgtgtagaagcctgggtttcgccaaatctgatgaagaacggtctgggcgtcaccgttcccggctcgggaatggtggggctgccgattgcggcggcgctgggggcgttaggtggaaatgccaacgccgggctggaagtgctgaaagacgcaactgcgcaggcaattgccgatgccaaagcactgctggcggcggggaaagtctccgttaagatccaggaaccttgcaatgaaatcctcttctcacgcgccaaagtctggaacggtgagaagtgggcgtgtgtcaccatcgtcggcgggcataccaacattgtgcatattgagacgcacaatggtgtggtgtttacccagcaggcgtgtgtggcagagggcgagcaagagtctccgctgacggtgctttccagaacgacgctggctgagatcctgaagttcgtcaatgaagtcccgtttgcggcgatccgctttattctcgattccgcgaagctaaattgtgcgttatcgcaggaaggtttgagcggtaagtgggggctgcatattggcgcgacgctggaaaaacagtgcgagcgcggtttgctggcgaaagatctctcttcatccattgtgattcgtaccagcgcggcatccgatgcgcgtatgggcggcgctacgcttccggctatgagtaactccggctcgggtaaccaggggatcaccgcaacaatgcctgtggtggtggtagcagaacacttcggagcggatgatgaacggctggcgcgtgcgctgatgctttctcatttgagcgcaatttacatccataaccagttaccgcgtttgtctgcgctgtgtgccgcaacgaccgcagcaatgggggccgccgccgggatggcatggctggtggatgggcgttatgaaaccatctcgatggcgatcagcagtatgatcggcgatgtcagcggcatgatttgcgatggtgcgtcgaacagctgcgcgatgaaggtttcgaccagtgcttcggctgcgtggaaagcggtgttaatggcgctggatgataccgccgtgaccggcaatgaagggatcgtggcgcatgatgttgagcagtcgattgccaacctgtgtgcgttagcaagccattcgatgcagcaaacggatcggcagattatcgagattatggcgagcaaggccagataaacgccaggttttgagtattgtgccggatgcgatgctggcgcaccttatccggcctacggggtgctcaacttgttgatgttgttgtgttttgtacctgatgccggatgcgatgctggcgcatcttatccggcctacgggttgtttaattcgttaatgttgttggattttgtaggccggataaggcgttttcgccgcatccggcaacctgtctttacgcggtagcttcatcctcggctaaacgcgtttcagcatccgcgacgatggcttccagctcgctcaacatctcttcatagccaaaatttttggcggtgcgagcaggttctttcgccaccacgggcttcactggctggcgctttttggccgattttttactcatcatcatctccctgtaaaaacaactagacaggcaaatctatcagcaaagcgcgcagtggggaatcggcaaccagcgtaatgttagcctcgtcacgaataaacgccccatcaccgcaggtcagcgccgctttctcttcatgatgcgtaagcgcatgaaatttcccgtgaatcgattgcaaatacgcgcgtggcccatgcaactggaaattcgcactttcgcctttgtcgagcacgatatggtgcagccacacttgctggcgtaattgcaggcttcccatcgtaccctctggcgaggcgattaattgctgcttgcccatattaagcgccagtttttgaatcagcggattctctcgctgcgggcaggcgtccagccaaagctgcattcgtgttaacggtttgtctttgctgagattgtgttcgctgtagctgacacccggctgggtagagagcagcaacgcctcaccggcgctggcctgaacatgattgccttcgctgtcgcgatactctgcttctccatccagaatcacatttaaaatatcgactttgggataggttcgcggctgaaaggcggcacctggggccagcacttcctggttaagcacacgcagggaggcatagcctaacaatttcgggtcgaagtagtgtccaaaggaaaaagtataccgggcctgcaaccatccgtagtctgcttgtccacactgtctggcagttcgggtagtaatcataattcttgacctctctttacttccttttatggtaaggggctggacgctacattgttagccagatattctgcccggtatgttcaaatttcctgaatgagaacgaaatggccaaagaaagggcattaacgctggaagcactacgggttatggatgcgatcgatcgccggggcagttttgcggcggcggcggatgagctgggacgcgtgccttccgcacttagctacaccatgcaaaaactggaagaagagctggatgtggtgctgtttgaccgctcgggccatcgcaccaaattcaccaatgtcgggaggatgttgctggagcgagggcgcgttttgctggaagccgcagataaactgactaccgatgcggaagccctcgcgcgcggttgggaaacgcatctcaccattgtgaccgaggcgctggtaccgacacctgcctttttcccgttaatcgacaaactggcggcaaaagccaatacccaactggcaatcatcaccgaagtgctggcgggggcgtgggaacgactggagcaggggcgggcggatatcgttatcgcgccggatatgcattttcgttcctcgtcggagatcaactcgcgcaagctctataccttaatgaacgtctacgttgccgcgcctgatcacccgattcatcaggagccggaaccgttatctgaagtgacgcgcgtgaaatatcgtggaattgcggtagcggataccgctcgtgagcgcccggtgttgaccgtacagctgctggacaaacagccgcgcttaacggtgagcacgattgaagataaacgtcaggcattactggcggggcttggcgtggcgacgatgccgtatccgatggtcgaaaaagatattgcggaagggcggttgcgtgtcgtcagcccggaatcgaccagcgagatcgatattattatggcctggcgtcgtgacagtatgggggaagcgaaatcctggtgtctgcgggaaattcccaaactttttagcggaaaataatatttgttattattaataaaaaggggcgaaatgtcgccccaattctaagattaatttgaaccaaacttaggatcgtttccgtaacgattgctgccagaattgccttctaaacaggcaaatacaaacagaactaaccagccaatgatcggtaccagatagagaagcgcccacgcacctgaacggtcagtatcgtgcagacgacgaacacacagagcaatgaccggaatgattgttgctgccaggtaaatgagagaaaggaatggaaactctaaacctaaaatcaattgaatgacattgataatagcgccgacgatggcgttaatcagagtaaacatccagtactctttacgacgtgcgcgaccagagaaaccaacataattttttaatacggctaaataccactgcataaaaacatccctttaattaaaagtgacgaaagtctattccgggtattgtgtaaatgctattcgtatctttctttttcggatgttataaaggttttgatatttaagataaatacatggttgttttttataggtaatttatataacgacattgaaatattttaaataaacattagtaaattattcattcatcaacatgatgataaaagccggatgagtcagacatccggcgagcagatttgttttaaggttccagtttcggatctggtccaaagcggttttcgcctggcgtacccgcctggcagttaaagacgatgataataagccagccgataaacgggattaagaacaacagtgcccaccacgccgagcggtcggtgtcgtgcaggcggcggaactgaactgcccaccacggtaaaaacaccagaataccgtagattgtcgtcaggatgccttcgccaccagcgcgttgccagcctaacattttatccagcagccccagcacgaacgtaaagatgatgttgaccagaataaacatccagtactctttgcgccgcgcacgaccccggaaaccgacataatttttagtactttcagataccagtccatttttgcctcaattttgctcaatcacttgtttttaaagcagcaaattaagaatagacgtgaatgaaatggcagtaaatattcgttcaaggaattaataaagtgctgtgaaggcgcgctaagactgatgacaagcgcaaaatcgccagatgcgctacgcttatctggcctgcgcggtcattgcaacatattgaatataaatgttttgtaggtttgataaggcgttcacgccgcatccgacatgaacaacatgcacttagctaattatcagaggcacctcgtaaggtgcctttttttaaccgaagcgaacatctcgtccatgcggttcatcgagatcctgccatggaccaattgaaataatccccgtagggttgatggtcttatggctgcggaagtaatgattacggatgtgatcgaaattgactgtttcggcaattcccggcatctggtagatatcacgcaggaagccatacagattaaggtaatcgctgatgcggtgcttatcacacttgaagtgggtcacatacactggatcaaaacggaccagcgtggtccacaggcgaatatcggcttcggttagctggttgccggtcaggtaacgatgctggcctaaaatctgctccagtcgcgccagcgattcaaacactttcgccaccgcctcgtcgtaggcttgctggctggtggcaaaaccagctttatacacgccgttgttaacggtgtcataaatccagccgttaagttcgtcaattttcgtttgcagggctggtgggtagtaatcacccgcttttgcgcccagcgcatcaaacgcggtattgaacatgcggatgatttctgctgattcgttgctgacgatggtgtggttctttttgtcccacagcacgggaacagtaactcgtccgctgtagtgtggatcggcgtggagataaagctgatacagaaattcatgttgatagagcgtatctccggttgctcccggaaaactgtcatcaaaggtccagccgttttccagcatcagcgggttcactacggaaacggaaataaacggttccagtcctttgagtttgcgcatgatcagcgtgcggtgcgcccacgggcaggcgagtgaaatatagagatgataacgatctttctctgcgataaaaccgcctgtgccagtggggccaggtgcgccatcggcagtgagccagttacgaaatgcggaagctgaacgttgaaatttaccgccggtagatttggtatcgtaccaggtgtcatgccagacgccgtcaatcagttgacccatttttctctcctccaatagcaaaaacgaggagcttcctcctcgttttttatcgttaagtatagcgcgtgcttaccactttttattcagcaggcggtcgatgctatacgcgcccggaccggtaattgccagcagcaggaatccgccagaaattgtcaggtttttcatgaacatcagcgagttgacgccttcagcaaagttgctgtgaaataaaaatgccgtcagcagcgtaaagcccgcagtaaacagggctgtggtgcgagtcaggaaaccgaacaggattgccagaccaccaccgaactcaagcagaatcaccagcggcagcataaaacccgggacacccattgcttccatatattgttgggtaccagagtaagcggtgatttttccccagcctgcggtaataaacagaatcggcattaaaatgcgcgctaccagtacaccaacatcttctaattttttcatcatactctccactgcgccactcaggctgctgattgtttttttgtgcaagggcgcggtattagcgtcgttgctgtcgatggagagaatcataaacgtggtgaatgatgattgttagcaaggaaaactgtcaaaaatcttcaaaaaatttgagggataaggccggaattgctccggccagagggaagttaaccgcgaagctgttgctgcttgagggtcgttttaaccagacgccaggcgctccatacgccaaaaccgcgtctggcccagcggaccagcatattaggatggcgaatcgtccagatcgccatcacgctactgccaaccagcgcccaggagcgcagacttagcagcatattccagcgacgatcgtaagcgcctgttgcctccagccattcacgacgactggcggaaagatccagccgttgttgctggatctggctaagcagttgcgccttacgtcgttcacgttcgactttactgctcacgggactcctcctcgagcagttgccgatcgtttgccagctcatggcgtgtatggcgcagcaaggtggatttacgcgatttacgtaacgtccagataccgccaattagtgccagtagcagcaacaccacggtggtggcaatcatcgcattcaggcgatattgcggatcaaccgcccaaataattagcaccatcaggctcataagaccaaatgcagcgaaaagcatcgtcaggcccagcatcagtaaaagttgaaagagattagctttttcctcttccagctccaccaccgccagccgcagacgtgtttccaccatttcaaccatgatggaaacaattcgctgcccgatgcccagaacgcttttaccgggcccttgcgcgtgatgagtgtccgccataattaacgacgcgacagcagaacgccgagcactacaccgattgcagcgccaattcccacgccggtccacggattttcacgcacatactcatcagcacgcgccgccgcgacacgggtttgtttggcgatggcatcaccggtttcacccaggcgataacggctctgtttcagtgcctgctccgctttgctacgaatcttactcaactcttctttcgacttctcgccagatgagctaagcacctcttccagcgtatcggaaagggatttcaactcagcacgcagatgttccgtagtgtgttctttcgacatagttttctccaggtgagtaagtagtgactattgtgagttagtagtcgcgcgcttccagctttttcagctcttcctgcgcttctgccagtttccgttcgcgtttggcaatcttatcggcatcgcctttttgcttcgcctcggctaaatcttgctggcgttccgccacctcatctttctgctttgcgattttcttgtgatgatcggcacgcagctggctatctgaacagttggcccggacttcactcagggctttattcagaccgtcaatacgattctggttttggtgtttttcggcatagctgatctccttaaggatattttgctccttttcctgacacagggtagtggcataactaccggcactaagagcaaagagagaaacagctaaagcgatgcggtatttcattcttgaaccttccattgtgattcggacctattacaaaggaacgattgtccagacaacgaagcggtagtgttaaccaccgcctcattaatcatagacagttacggtgaaatcaccaaagtgagtgatatgtttcggataacaggaagttatccgaagcgatgagagttatcccgtaaccgggtcagccactgcatagcctgactgttattgtcctgctgcgcaatgatgtagccatggggcaatgttctgtcgaggaccgcttttgcggcggcgctctggtcgctggagtcaaatgtaattaacagagtgtcgtttttgggggtgatacttttgaaaggaatgccatgagcgtcaaggtgatgccagatcgaaaaaccgtctggcatcgttgtgccttgatgaacggcacgaatcgccagcgtagactcttgctggcgaaccgcggaccaggccagcaacagcgtgccgaccagaagtaaaacagtgccggaccaggctagctggcgaagcgacatgcgaggtatttgcatcccttacccccgatttccatatttctttttccataacacgaccagagaacctgccaggccaaacaccagcagcaccaccgggagcagcatcaggcatgacatcagctggtcctcgtactttaaaaataccggcgttttgccgagcatgtaacccagagttgtcaggatcaatacccacagcagaccgctcatccagttgaaaaactgaaagcgcgcgttattcagccctgataacccggcaatcgtcggcagcagtgttctgacaaacgcaataaagcgaccaattaacagcgccgataaaccgtgtttatgaaaaagatggtgtgcgcgttgatgataatgcgcgggtaaatgagatagccagttttgtacggtgcgggtattgcccagccatcgcccctgaatatagctgacccagcagccgaggctggcggcaacggtcagcagcagaatcgtttgcgggtaacccatcgcgcctttcgcaatcaacacgccgaccaataccagtaaactgtcgcccggtaaaaaggccgctggaagcaagccgttttcaaggaacaaaattacaaacaagacaaaatacaacatgccaatcatcgatggattggccagggtttcaaaatcctgcgcccacagggcttgcagcaattgggtcaaaagttccattcattattcctggtgaatcggttaacgccacgctggttttaaaagatgcactaccgcaatgttattgctgttttggtatgttctgcgggtttgatacatcaacacagcctgaactattccctgttaaatcgtgagataagaaagcattcaaaaacataaattcaaattgaatctaattgtaacaaaggtcaacgttgttcgttatcaaaattacatgtccgtggagtctgattttgctgaatgcaggggagggtggcgagaggatttacacaggctgacactttatacttttcgcttaccgacgagacaaacaggcgcgtcgcagcgcctgtcggacaggagtttcatttactgccactggtggccgtatcgagatgcactaccgggttttcggcgaacagatagcggtcggcattgaactcgaagtcgtcgctggtttcgttgaataacatgatcttggtgttttccaggtgctgccacattgccagcttagcagcatgaggatctttgcgaatcagcgccttgaggatttgatcgtggtcatcacaccagttatcgacggtacgggaatcaatgtgttcgtgcagttttttccagtacgggttatggctacgttgggtccacattttttcaacgatggccgccagggcggagttctgcgtcgccagggctacctgaatgtggaactgtaaatcccactcggaatcacggaagcattgttcgccgcgcgcctgttcctgaatggccatcagtttcatgatgtcttgtttcgttacctgagttgccgcgaactcggcaatattactttcgatgagctggcgagcctgaagcaactcaaacggaccgtaattggcgaattccatattattgtcagccgcctgctgatggcgcggctggttggaaaccacatgaatacctgaacctttacgcacttcgacatagccttcaacttccagcatgatgatggcttcacgaactaccgtacggctgacgttcttttcatcggcaataaagcgttctgcaggcagtttatcacctaccagatagacgccctgttcgatgcgctctttcaggtcagcggcaagttgttgatacaaacggcgtggttcagtgatttccatatgcgtctcccggagtggaatgcggacgaagttatcataccactttattcatgggtatgccattggtcatatataaatttggtgattgaattaatgtattgaattaatattgtgaatatttataaattcctaaaaaataagtatcgtcattgtgaaagctactaaatttcagtaagttaattcccagcctttaaatttaatattaactaaaaatgcttttttatattgacttacaataaatctacatctctaatacaccaactttttggaaacaatattgtaagatcaaatttatatggtggcgaaaattaatctcttatcacggcttacgccgcttttattcgtgttcgctccttttttggtacagtcaaatatgactgtttatcctatggctgtttccattaatagtcagggtgaaggcaacgttcgcgtaatatctaaaagtaatgaagttcagtacatcaaggcgacagtattccgtatcgataatccatcgacgcctcaggaaaatgaagttgagattaaatccggtgatgcaaatcatctggttgttatgccacctaaatttgctttaccagccggtagtagcaaaaccgtacgttttgttgcgatggaaccagagcaaaaagagaaaaattatcgcgttaaatttgaagcggttcccagtattgatgacgttgccacagataaaaaagatctctctatgcagttaacagttaacttaatttgggggattgttgttagtgttccacctcagcaacctattgctaagttagaagtaaatgctgcccaaaaattagttaatgcagggaatcaacgcttaaagattttaacgatcgcttattgtaaaaataatagcaaagaaaattgtaagatacagaccgtaaataaaaacatcttccctggtcaggaaagaaatcttgaaagcatatctggctacgacaaaatcgttgtcaaatataataactggatcaccaaagataatggcgagtttgaactggcggtccattaattatcattgtaataaacgaaggaatagtaatgaaaaaggtatttgcaaaatctcttctggtcgcagcgatgttttctgttgcaggctccgtattggcagtacaaaaggatattactgtaacggccaacgttgatgccgctctggatatgacacagaccgataacaccgcgttgccgaaagcagtagaaatgcaatatctgccggggcagggtctgcaatcttaccagttgatgaccaaaatctggtctaacgacgttaccaaagatgtaaaaatgcagttagtttccccggcgcaactggttcaaagcctggatgctagcaagattgttccgctgacagtaacctggggcggtgaagaaattaaagctgatgcggcaaccacttttaccgcaaccaaaatctttgcttccgatgcgttaactaacggttctctggctaaaaacctgatgtttgctcaaaccaccaaaggtgttctggagacaggcatctaccgtggtgtagtaagcatttatctgtctcaggatatctaatccagataacagaattaacacgtaacaaagggaggggtagccctcccttattttaactgttttagtatttgttatggatttcaggattgccatggataaaaaattactggctcttttgatcctggcgagtctcagcccggcagaggcgacattaaccaaaattcccgcagggtttgaggttattgctcagggacagcaggagtatatcgaggtttatttttcagggaaaagtctcggtaaatattatgcaatggttaatcttgataccgtaacatttcttgatccagcaagtctatataacaagctggaactggatgtagacgatcagaaaatcgcgcatatagtgaaagaaaaattatcgcagccgctagctcgccacggtgaattggcttgcggttatgtacgtactgactcagggtgtggttttctgaataccgatacgctggaaataatctataatgatgaagaaagttcggcaacgttgtttattaatccgcaatggaattcagctttcgatgcgaagtcattatatttaaatccagacaaaaatactgttaatgcttttatacatcagcaagacatcaatgttctggcacaggatgattaccaatcgttgtctattcagggaaacggtgcgctgggaataacagaaaatagttatattggtgcacactggaatttcaacggttatgatgcagatgatgtcagtgacagtaatgctgacgtcagcgatctctattatcgttatgattttttacgtcgttattatgtgcaggcgggtcgcatggacaaccgcacactatttaatgcacaaggcgggaactttacctttaactttctgccactcggtgcaattgatgggatgcgtatcgggtcgacactgagctatttaaaccaggcgcaaagccagcaaggaaccccagtaatggttctgctttcgcgcaattctcgtgttgacgcttatcgtaatgagcaacttttgggatcgttttatctcaatagtggttcgcaatttattgataccagttcctttccgcctggcagctacagcgtggcattaaaagtctacgaaaataaccaactcacccgcaccgagcttgtgccgtttaccaaaaccggcggtctgactgacggaaatgcgcaatggttcttacaggcaggtaaaactacatcacaggtttctgatgatgaaagttcagcttatcagctaggagtacgcctgccattacatccgcaatatgagctctacgcagggctggcgaatgccgatgatgtgagtgctttcgagttaggtaataactggacggcagatttaggcggggtggggaatcttgcaatcagcgccagcgtgttccgtaacgatgacggcggcaaaggtgatatgcaacaggccaactggagtaatccgggatggccgacgttgggcttttatcggaccaactctgacggcgatgcttgtacaaccgacagcagagagagctataacgccttaagctgttatgaaagtatttccgcgacggtttcacagaattttgtcggctggaatatgatgctgggttatacccgcacacaaaataacactgatgatagtttgcgttgggataaacagcagagctttgaaaataactatcttcgccagacaacagcgcaaagtatctctgaaactgtacaacttagcgcttcccgcgcttttgtgatgcgtgactggattttgagtacgtcagtcggtgttttccatcgtaatgacaacggtggcgataacgacgacaacggcttgtacttatcgttttcgttatctgacacgccaacgatggatagcaataacaacagccattcaacaaatgtgtctacggattatcgttatagcgaacaggatggcgatcaaacgtcatggcagttatcgcataccttttataacgattcattcagccataaagaacttggcgtaaccgtcggaggcctgaacaccgataccataaacagcgcggttaacgggcgttgggatgggcaatacggaaatgtctacgctaccgtatctgatagttatgaccgtaagaatcatgatcatctttcggcctttacgggcacttatagctctacgctggctgtcagtcgctatggcgttaatttgggagccagtggtacagacgatttgctgggtgcggtactggtggatgtgaaaggcttctctgaacaggatgaagagagtcaggatctgcaactcgaagcgcgggtggcaggcagccgaactttgcagcttggtcaaagtgacagtgtgttgttcccttatcctggatttcagtctggttttgttgaggttaacgacagtagccagggcaatcagcaggggacaacaaacatcattaacggtgcagggaatcgtgaattaatgttgttgcctggcaagctgcgctatcgcgaagtgtctgccagctttaactacaactatatcggtcgtttattactgccggcagcggtgaaaaaattcccgattgtggggctgaacagcgccatgttactggtagctgaagatggcggatttacacttgaaattaacggcagcgaaaaagagctctatctgctttccgggcagcaattccttaagtgtccactaagtgttgtaaagaaacgcgccagcattcgttacagcggagatgttacttgtagtgtggtgacttattcacaattaccggagtcgattcaggttcaggcacagttgaaacagcctaaattacgtggaaacgttcagacggcgcaaagggaggttgcaccatgagaaatcgattgattgcggcgatattgggcttgtttggcacgctcactggcgttcaggcagctcctgacgtgaccagtgaaattacgtatgatttggcatctggtagagcggattattacttctggaaggatgaagcgtcggcaggaaataatggatatatgtggtatgaatgttcgtatcctgacctccaacaaacctgtacagctaatggaaatatatcgacagtacaaatctatttaactgaacaacgcagtgggatgcgttggccggtaaaactcaaaggatttaaaacagccattgtaagtagcgatgaagcgccgccaggatgcaaggggggcaaagggcttcagacgaatcttaaggattctaatagatcttcatgtacagaagatggtcaacattattatatatacgatacaaagtttcttacgctctaccttgagcagacagagatgaagaatttgccgattggtggcgtctggaaggggaaagttaaattacattcgaacagcccggcccaggactatttcgcaaatattaccctgaatacgctcgaccccaaccatattgacgtgttcttcccggagttcgcccacgccacgccaagggtgcagttagacttgcatccaacaggaagcgttaacggcagcaactacgcgcaagatctgaccatgttggacatgtgcctgtacgatggttttaacggtaatgccatcagttatgaaatcatgctcaaagatgaagggcgaccagctgcagggcgcagagacggttacttctctatctatcgtcagggagggaccaccaccgacgagggagaacgcattgattaccgggtcaaaatgtacaacccggaaaccggtgggcaaattgatgtgcgcaataatgaaaatatggtctggaacagcattaacctgaaacgtgtgcgtccggtggtactgcccggtattcgctatgccgtgatgtgtgtgccgacacccttgactctggcagtcgataaattcagcgtgatggataaacaggccgggtactacatgggcaaattgtcagtaatctttacgccttccttgccaaccatcaattaaccctgcaaaccggacaaacgcttttttctatataaacgacgaagccgtctgataaggcggcttcgtcattacaacttaagttaaacgttaatgttgcggtgcgggatcgttatgtgtttcctgcgccacctcaatcgccggtttgttctgcaacacggtccagataaccagcgcacctaacaggtcaaatactgccagaactgcgaacagcgggctgaagccgatggtgtcagccagtgcaccgacaaccagcgcaaacagcgtacttgccagccatgcggacatcccggttaaaccgttcgccgtcgccacttcgttacgaccgaacacgtcagaagagagcgtaatcagcgcgccagacagtgcctggtgggcaaaaccaccgatacacagcagcataattgcgacatacgggttggtgaacagaccgatcatacccgggccaatcatcagcacagcacccagcgttacgaccatcttacgggaaacgatcaggttcacaccaaaccaacgctggaacagcggcggcaggtaaccaccgaggatacaaccgaggtcagcaaacagcatcggcatccaggcgaacatcgcgatctctttcaggttaaagccgtaaactttaaacatgaacagcgggatccacgcgttaaaagtaccccaggccggttctgccaggaaacgcggcagcgcgataccccagaactgacggttacgcaggatctgaccaacggacattttcttcgccgtgctcacctggtgctgggcttcctgaccattaataatatagtcgcgttcttcatcggtcagatgcttctggtcgcgtggatgtttatagaaaatcagccatgccatcgcccagataaagctcaatgcaccggagatgataaatgccatctgccagctgtgcattacgattgcccataccaccagcggcggcgcaatcatcgcaccaatcgaagaacctacgttaaagtaacctaccgcgatggaacgctctttcgccgggaaccattcggagctggctttcagacccgccgggatcatcgctgcttccgcggcaccgactgcaccacgagcaatcgccaggccaccccagctaccagccagcgcggttgcaccacagaacacggcccacagcacagcaaacattgcataaccgattttcgtacccagcacatccagtacatagcccgctaccggttgcatgaccgtataagcagcagaataggctgcgatgatataggaatactgttgggtggagatgtttaactcttccatcagagttggcgcagctgccgccacagtgttacgcgtcaggtaaccaagcacggtgccaagcgtcaccagtgcgatcatataccaacgtaaccctttaattttacgcatgtaaaacctcatcgttttgttatatccgcaggaagcgcggccatcatcccgccagaggctgaagatgttagttacgaccgggtaaccgaaaaaaaaccggcacgccccgaacgttgccatgaaagtttcgtgctaattcggcttccgtaccggttaacccgattcatctaacaaatgaatgaatcggcaatttgcattccgtcgacttatgatttgcgacggcagaaagataacttgtcatacaactttaaaaggtgagagccatcacaaatgtgcgaatatttgtagggacattacctgacgacagcgaggccagtactggcgcggcctgcagagaggtttaccactttgagagtaatttttttaactacgtttattgatctaactcacgaaaatatcttcggactctggaaattggtgtgataactttgtcagcatcgcaccataagcaagctagctcactcgttgagaggaagacgaaaatgactccgtttatgactgaagatttcctgttagataccgaatttgcccgccgtctgtatcacgactacgcaaaagaccagccgattttcgattaccattgccatttgccgccgcagcagattgcggaagactatcgttttaaaaacctgtatgacatctggctgaaaggcgatcactacaaatggcgcgctatgcgtaccaacggtgtggccgagcgtctgtgtaccggtgatgcgtctgaccgtgaaaaatttgacgcctgggcggcgactgttccgcacactatcggcaacccgttataccactggacgcacctcgaactgcgtcgtccgtttggtatcactggcaaattgctttctccgtcaactgccgatgaaatctggaacgaatgtaacgaactgctggcgcaggataacttctccgcgcgcggcatcatgcagcagatgaacgtgaaaatggtcggcaccaccgatgacccgatcgattctctggagcatcacgcagagatcgccaaagacggctctttcaccatcaaagtgctgccgagctggcgtccggacaaagccttcaacatcgaacaggcgacctttaacgactacatggcgaagctgggcgaagtttccgataccgacattcgccgctttgctgacctgcaaactgccttgaccaaacgtctggatcacttcgccgctcacggctgtaaagtgtctgaccatgcgctggacgtggtgatgtttgctgaagcgaacgaagcggaactggacagcattctggcgcgccgtctggctggcgaaaccctgagcgagcacgaagtggcacagttcaaaactgcggtactggtgttccttggtgccgaatatgcacgtcgcggctgggtacagcagtaccacattggcgcgctgcgtaataacaacctgcgtcagttcaaactgctggggccggatgtaggctttgactccatcaacgaccgtccgatggcggaagagttgtctaagctgttgagcaagcagaacgaagaaaacctgctgccgaaaaccattctctactgcctgaacccgcgcgataacgaagtgctgggcaccatgatcggtaacttccagggcgaaggtatgccgggcaaaatgcagttcggttccggctggtggtttaacgatcagaaagacggtatggaacgtcagatgacccaactggcgcagctcggtttgctgagccgctttgtcggtatgctgactgacagccgtagcttcctgtcatacacccgtcacgaatacttccgccgcattctgtgccagatgatcggtcgctgggtggaagcgggcgaagcaccggcggacatcaacctgctgggcgagatggtgaaaaatatttgctttaacaatgcgcgtgactacttcgccattgaactgaactaaggtctggggttgatatgcaatacatcaagatccatgcgctggataacgtcgcggtcgctttagcggatttggctaaaggcacagaagtcagtgtcgataaccagactgttacgctgcgccaggatgttgctcgtggacataaatttgcgttaacggatatcgcaaaaggggccaatgtcatcaaatatggcctgccgattggttatgcattggcggatattgcggcgggggaacacgtccacgcccacaatacgcgcacgaatctgagcgatctggatcagtatcgctatcaacctgattttcaggatctgcctgcgcaagcggcagatcgtgaagtgcagatctatcgtcgcgctaacggcgatgtcggggtgcgtaacgagctgtggatcctgccaaccgtgggctgtgtcaacggcatcgcgcggcaaatccagaaccgtttcctgaaagagaccaacaacgccgaaggtaccgacggcgtgttcctcttcagccacacctacggctgctcacaactgggcgacgatcacatcaacacccgcaccatgctgcaaaacatggtgcgccacccgaacgcgggcgcagtgctggtgattggtctgggctgtgaaaacaaccaggttgccgcattccgtgaaacgttgggcgatatcgatcctgaacgcgttcatttcatgatctgccaacagcaggatgatgagatcgaagccgggatcgagcatttgcatcagctgtataacgtgatgcgcaacgataaacgcgagccaggcaaactcagcgaactgaagtttggtctggagtgcggtggttctgacggtctttctggtattactgctaacccgatgctggggcgtttctctgactacgtgattgctaacggcggtactaccgtactgaccgaagtgccggagatgtttggcgcagagcagttgctgatggaccattgccgcgacgaagcaacgtttgaaaaactggtgaccatggtcaacgacttcaaacagtactttattgcccatgaccagccgatctatgaaaacccatcgccggggaacaaagcgggcggtatcaccacgctggaagataaatcccttggctgtacccagaaagcgggttccagcgtcgtggttgacgtgctgcgttacggcgagcgtctgaaaacgccggggctgaacttgttaagtgcgccgggtaacgatgccgtagcgaccagcgccctggcgggtgcgggctgccatatggtgctgttcagtactggtcgtggcacgccatacggcggctttgtaccgacggtgaaaatcgctaccaacagtgaactggcggcgaagaaaaaacactggatcgactttgacgcgggtcagctgatccacggtaaagcgatgccgcagttgctggaagaatttatcgacaccatcgttgagtttgccaacggtaaacaaacctgcaacgagcgtaacgacttccgcgaactggcgatcttcaaaagcggcgtaacgctataaagtcgaaatgagttgttaataaaaaacggcgtttcataatgtgaagcgccgtttgcttttccatacctgataaggatttatcatgaccgcgtattggctggcccagggcgtgggtgtcatcgcctttctgattggtatcacaacatttttcaatcgtgacgaacgtcgcttcaaaaagcagctttcggtctatagcgccgttattggcgtacatttttttcttctgggcacctatcccgctggtgccagtgccatccttaatgccattcgtacattgattaccttacgcacgcgcagcttatgggtaatggcgatttttattgtgctgactggcggaattggcctcgcgaagttccatcatcctgtcgaactattgccggttatcggtacgattgtcagtacctgggcgctgttccgctgtaaagggctcaccatgcgctgcgtgatgtggttttcaacgtgttgctgggtgattcacaacttctgggcggggtcgataggcggcacaatgattgaggttagttttctgcttatgaatggcctgaatatcattcgtttctggcggatgcagaaaaggggaattgatccgtttaaagtagagaaaacccctcccgccgtagacgaaaggggttaaacaattaattacgcagggcgctatttgccagacgatcgtcttccgcctggcaagctgccgcagtgaacagcacgtcagttgaagagttcagcgcggtttcgcaagagtcctgcaatacgccgatgataaagccgacggcaaccacctgcatggcgatatcgttcgaaataccgaacatattacaggccagcgggatcagcagcagagaaccccccgccacgccggatgcgccacaggcacacagagaagccaccacgctcaacagcagcgccgtgggcagatcgaccgggatacccagcgtattaaccgcagccagcgtcaacacggtaatggtgattgctgcgcccgccatattgatggtggcacccagcggaatagaaacggaataggtatcgcgatccagattcagcttttcacacagtgccatattcaccggaatgttcgccgcagagctgcgggtgaagaaggcatacacgccgctttcgcgcaggcacagcagcaccagcgggaacgggttacgacgaattttccaccacaccagcaatgggttaaccaccagcgccaccagtaacatacagccaaccagcacgaccagcagttgcgcgtagccccacagtgtggagaaaccggtggttgccagggtagaagaaaccagcccaaaaataccaatcggtgcgaagcgaatgaccagtttcaccataaaggtaacggcattcgacatatcgttaaccaggtttttggtggtctcgttaccgtgacgcagtgcgaagccgaggccgatcgcccacaccagaatcccgatgtagttacctttcagcagcgcgtcgatggggttggaaaccatgctcattaccagcccgcgcatcacttcgacaatgcctgacggcggcgaaatatcacccgcgctactggataaatgcagggtagaagggaaggcaaagctgaagactactgcggccagagcagcagagaaggtgcccagtagatagaggaacaaaatagggcggatattggttttctgtccgtgctggtggttagcaatagatgccattaccagcatcaacaccaggatgggggcaacggctttcagtgcgccgacgaacaaagtacctaacagaccaacagcttccgccgcgggttttgagatccatgccagaagaatccccagaacaaggccgaccaggatttgttttaccaggctgccatgagccagacgccggaatagccccggtgaacgttgcgtagtcatttttcgatcctttcattgtgttgtcgcacatccctggtgcgttctgtcgacgcatctttcaggatgtaacaaagtgtttgcaaggtcgagtataaggaaagttacagcttcgggaagcgaaaaatgctggattttaaagagaggtcatattttgcaacttaatggttacatttatttgacataaaaataaagccaacgtgcggcttccagactgatgacaacatcaaaaaaggactcggtcagtcccctcgccccgtttggggagagggttagggtgaggggaacaggccagcatcggtgcgaaaaattaccctcaccccgaccctctccctggaagggagagggagaaaacggtgctcatgttaatgacagggtacacggcttaggcagattaaaaattatccaccccgctgcttatcatgccgataattcacccaggcgttgataataaacgtcatcaccagaatgccaaacaccacgcccagcgagacggcgattggaatatggtagaagtcgacaatcagcatcttgataccgataaacaccaggatcaccgccaggccatatttgagcatcgagaaacgctctgctacgcccgccagcaggaaatacatcgcacgcaggccgaggatcgcaaacaggtttgaggtcagcacaatgaacgggtcagtggtcacggcgaagatagccggaatgctatccacggcgaaaatcacgtcgctcaattccaccagaatcagtaccagcatcagcggtgtggcgtacagcaatccattcttacgcacaaagaaatgctcgttgtcgatggtgtcggtcatgcgcaaatgaccgcgtagccagcgcaccagcggcttgtcgccaatgcctgattcatcttcatgggcgagcgccatcttcacgccggtaaacagcaggaaggtaccgaagatatacaggatccagtcgaactgcgaaattagccagctgccagtgaagatcatgatggtacgcagaacaatcgccccgagcacgccatacaccagcacgcggcgttgtaatgccgccggaacagagaaatagctgaacaacatcagccagacaaagacgttatcgaccgccagcgatttctcaatcagataacctgtgagaaaggccagtgcctgtggatcggcaacggcgcgaccttcggtttgcaccagataccaccagaaagcggcgttaaacagtaacgacagcgtcacccagaccagcgaccaggccgcagcctgtttcatggtcatggcatgtgccccacgacgcccctgcaacaacaggtcgatagccagcataatggcgacaacaacagcgaatccgccccatagcaacggcgtgccgacagtattcatagaagttccttacacataaaaaaacggccaacgtcggaagacgtcagccgctgctttttatgcatagacctcgccttccggcaaggtctcacttacaacaaaaaaggaatacgtctgcgtattcctttcgggttgcccggtgaccggatgtggtttttcacacatcgtaatgacgatcgaccggcaatgaagttactcccctttgcaggtaacaaagtatgacagaccattcagccagtcaatggtctgttacataccttttacactgttttactttggcaattatagttttacgctatctgccggaaaaatcaccccagtctggcggcggatctcggtcagcagtttggcggtgatgcgactgaccgccagccccggatgatccaccagatgctcatccaccagggtagcgaacagctctgcttcgtagagcatggtattaatatgctgcggctgggtgagatcctgcatttggctgccacgcggcacgaagcacactttctggcattcagacagtttttcaatcaccagcgatcctgcttcgccctgaatctcgctcgccaggacagaatcactgacttttgagtgctgcaaggtgacgctgaaatcaccgtaatccatcaccaccacgccgtgggcatctacaccgcttgccagcaaactggcggttgcctgcacgcttttcggctcaccaaataacgccaccgccgacgccaggcagtaaaagccgatatccataattgaaccgttagagaatgacggattaaaggtgttgggattttcaccgtccaggtaacgttgatagcgcgaggaatactggcaatagttgaaaaagactttacgcaatttgccgactttcggcagcgcctggcgcagcaaatgaaagttcggcaggcaggcggttttaaatgcctcaaacagcaccacctgattttcccgcgcacaggcaatggcggcatccacttccgccagattcgacgccagtggtttctcgcaaatcacatgaattttatggctaaggaaaagttgtgtctgggaaaagtgcagggcattcgggctggcaatatacaccgcgtcaatggcatcgctttccgccatcgcttccagcgaggtaaacagatgctcgacagaaaaatcattggcgaagtgctgagcctgctcaaggctgcgggaatatacggcggttaacttgtatttaccgctctcatgggcggcctcgacgaactggcgagtgatccagttcgtaccaatcacagcgaaacgtatcataacgcgtggatacttcataaagggattctgtcgtcaatgtagcacgcctttttcatcttcgacgtgcgcagatacgcattattcttttgccggacagccatgctcactaaacggcccaatcatgaccgatggcccgagatatttcggctggcgatggaggattttggcgtcaatcacggcgctgacacgagcgagtttctcccgcagttgagtataaaaaccgtgcttcatattgaggtcaggcgcgttaaaaccgatagcgtcgatgccgtactgttttgccagccagatggcgcgttgattatgaaattcttgcgagataatggtgatatggttttcaccaaaaacctttttggcacgcactaccgaatccagcgttgagaatccggcatagtcgcagaagatcactttcgccggtacgcctttagcgatcaaagcctgctgcatacctgaggcttcatcgtaatttttacgtccgttatcgccacttaccagtagccatttcacttttccggcgtggtacaacgctgctgcggtatcaatacgtcgggtaaagtagcgattacccggcctggcccccagcaataagcccacgttacgcgccggaactgcgttgacatcgctccaggtcagctgcttgctggcgttgaccataacgcgatcggcaataaaaatggtcgctcctgctataagcaacaacaaacagccaatcttaagagtccggcgagaaaaacaaatacggagaagaaggcggggctgcatggtcgttatccttaacgaaaggggggaggtcgattttaggcgctaaagaaagaaaagataacgcctgacatcattttcagattttgtcctgcccaagcgacaactgcgttagccacagccgggtgtcgaactcaagctggtggtactgcggctccatatggcagcacaattgatagaacgctttgttatgctctttctccttcaggtgcgccagctcgtgcaccacgatcatgcgcaaaaacggttccggcgcgttgcgaaacacggtagcgacgcggatctccgcttttgctttcagcttgccgccctgcacacgcgaaacggcagtatgtaacccgagcgcgttttttagcacatggatcttattgtcatacatcactttattgatcggcggggcattacgcagaaactgattttttagatcctgggtatattgccacagcgccttatcggtggcgtagtcgtgtgttcccggatagcgttttgccagcacatcgcccagacgctgttcgttaatcagcgttcgcacctgggaaagtagctgctcgggataaccctgaagataagtaagattgctcataaccgcccacgaaaaagagaaaaagggtatactcacgcacccttttcaggggcaacgtcgaaattttatcattcaggagggccgatgagccacttagacaacggtttccgttcactgacactacaacgttttccggcgacggatgacgttaacccgctacaggcgtgggaagcggcggatgaatatttgctgcaacagttggacgacacagaaatccgcggcccggtgttgatcctgaatgatacctttggtgcgttaagttgtgcgctggcggaacataagccgtacagcattggcgactcatacatcagcgaactggcgacgcgcgagaatttacgcctcaacgggattgatgaatcgagcgtgaagtttctcgacagcaccaccgactacccgcaacagccgggtgtggtgctgatcaaagtgccgaaaacactggcattgctggaacaacaactgcgtgcgctgcgcaaagtggtcacgccggatacacgtattattgccggtgccaaagcccgtgacattcacacctccacgctggaactgttcgaaaaagtgctcggccagaccaccaccacgctggcatggaaaaaagcgcgcctgattaattgcactttcaatgaaccgacgctggctgatgcgccgcagaccgttagctggaagctggaaggtactgactggactatccacaatcacgcgaatgttttttcccgcaccgggctggatattggcgcgcgcttctttatgcaacatctgccagaaaatctcgaaggggagattgtggacttgggctgtggtaacggcgtgattggcctgacgctgcttgataaaaacccgcaggcgaaagtggtgtttgttgatgaatcgccgatggcggtcgcttccagccgaatgaatgttgaaaccaacatgcccgaggcgttggatcgctgcgagtttatgatcaacaacgcgctctccggcgtggagcctttccgctttaatgctgtgctctgcaacccgccgtttcatcagcaacatgcgctgaccgataacgtcgcctgggagatgttccaccacgcccgccgctgcctgaaaatcaacggcgaactgtatatcgttgccaaccgccatctggattacttccataaactgaagaagattttcggcaactgcaccactattgcgacgaataataaatttgtggtgctgaaagcagtgaagctggggcgtcgtcggtaagattggcagcaacctgccggatgcagcgtaaacgccttatccagcctacgttcagcacgttacccccaggccggataagacgcggcaagcgtcgcatccggcaatggctgctcatttctggaatcgcgtttccataaaacaaaaaatccctgtcaccatcctctacattctcttgtttagagtttttctacgtttatgctacatacgtgaagttatgacgcacaaagaatatgatttctttaccgccgttcatcgcactaaggggaaaaaatgattgcgctttccaacatcttgcaggcaggagaacagctaaccgctgtggcaccttttctggcgggtattcagaacgaggaacaatacacccaggcgctggaactggtagatcatctgctgctcaacgatcctgaaaaccccttgctggatctggtgtgtgccaaaataaccgcgtgggaagaatcagcgcccgaatttgcggaatttaatgccatggctcaagccatgcctggcggtatagccgtgattcgtacccttatggatcaatatggtttaaccctttccgatctgccggaaattggcagtaaatctatggtgtcacgcgttttgagcgggaagaggaaattaacgctggaacacgctaaaaaattggcaacgcgattcggcatttctcccgccttgtttattgattaacgcgacgtgccggatgcgttgcatccggcgcttcaaataacgatttaaatctccagcgccagccgtgttccctgggcaattgcccgtcgtgcgtccagctccatagctacatcgcagccgccaattaaatgcaccgttttcccgctatcaatcagcggttgcgccaatgcgcggtttggctcttgccctgcgcagatcaccacattgtccactgctaatacctgcgtttcgccgttgatcaccacatgcagcccgtcatcgtcaatcttctgataacttacgcctgggatcattttcacaccccgcgagagcagggtggtgcgatggatccagccggtggttttgcctaacccctgtcccggtttgctggctttgcgctggagcatcacaatttgccgtgggctacgcgggatctgcattccctgcgggcttaagccaccaacctgttgtaggctgctgtcgatcccccactcattacagaacccggcgatattctggctggtggattcgcccggctgacttaaatacatcgccgtatcaaaaccaatcccgccacaaccgatgatggcaaccttgttgcctaccggcgctttgtcgcgcagtacatcgagataactcaataccttcggatgatcgatcccgtcgataggcggaacgcgcggcacgatcccactggcgaggatcgtttcatcgaacgcctgtaactgatccgccgtcacggtgtgattgagtttcagcgtcacgcccgtcacttcgatcatccggtggtaatagcgcagcgtttcgtaaaactcctctttgccggggatctgtttggcgatattaaactgcccgccgatctcgctgtgggcatcaaacaatgttacctgatgcccacgcgccgccgcgttaatggcaaacgccagcccagcaggtcccgcaccgaccaccgccagattttttttctgcacggcaggaaggattggcattttggtttcgtggcaggcgcgaggattcaccaggcacgaggtgactttgccaacgaagatctgatcgaggcaggcctgattgcagccaatgcaggtgttgatctcatcggctcgccccgattgcgcttttgacagcagttccgcatcagcaagaaacggtcgtgccatcgacaccatatcggcatcgccgcgcgagagaatgtcgtcggcaacctgcggatcgttaatccggttggtggtcaccagcggcagcgagacgtggcctttcagtttgcgcgtgacccaagtaaatgcgccgcgcggcacgggcgtggcaatggtcggaatacgtgcttcatgccagccaatgccggtgttgataatggtcgcgcccgccgcttcaatggcctgcgccagttctaccgtttcggcaaaagtgccgccgccttcgaccaggtcgagcatcgacaaccggtagataataatgaagtcgttgccgacgcgttcgcgcaccgtacgcactacttctacggcaaatcgcatccggttgcggtaatcgccgccccactggtcactacgctgattggtgcgcagcgtcagaaattcgttgatcaaatacccttcggaccccattacctctacaccgtcgtatcctgcctcccgtgccagttgcgcgcagtgggcgaaatcgtcgatcagttgcaggatctcttcatgcgtgagttcgtgaggaacgaaacggttgatgggggcctgcaatgcggagggagcgaccagatgcggttggtagctgtagcgcccggtatgcaaaatttgcagggctattttgccgccttcctgatgtaccgcttcggtaatggtgcgatggtgtgggatctggctggcgtcgttgagcattgcgccaccttccatgccaacgcctgttaaatctggtgcaatgccgccgctgacaatcagcgccacgccgtgacgggcgcgttcggcataaaacgctgccagccgctcggcaccgtccgggtattcctccagcccggtgtgcattgagcccatcaacacgcggttttttaacgtggtaaaacctaaatccagcggggcgaacagcgacgggtagctcataaaattgtccagtatgtaaaataattgttatgtggtcggatgagttctaatttagccgtcgccggagaaaagggaaaaggggagtgcggggtttgtgatgggattcaaaaagaatacgcccggtggtaacgccggatgcgacgcttgccgcgttttatccggcctgggggattgcacatgtagggcggataaggcgttcacgccgcatccgccagtggcacggtgcagatgccggatgcgacgcttgtcgcgttttatccggccaggaggattgcacatgtagggcggataaggcgtttacgccgcatccgccagcagttgcaaattattgcttacggaaaaaatcgttatacaacatatacaaatgcgcggcactccaggagaaatttggtgcgccttgctgtgcgccagtcagcgggttgtaattctcctgaattgggccatcggcggttaatcctttggcgtgacggaagaacgtatccgccagtttcagggcatcatcgcgataaccgtaacgctccatccctttcagaccaaaccagaactgatccacccatacgcgcccacgccagtagatatcagcgccaaaagccggattggttaacgccgccgttcccagcgggacaaaggtgttgaactctttaggatcgagcatcaccttcaccaccgcgtcggcattggcctgcgttgccgcaccgttaaacagcggcgaccagccttccggccctttaccgcgctcaacaatcggtttgcccgcgcagccgttcgccagtggtttatcttcaatacgtacgtcatagtagaactgggtagtcgggtcgaacatacaggtgttgatgtagtccgcgagctgctgtgccaactggcgatagcgtttggcctcttctggcttaccgaggatggttgccatctccgccagataatggttatcgctgtacatatagctggcctgatccaccgactcctgcaatagcgagtagcccagcaacgttccgtcctgactgcggttttcggcgaatttcaccgtccagtcgctacgtttgccgccattagcgacatatttatccaactgttctttgtcgataaaaccaaagacggcggcatcatcacgccccgattcccacgacgcagcgacctgtgccggaatttccagactgtcgtactggcctttctccaccacgcgggcgtagttgttcagcccagactgcgtctcttctttgttgcctttcttcaccgtaaacagcatctcgccgctctcagtgttgtgggctttgtcgcgggtcgcgccatattccggcacgccgttgccgttgtgatcgcggttacgtaaccaccagtcgtgataggccaccagtttcgggtacatctctgccaaccaggctttatcctgggtgacgttgtacacttccatcaccgaccaggcggcaaggctgggtttggtattacgttcgttccagttgccgccatcgccaccacgctcggggctaaggttccacgctatcaggtcggggacaaagcccacatcctgcggacgcacgcggtcgcctggctggatctgccaggagaagaccgcgcggatattctctttggcgatgtccggattgaaatgcgccatcgcaaacgcctgcttccaggtatcccacggccaggtctgattgccggagaaccagcgcccggtcaccgacggtgtaacggtgttaaatttcaccgcaccgcccggtgagcgccagttaccgttgagcgtttcgatcgctttcaccgcgacgcgcgtctgttccggcgtcgcatccggattggttaaccctttcttcaggtattcttcccagcgttgctgcgaggcggtgagataaaacgccggacgcgccagaatatcgcggatctgcatttgctctttgctaacttcctgagcggtcagcagatgggaataggtggtgtagagcgtggtcgaaccgttgatatgcgccttactggtaaagcgattaccgttgatttcagtctgcaccggcagggatttatgcacctgatattccgattcgccggaggtcagcagatcccaggtggcgcgcactttgccaaaggtgactttcaggccatcacgggtggcgctgattttgcgctgatagtcagggtattcgccagcaatggttttatcggaaagcggtttcccttctttcgcttccagtttttccagcagttcgccgtcccacaccagatccagcggtttattgctggtgattttggtttccagtagtgacgtgcgcggcgtggcgaagcgcagagtcatttcgacttgcacatcttttgctgtcagtttttgcaccagcgcaccgggaatactgtatgcctccagcgtaaagtcgactttcttgccgtcctgccagacggtcaggcggtcgaaattgctggccataaagttgatgtactcttccgtcagcagcgcaacgcccggaaagccgcccatggtgttagggccgtctggcaacagatgaccatgccaggctccgagatcgaaaaacggattaaaacgctggtgatcgtcgtaatcgtaatccttcatgtactgcggcgcgccagtacggttaatcacgtttttataattgtcggcgttagcggcatgggcggaaaaacttatcagcagagcgcaggttactggcgttaaaatagtttttattttcatgaaattacagtccttattaccagtagaaatattgcatcaggaagatttggtcgctgggatcgtgagaggcatttttcatgtagaagcggctatcaaaagccgtggcgaaacgtccgccgccgtattcgtaccagataccaaactgcatgaaagaggtggtttcatcgtcagcgtggtcagggcgatgtttggcgtaggtgtaagcggtggagagataaacgccctttaacgcttcatacatggcgctcaccatcatcccactttcacttcccggtacgtccagcccgtcggcgcgtccggtatggtgccaggcgcgagcggcaaagttaggagttagcaggcccgtgagatagagctgtcctgtgccgtcggtgatttccagaccgttcatccaggtgatgccttcggcaaggtcatactggatgtaaccgttcatcattgccggataggtgtatttgtcgtcatagcgatcgtacttgccaaaatgtagccaggctttgctttcgtcatgatgtccggcaggtgtggcggtgacgctataacgaaagttgccgcttaagttctgcaccttcagcgcggtcataatgtcgcgggtattgggaatgacgtagcccagatcgggggtgaagtcgccccaccattgcaggtcatccagcgaggaatcctgacgcagactgagcatgatttcggtgccatcattggtacgataaccgccatagaaacggttaattccgccctcgaaaccaccccagctatggtctggcacccaggcattgccgtcgtggtcggcctgcacggtccagccttcgccgtaaatcaggccgaaccaggagccgtacttcatctccaggccaccttcaatataggtaccgtcgctgtatttatgtttattctcaccctctaaatccatatatccaccaacccctaattcgccgtaaaaacgaaatgaaggagaagatgtcgaggtaattgcaggtgtttttgtgtcgtcatgttctgccggacgtgcttcttctcctgccgcagaaaaggcgtagcaaaacggcagagcaagtaatgctctgcatggtgcagtgattaatttcattgtgttaatccatgagctaaggaaggtgcgaacaagtccctgatatgagatcatgtttgtcatctggagccatagaacagggttcatcatgagtcatcaacttaccttcgccgacagtgaattcagcagtaagcgccgtcagaccag

SEQ ID NO: 57 - DNA, 45506 bp, Escherichia coli
  source 1..45506: mol_type = genomic DNA
aagaacggcattgcataaccttgcagtggcgatcgagcattacaatgaaaaccatccgcatagtgcgttgggttatcgctctccgcgagaatatcgacgtcagcgggtaatgttaacttaagatacaccccctgtctggaaataagggggcaagaacaggttgttgtaaggaatcaccaccaacgctggtcggtttacccatagcagtggtgtagcgaatctgccctttacgcgtcagataaggaatactattagatgcaacttgccattgcgtgacttgcccgtcctcttcttcaaccttgacgtccagttgcccctgtaatgtattgaataaattagtaatagcaaatgggccaggaggaacattttcttgataaataatacggttgttctgtgagacagtgacctttgcattcgtttgtgcaacacccgtgatttgcggtgcgtaaccacgtagatcaggcggcaacatattctcatcgcttttcaacgaaacgccagaaaaatggaaagagtcgaaaatagaggattcagtatcgtattgacctatagttagttttgcattaattgctgggattgggcgaaacaaataaatacgcggaaaatccaggttgttcgcctggcttttgccattgttaaatgattgatcgtactggtaatcagtacgcaggcgccaggccccaagattaaccccagcctgcccataggaacttatattttgtgaattatcgccctgatgtggtgcataatgagaggcatataaattgtagtcaagaaatgccccagcaataccatgatcccaaagttcaggaggcgtccagtttgcatctttgtattttaaccatgcctgaggtgcagatatggataattgcattttccctttatcgagataagttgtaatttgtttttctttttcgatagggtaacaaccatcgatcaggttttgctgagccacttcaataatctcatcagtaaagcctaataatgttaattgctctggagtcagacaaactgcagtttggttatcaattaatacccattgcaggtccagatggattggcgtccttttattattaataagagcgtttaatgagtatttacctacgggtaattggccatcagtttcaaattgggaaaggttaacgttttcacgatcttcggcttcgattaaatctttgttgaattcaacggcataagctgacgcacaaccaatgatgagaacggataatgaacaataaatatttttaatcaattcgcttattgtggttaattttaattttttatacatctgttccacttatcattaatccgttaatgatgtggccgggcgaacccggcctaatgtgattactcgtaagcaatcttatagtcagcctgagcgtaaacgttgcccggggtagcatctttgcttggggattccatacgagctttgaagttcagttcctgatagctgttagtattgttgaatgtaattactaccggagtacctaaagtcacttcgccgctctggctatccagaatacgtacgccaacgcctgtggcaccaccgatttcagtttctttggtgtttttcagcaggtcagtctgacccgtcatagtattcgctgtggtgaaagtaaccttcgcttttgaataagtggttccaccctggctcaacatgcagtcttgcaggtgaatagtgaaaggctcagccaaagatttctggtcgcttttcagaacggtatctgctacttcacccagatttacagttaagtcttcgtcacctggtttaattgaacatggagcagagataacttcacctttaaatttaacaatgccgtgaccttcgtcagcaaatacgttattggaaagaatcattgctacgccagcaacaagaagtgactttttaaaagcagacataatattcctttatataaatataagtagaaaatgaatgattagtaactgttatttaaggattgctaatcattcaaatattatattttacttttcgggttttatgaaattagtttatctaaatatggattaagtaaaacttaaaaaatacataacaattatattttcaattgcactcattcatttttgtgatgatattctgaatggaattaagcgataaggtaatagaaagcactgtaaattagaggattaattcataatttacagtgcattaaagacaaatgtttacagcgttggggggagagtctctggatctggctgctttttaatctcagtactgcgattttccagttcgctcattctttgttcaagcagcgccagtttctcacgagtccgtaacaggacttgcgtttggacgtcgaactcttcacggcttacaaggtcgaggcgcgtcagctgagcttgtagggtttggcggatttttttctccacatcttccccgaactccctgattcctttaggcattgattcgtgaacctggcgagcgatttgctcaatttttttcgggtcaatcattgtagtttccctgtactgataggtgttgagtgccattgtagtgcgataagggtaagtcataaaccagaattatgtgaagctatgcgttgctgccgctaatcattagcgttatagtgaatccgcttattctcagggcggggcgaaattccccaccggcggtaaatcaactcagttgaaagcccgcgagcgctttgggtgcgaactcaaaggacagcagatccggtgtaattccggggccgacggttagagtccggatgggagagagtaacgattctgtcgggcatggacccgctcacgttattttggctatatgccgccactcctaagactgccctgattctggtaaccataattttagtgaggtttttttaccatgaatcagacgctactttcctcttttggtacgcctttcgaacgtgttgaaaatgcactggctgcgctgcgtgaaggacgcggtgtaatggtgcttgatgatgaagaccgtgaaaacgaaggcgatatgatcttcccggcagaaaccatgaccgttgagcagatggcgctgaccattcgccacggtagcggtattgtttgcctgtgcatcactgaagatcgccgtaaacaacttgatctgccaatgatggtagaaaataacaccagcgcctatggcaccggttttaccgtgaccattgaagcggctgaaggtgtgactaccggtgtttctgccgctgatcgaattacgaccgttcgcgcagcgattgccgatggcgcaaaaccttctgatctgaatcgcccgggccacgttttcccacttcgcgcgcaggcaggtggtgtactgacgcgtggcggtcatactgaagcgactattgatttgatgacgctggcaggctttaaaccggctggtgtgctgtgtgagttgactaatgacgatggcacgatggcgcgtgcaccagagtgcattgagtttgccaataaacacaatatggcgctcgtgactattgaagacctggtggcataccgtcaggcacatgagcgtaaagccagctgaaaaccgctgcttaattactgccttaatcaagaaaccgaagttgtagctggcttcggtttttattttgccctgctatgcaagatgttaattccgcttctctttctatgagaaaatttcattaatatcaggcattctttttcattatgatcaaaatcatataattgttccgttattatgcgaccatatgaatatatccgaaaaaggatatgtgaaatttatgcgctaaatgtttagtattgttaaatattaagggtaaaaggatgtttatcgcctggtactggattgtattgattgctcttgttgtggtgggttatttcctgcatttgaaacgttattgtcgggcgtttcgccaggacagagacgcactgcttgaagcgcggaacaaatacttaaacagtacgagagaagagacagccgaaaaggtagaataaggctttcgtgaagctggcagaagttgtccatgcgctggccaacttctgatgttgcttttaaccaattcccgccgtttgtagcagcactaaactgaatcccatcactgacattccacatagtacgccatagctggggttattattagggtcaatctctttggcgagcggcattaattcatcaaccgagagcgccaccataattcctgcaaccgccgccatgattgccgccatgaccacgggggaaatcatgctaccgaggattaaccacgccagcacaccaccaagaatttctgccaatccagaaatccccgcccacagaattgccgtgcgtttagaccccgttgctgcataaaccgggcctgcaaccgccagaccttcaggaatattgtgcaacgcgacggccagtgcgatgccaaatcccagctccaggttgctgctcgccgtgacaaaggtggcaatcccttccgggaagttatgcagactgatgccgagagtgagcagaatggctgtgcgcttgatcgattttggcaacggctgcaccgatttttgcattaaatcctgcggatgcgcatgtggcaacatgcggtccaggccaaaatagccaagcagaccgaagataaacattccataacccaacacaggcgacattccttcagctgctagtgcggcaggaagcatttccattaatgagatgagcaacatgatccccgccgcaaatcctagcgaaaacgccagtaagcggttcgagggtttttgcccgagaacgccgagaaacgcgccaataaacgtggctgcccccgccagtatggtcagaatgagaggtactgacatcgacaactccttataaatcttcaccttcaggcagatcgtcaaaataactgatgatcatcatcattgttatccgggttcttactccgccgaacaagcgtattgtgaggatatcaaaatgacacctttagttaaggatatcatcatgtcttcaacacgtatgccagcattgtttttaggtcacggtagtccgatgaacgtgctggaagataatttgtatacccgcagctggcagaagttggggatgacattgccacgcccgcaagcgattgtggtggtttcggctcactggtttacccgtggaacaggagtgaccgcgatggagacgccgcccacgattcatgactttggtggcttcccgcaggcgctgtacgatacgcattatccagctccgggttcgcctgtgctggcacagcatctggttgagctgttagcaccggtcccggtgacgctggataaagaagcctggggctttgaccacggttcctggggcgtgctgattaagatgtatcctgacgccgatatcccgatggtgcagttgagtatcgacagtagcaaacctgccgcctggcatttcgaaatggggcgcaaactggcagcgctgcgagatgaaggaataatgttggtcgccagtggcaacgtggtgcataacctgcgtacagtgaagtggcacggtgatagttcaccatatccttgggcgatgtcgtttaatgagtatgtgaaagcgaatctgacgtggcaaggggcggtagagcagcatcctctggtgaattacctcgaccatgaaggtggcgcgttatcgaacccaacgccggagcactatctgccgttgttgtatgtcttaggtgcgtgggatgggcaggagccaattaccattccggtcgatggtatagaaatgggcagcctgagtatgctgtcggtgcagataggttaacaattaccggatggcgaatgccatccggcatcattgattactcaacaaaaatatgtggataaaaccgagacatatcctgggtgatcaatgcacggtcttcacgaatgccaattccggcgggttgatcgttcaccagccagctaccaatcagcatatagctgtcgccgaatttcggtaacgggtggaattgctgaacaatcatcccttcttcgccatacggaccttccgctgcttcaatggttttgccgttttcaatgatcgacacgtttgcgccttcacgggagaagatcggtttaaccacatatttttccatttgcggatgatcatcttccgcaaaataagcgggcagcaggttcgggtgattcgggaacatctcccacagtagcggtagaagtgccttgttggagataatgctcttccacgccggttccagccagcgtacgcctgcatcctccagcttggtggaaaacatctcacgcaacataaattcccacggatacagcttgaacaggttggaaattacctgatcctgtaaatccgtgaactgacctttttcacctaacccgatatcatcgatgtagaggaactcagtagcaatttcagcttccgttgcgcagtcctgcaaatactgaatggttccgcgatcttccaccgtgtcgcgacagcaggtgagatgcagcaactggaagccatactgttcacgcagctcaacgaagcgatcgatcagtttttcttgcagactgttaaactggtcgctgccctccggcaagttaccggcgttaagctgatcttccagccagatccactgaaagaacgccgcctcgtatagtgacgttggcgtatcggcgttattttccagaagtttaggttcgccagtgccatcccacgccagatcaagacgcgaataaagcgatggctggtgcgtcagccatgactggcgcacaaaactccaggtgtgttttggaatgcggaatttggtcatcagctcatcgctggcgatcactttttccaccactttcaggcacatctggtgcagttcggcggtgacttcttccagcttttcaacctgggcgagggtcaacttgtagtaagcatcttcacaccagtacggctcgccgtacatggtgtgaaaattgaaaccgtattcgtgggctttctcacgccagtccgggcgctcggtaatactgactctttccatcggtatcagccacccattgaacgagaagaggtgccagttgcgctacgctgcatagtgctttgtttggcaacagattcaccaaaaccgccacgggtaacggtagtggtggtcgccggttttggtgccatggctgtcttcggtacggtcatggtgcggcctggctgggctgcgccatagtttttacccgtcgcgtcggtatatttaccgtaagccgggctggctgggtttttcgaggagaacagcggctgctgtgcaaatcccgcgccgccgcccatcagacgccccatcatgtaaccggccatcagcggcatccagaaactcccgctggattgctgggcctgcgcctggttttctggtgccatgccagcctgggctggtgcctgctggcactgaccttcaccaaattcagcaacacagtcttcacgggtggcgtatttcggcgcagtacgttcggcttctttcagcgcattgttgtacgcggtggtacattcggcgcttttgcctgggtttgcagctgaacagtcgtcagcattttgatagagagacactgtttcatcactcttttcacagccagccagcataaaaacagtggcaaccgcgagagcgactggtgtcagatggcgcgcgctccagtttttgcggaacgatgcgtggcgtatggattttgtccgtttcatttttgtcttccgggaccagtggtaaatacccatcagaatagaggatggctggtcgaaattgaagcgagaagggggaagaatgcggcagataacccgtatctttacgttgccttacgttcagacggggccgaagccccgtcgtcgtcatcagttacggaaagggttatgaccgttactggtggtagtgcgtgcggatgtttgctgaacgacgggtgccgggctatcaggcgcataaccatcagcaatagcattctgttccggcgtttgcggggcaacgttttccggattagtggaaaccggtttgctcagcgcattgttcagtgccagcagatcctgctcgttcaacgtacccagggctgacttaatattcagctgattaatcaggtagttataacgcgcatttgccagctcttgcttagcgttgtacagcgtggtggttgcatccaacacatcaacaatggtacgcgtaccgaccgagtagcccgcttccatcgcgtctaatgagctttgagcggaaactacggcttgtttgtaggcgttaatgctactgatagatgcattaatgttgttgaaggaggaacgtacggtttgcacgacgctacgatgcgcgctttccagttgctcgctggcaccaacaaagttgtactgggcctgtttcacctgcgagttaaccattccgccctgataaatcggcagcgagaagctcaggcccactttgttctggcccatattgctgtcgtcatactgggtaccagcggcaccacgagttttcgaaccgctataagaggtgtcagaaatcccggtagaagccgttaaatccagcgtcggtaagtgaccatcctgcgcctggcgaatttgctcgcgcgccaggtcctggctcaagcgtgcctgtaacagcgacaggttgcgtttttcggcttctttcagcagcgcgtttaccggctgtggtttgtcggttttaaagttttcgacattcagcgctgccagttctggatagtagttaccggtgatctggcgcagctgctctaccgcgttatcaaggttattacgtgcggtcacttcgttcgccagcacggtatcgtactgcgcgcgggcgttctgcacgtcggttatcgctaccaggcccacgttaaaacgttgggtggtttgatctaattgacggtagatcgcttctttttgtgcctgtgtataggaaagaacgtcaatagcattcaacacgttgaaataagcggtcgcggtgttgaggatcaaggtttgctgatcggtctgatatgtgacgtcctgaatccctgcagctttttcctgcagcgttaacgcacgccatttcgacatatcaaaaatggattgagttaactgcagggacgcactggtcgcgttagagttgatgccgttcgcgtcgcggtagccgttgctataggtgtaatctgcacctaaacctagctgtggcagtaatggactgcgcgcttcattaattttttcaaaggcagcatcacgatcggcggcagacttacgcaattccgggttactaaggcgtgcttgctgataaacttgcatcaggttctcggcctggctcaacgaactgaacccagaaaggctcaggccgataagaatggggagcaatttcttcatttgcattccttgtggtgaagcagtatttagcgcgatcaaactgtaaaattattgcggattctagcagaagccgctaccgcaaaaggttggcgttacgtgccatagggcgttaatgtgcctcaatttaacacatgactgctcaaacggcagtcaaacgtcgctgaaattcacatttaattcactattagtgccaggacattaacaatgcttaagccagacaacctgcccgttacatttggcaaaaacgatgtagaaattattgcacgagaaacactttatcgcggctttttttcattagatctttatagatttcgtcatcgtctattcaacgggcaaatgagtcatgaggtgcggcgggaaatttttgagcgcggtcacgccgcagtcttgctaccctttgacccagtgcgtgatgaagttgtgctgattgagcagattcggattgccgcgtacgacaccagcgaaaccccatggctactggagatggttgccgggatgattgaagagggtgaaagtgtggaagatgttgcccgtcgcgaagcgattgaagaggcgggactgatagtcaaacggaccaaaccggtgttaagtttcctggcaagcccggggggcaccagtgagcgttcgtcaattatggtgggcgaagtggacgccacgaccgcaagcggtattcacggtctggctgatgaaaacgaagatattcgcgttcatgtggtaagccgggaacaggcataccagtgggtagaagaggggaaaatcgacaacgcagcgtcggtcatcgctttgcaatggctgcagctgcatcatcaagcgttaaaaaatgagtgggcataaatgaagcgttacacacctgactttcctgaaatgatgcgcctgtgcgagatgaacttttcacaattgcgccgtttgttaccgcgcaatgacgcacccggcgaaactgtaagctatcaggtggcaaacgcacaatatcggctgacgattgtggaatcgacccgatacactaccctggtgacaatagaacagactgcgcccgcgatcagttactggagccttccgtcaatgacggtgcgtctgtatcatgacgcgatggtggctgaagtgtgttcaagccagcagatttttcgcttcaaagcgcggtatgattatcctaataaaaagttgcatcaacgcgacgaaaagcatcaaattaaccagtttttagcggactggttgcgatactgtttagcacatggagcgatggcgattccggtttactagcgtcgtgaaacctaaggacaccatttggaaagcctgttaacccttcctctggctggtgaggccagagtcaggattttacaaattaccgatactcacctgtttgcacaaaagcacgaagccctgttaggggtaaacacctgggaaagctaccaggcggtgctggaggcgattcgtccacatcagcacgaattcgacctgattgtcgcgacaggtgatttagcgcaggatcaatcctctgcggcctatcagcatttcgctgaaggcatcgcaagttttcgtgcgccctgcgtctggctgccgggcaaccacgatttccagcccgcgatgtacagcgcgttacaggatgcgggtatctccccggcgaagcgcgtgtttattggtgagcaatggcaaatcctgttgctggatagccaggtgtttggcgtgccgcacggtgagctgagcgagtttcagcttgagtggctggaacgtaaactggccgatgcgccagaacgccatacgttgctgctgctgcatcatcatccgctacctgcgggttgtagttggctcgatcaacacagtctgcgtaacgcgggcgaactggataccgtgctggcgaagtttccgcacgtcaaatacttgctgtgcggtcatattcatcaggagctggatctcgactggaacggtcgccgcctgctggcaacgccgtcgacctgtgtgcagtttaagccgcactgttccaactttacgctggatactatcgcgcccggctggcgtactctcgagttacatgctgatggcacgctgaccaccgaggtgcatcgcctggcggacacacgtttccaacctgataccgcttcagaaggctactgatgtctacgcttctttatttacacggtttcaacagctcgccgcgctctgcaaaagcgagcttgttaaaaaactggctggcggaacatcaccctgacgttgagatgatcattccgcagttgccgccgtatccttccgacgcggcagagctgctggaatccattgtcctggaacatggcggcgattcgctgggtattgtcggttcgtcactggggggatattacgccacctggttgtcacaatgttttatgctgcccgcagtggtggtaaacccggcggtgcgcccgtttgaactgctgacggactatctcggtcagaacgagaacccctacaccgggcagcaatatgtgctagagtcacgccatatttacgatctcaaagtcatgcagattgacccgctggaagcgccggatttgatctggctgctgcaacagacgggagatgaagtgctggattaccgccaggcggtggcgtactacgcttcctgccgccagactgtcatagaaggcggcaaccacgcattcacgggcttcgaagattatttcaacccgatcgtcgattttcttggtctgcaccatctctgacgatcaactcgaattgctaacttaaaccatgacgcaaacttataacgctgatgccattgaggtactcaccgggcttgagccggttcgccgccgtccggggatgtataccgataccactcgccctaaccatttggggcaagaagttattgataacagtgtcgatgaagcactggcgggtcacgcaaaacgcgtggatgtaatcttacatgctgaccagtcgttagaagttattgacgatgggcgcgggatgccggtggatattcacccggaagagggtgtaccggcggttgaactgattctttgccgtctgcatgcaggcggtaaattctctaacaaaaattaccagttctctggcggcctgcatggcgtggggatttcggtggttaacgccctgtcgaagcgcgtagaagttaacgtgcgccgcgatggtcaggtttataacatcgcctttgaaaatggcgaaaaggtgcaggatttacaggttgtcggcacttgcggtaaacgcaataccggtaccagcgtgcacttctggccggatgaaaccttctttgacagcccgcgtttttctgtttcacgcctgacgcatgtgctgaaggccaaagcagtactgtgccccggcgttgagattacctttaaagatgagatcaacaacaccgaacagcgctggtgctatcaggacggtctgaatgattacctggcggaagcggtaaacggtttaccgacgctgccagaaaaaccgtttatcggtaatttcgctggcgatactgaagctgtggactgggcgctactgtggctgccggaaggcggtgaactgctgaccgaaagctacgtcaaccttatcccaacgatgcagggcggtacccatgttaatggtctgcgtcagggcctgttggacgcgatgcgtgagttctgtgaataccgcaacattctgccgcgcggcgtgaagctgtcggcggaagatatctgggatcgctgcgcctatgttctgtcggtgaaaatgcaggatccgcagtttgccgggcagaccaaagagcgtctctcttcgcgtcaatgcgcggcattcgtttcaggcgtggtgaaagatgcctttatcctgtggctgaaccagaacgttcaggcggcggagctgctggcggagatggcgatttccagcgcccagcgccgtatgcgtgcggctaaaaaagtggtgcgcaaaaagctgaccagcggcccagcactgcctggcaaactggctgactgtaccgcgcaggatcttaaccgtaccgaactgttccttgtggaaggtgactccgcaggcggatctgccaagcaggcgcgcgatcgcgaatatcaggcgatcatgccactgaaaggtaagatccttaacacctgggaagtttcttccgacgaagtgctggcctcgcaggaagtgcatgatatttcggtagcgatcggtatcgatcctgacagcgacgatctgagccagcttcgttatggcaaaatctgtatcctcgcggatgcggactctgatggtctgcacattgccacgctgctctgcgctttgttcgtaaaacacttccgcgcgttggtgaaacacggtcacgtttacgtcgcactgccaccgctctaccgtattgatctcgggaaagaggtttattacgcgctgacggaagaagagaaagagggcgtacttgagcaattaaaacgcaagaaaggcaagccgaacgtccagcgttttaaaggtctgggggaaatgaacccgatgcaattgcgtgaaaccacgcttgatccgaacactcgccgtctggtgcagttgactatcgatgatgaagacgatcagcgtactgacgcgatgatggatatgctgctggcgaagaaacgctcggaagatcgccgcaactggttgcaagagaaaggcgacatggcggagattgaggtttaaaggaaagaacattgcccggtcaggatggccgggcaaacaaggcaggtttaaatcccaggttgcaggatgcggatattcatctccagcacgtcgccttttacggcttcgctgtacgccttcatgtgcggggtttgcagatgcgcttcaagatgcgcgatgctttcccactgctcaatcatcacgatagaatccggtgccatagactggaaactcacgccagcagcgcaatccaccattggcgcatagccgtggcaaccttcttctttcagtacggttggaacgattttagcaaactgatccaataccgcctgacggtgatgttgaccaggacgagtacggatttctgcgattacggtaagcatggttaactccttctaaagcctgagctctagttaaccaaaaatttccacaagatgcttgcgatattcttcagtatagcggggaacatcaggcatttttatcacgtcattagcgataaatgtcggcagcggttccatgccaaggaattggtttgctttatggaacggcagatacacaccgtcgacgccaacgccgtggaagaattgatctttttcggtgaaggcttccattggtgcgttccaggtcagagaaagcatatattttttgccctgtaccaggccgccggaaccgtatttttttgacggatctttgcgggtacggccatcgctggcatacagcgttccatgaccttcggtgaatacatcatcaatatattttttcactgtccacggcgcgcccatccaccagcctggcatctgccagatcaccacatcagcccagagaaagttttgtacttccgctttgacatcgtagtcgctgtcggcgcgaacgatgcggacatcatgcccgaggtcgcgcagtgtgccatccgcgacttcggtcagggtgtcgttcagttgaccattggagtgggcgaattttttcgcgccgttgataatcaggatgttgctcattttttaacctcaaggtgagacgtttgccgactatagtacgtcacagagcggtacggtgaaattagcaaaatgtgcaaagtcttttgcgaatttagcaaaagtctgatcttgctctgactcaccgatgcaggataaatattttctgaaaatgacaatactgatagccattcctcataattcttactcgcaccggaataatttacacgtttggttcggttttttttgggattgaaaatatggctttgaataagtaaaggatgaaaatatcaacgtgtcatgttgataattataaatggatttttatgagcgtactgatatatgttaaagcataaaattcaaacaatatttgaagctctgttatacataatgcttacttattggttaatagatgctttttttgctttcaataagtatgactggatgcttgagtcgggagacaatatttgcagtataccttccgtttcaggcgaagatcgtatattgcaagcaatgattgcagcattttttcttcttacgccacttattattcttatcttaagaaaactctttatgcgggaaatgttcgagttttgggtatatgtattctcgctcggtatttgtctggtttgtggttggtggcttttttggggacggtttatattttgctattagtaaaatctatgagagtcgttttaacggctctcatagacagagaagttaccagcttaccttcgcctcaaatccaccttgttccgcattcccaaactcaacattcatgccatgcaatttggcgattcgctggacaatcgatagcccaagtccactgccggtagcggtttgtccgggggggcgatagaagcgttcgccaattcgcgccagagcctctggcgtcacaccggggccgttatccctcacgatgaaattatcagcattcagcgtgacgtctatcacgctgccctgtggactgtagcgcacggcgttatccagcaaatttcgcaccaacaaacttagcaatagcggttgtccggtgcgtttgatgccgtgggcattgagtgtcagtcgcacgtcaattttcgcctgctgcgccgtgtggtaaatatccatcaccgacgattgcaggagatcttcaagcgggatctccgcgacgtcctgaaggttatccagtgagtccagccgcgatagagtgagcagttgatcaaccagacgagtagcgcgatcgatcccgtaatgtaattgaagcagcgcttttttccgcgcttgcggatcatcgtcagaaagctgcgcaacttcggtttgcactttcagcgccgttaacgggctacgtagttcgtgagctgcgtcggaggtaaagcgtcgttcacgaaccatcatcgcatgtgtgcgggcgaacagttgatttagcgactcaaccaacggacgcacttcgctgggtacgccagtcgcgtttagtggtttttccgagtcagggtcacgcatacgcagcgccagcgccagtttgttcagcggcgcgagttcacgacccaatagtaccatcatgatgattaacataatcggcagtgcgaccagccacgggatcaattgcccggcaacaatcgccagcgccatgtcttcacggtattcccattcctgaccaacaacgatgcgatatttgccatcaggtgaggtcatccagacaaaacgccattgatctttatcgcccaccagttgcccgtcagcaaaaccttcccgttgatagctataaggaatatcttctccgttatcgccatcgttaaggaccattctgccgtcgtgggtaaagatggcaaaggtcagcgcatcgtcatcaacatgaccgtgttttaatttatttggcgtctgtgccatgcgatccgccgcgttgatttcgttgagatcgagcgtacttaaccgcttggcaaacagcatcagttgggtgtcgaacaattcatcgacgttatccgttgtttgtttccaggcgacaaagctggaaagcagccaggtcaccgaggccagaattaaaaagattagcgtcagcctgacgcgcagactaagacgttgggtaaatttcatttctcacctaatgtgtagccaataccatgcacggtacgaataaaatcactaccgagtttgcgtcgcagatgatgcacatgcacttcaacggcattactggtgacctcttcgtcccaggtatacagtttctcttcaatcagtttgcgcggcagtacccgaccagcgttacgcatcagtaattccagcagggcaaattcttttggtttcagtgttaagggttcgccagccagcgtggcgatacgtttgccggggtcgagcatgacgttaccgtggcgcagctcgttgctggcctggccgttggttcggcgcatcagagcttccagcctggcggcgacttctatcaacgcaaaaggtttacacagataatcgtcagctcccagacgcagcccttctacacgttcctccagcgcatcgcgcgcggtcaggatcagtaccggctcacgctgacctttttctcgccattcgcgcaaaatatcgcgaccatccatgcctggtaaggttaaatccaggatcaccgcatcataaggcgcgctataaagcgcctcttttccctgacgaccttgtgtaaaccagtcgacgctaaaacccattttactaaggcccgttttgatgccgtcgccaatcagcatgtcatcttctatcagtaaaattcgcattttttcatccctgcgataaccgtatttgctgccagtaaaccgtgttgtaacgcgctctgtacagcactaaattttatttttttcccttaagaagttgttaaggactatcttgttaaatgctcggaaacagacattaaagggagtaataaacatgaaaaaattcgcagcagtaatcgcagtaatggccctgtgcagcgcaccggtgatggcagcagagcagggcggtttttctggcccatcggcaacgcaaagtcaggccggaggattccaggggccgaacggcagcgtaacgaccgtagaaagcgcaaaatccctgcgtgacgacacctgggtaaccctgcgcggcaatatcgttgaacgcatctctgacgatctctacgtgtttaaagatgccagcggtactatcaatgttgatatcgaccacaaacgctggaacggtgtgacggtgacgccgaaagatacggttgagattcagggtgaagtcgataaagactggaattctgttgaaattgacgtcaaacagatccgcaaagtaaatccgtaattgttaccgctcccgggacgcgttcccgggaataatttcgcagggaggcaaaatgacaaacctgacactggatgtaaacattatcgatttcccatcaatccctgtggcgatgttgccgcaccgctgtagccctgagttgctcaactacagtgtggcgaaatttatcatgtggcgtaaagagacggggctttctcctgttaaccaaagccagacttttggcgtcgcctgggacgaccctgccaccaccgcaccggaagcgtttcgctttgatatctgcggcagcgttagcgaaccgattcccgataatcgttatggtgtgagcaatggtgaacttaccggtggacgttatgccgtggcccgccacgttggcgagctggacgatatttcacacacgatatggggcattattcgccactggctgcctgcaagcggcgagaaaatgcgtaaagcaccgattctgtttcactacaccaatcttgccgaaggggtgacagagcagcgactggaaacggatgtttatgtgccgttggcgtgatggggaatctttaccggagtgtgagccaaatcactcgcgataagtttgagcgaacaatgccacaggcgtattgttgttgggcttataatttctccggtaaggaataccatgtatacgcgaaatttattatccggtgcgccgtaagccgtctcgggggtatccatgagcaagccgcacttatggcaggaggcgcggggcactggtggagacacagctaaactgggctgaaccgtatacttacagtcgactactttgatgctttaggcttccctggactcgcataacctcaacttctcgaatcgcccggagcggacccccatgccgagtggtgtggcatgggcgcaaccttgtgctgccctctatgccgatcaagtctacagcaaagagttgtatatcaaggcacattgatgcctttatcgccgtcggagcacgtccggcggcgctattcacgctgatctcctgtgactcgacgcggcagataatgtagtatctccggcaatattgcccctttgaaggctggcgaataagttgaggaatcagaattaatgagcgatatggcagagcgccttgcgctacatgaatttacggaaaacgcctacttaaactactccatgtacgtgatcatggaccgtgcgttgccgtttattggcgatggtcttaaacctgttcagcgccgcattgtgtatgcgatgtctgaactgggcctgaatgccagcgccaaatttaaaaaatcggcccgtaccgtcggtgacgtactgggtaaataccatccgcacggcgatagcgcctgttatgaagcgatggtcctgatggcgcagccgttctcttaccgttatccgctggttgatggtcaggggaactggggcgcgccggacgatccgaaatcgttcgcggcaatgcgttacaccgaatcccggttgtcgaaatattccgagctgctattgagcgagctggggcaggggacggctgactgggtgccaaacttcgacggcactttgcaggagccgaaaatgctgcctgctcgtctgccaaacattttgcttaacggcaccaccggtattgccgtcggcatggcgaccgatattccaccgcataacctgcgtgaagtagctcaggcggcaatcgcattaatcgaccagccgaaaaccacgctcgatcagctgctggatatcgtgcaggggccggattatccgactgaagcggaaattatcacttcgcgcgccgagatccgtaaaatctacgagaacggacgtggttcagtgcgtatgcgcgcggtgtggaagaaagaagatggcgcggtggttatcagcgcattaccgcatcaggtttcaggtgcgcgcgtactggagcaaattgctgcgcaaatgcgcaacaaaaagctgccgatggttgacgatctgcgcgatgaatctgaccacgagaacccgacccgtctggtgattgtgccgcgttccaaccgcgtggatatggatcaggtgatgaaccacctcttcgctaccaccgatctggaaaagagctatcgcattaacctcaatatgatcggtctggatggtcgtccggcggtgaaaaacctgctggaaatcctctccgaatggctggtgttccgtcgcgataccgtgcgccgccgactgaactatcgtctggagaaagtcctcaagcgcctgcatatcctggaaggtttgctggtggcgtttctcaacatcgacgaagtgattgagatcattcgtaacgaagatgaaccgaaaccggcgctgatgtcgcggtttggccttacggaaacccaggcggaagcgatcctcgaactgaaactgcgtcatcttgccaaactggaagagatgaagattcgcggtgagcagagtgagctggaaaaagagcgcgaccagttgcagggcattttggcttccgagcgtaaaatgaataacctgctgaagaaagaactgcaggcagacgcgcaagcctacggtgacgatcgtcgttcgccgttgcaggaacgcgaagaagcgaaagcgatgagcgagcacgacatgctgccgtctgaacctgtcaccattgtgctgtcgcagatgggctgggtacgcagcgctaaaggccatgatatcgacgcgccgggcctgaattataaagcgggtgatagcttcaaagcggcggtgaaaggtaagagcaaccaaccggtagtgtttgttgattccaccggtcgtagctatgccatcgacccgattacgctgccgtcggcgcgtggtcagggcgaaccactcaccggcaaattaacgttgccgcctggggcgaccgttgaccatatgctgatggaaagcgacgatcagaaactgctgatggcttccgatgcgggttacggtttcgtctgcacctttaacgatctggtggcgcgtaaccgtgcaggtaaggctttgatcaccttaccggaaaatgcccatgttatgccgccggtggtgattgaagatgcttccgatatgctgctggcaatcactcaggcaggccgtatgttgatgttcccggtaagcgatctgccgcagctgtcgaagggcaaaggcaacaagattatcaacattccatcggcagaagccgcgcgtggagaagatggtctggcgcaattgtacgttctgccgccgcaaagcacgctgaccattcatgttgggaaacgcaaaattaaactgcgcccggaagagttacagaaagtcactggcgaacgtggacgccgcggtacgttgatgcgcggtttgcagcgtatcgatcgtgttgagatcgactctcctcgccgtgccagcagcggtgatagcgaagagtaatatgccggggagggcctgtttcctcccgcttgcaaggaacgccggatgaaacgttaagtcgtcatccggcagcgtattcaacccccggaaacgataaaaattcccttgaaaccgttgtttattcatgcgttgcgattaacaatacgcttttccagagagcggcttttaacaatgccctaacctgatttcaggtgacgtacaatgccagtctctcagaccttcagagggtgttatgctatatatctttcgtcttattattaccttgatttacagcatcttagtctgtgtattcggctccatttactgccttttcagcccgcgtaacccgaaacatgtggccacctttgggcatatgtttggccgtcttgcgccgctgttcggcctgaaagttgagtgccgcaaacctgcagatgctgaaagctacggcaatgctatctatatcgctaaccaccagaacaactatgacatggtgacagcatcgaacattgtgcaaccgccgacggtgacggtaggtaaaaagagcttgctgtggatccccttcttcgggcagttgtactggttaaccggcaacttattgatcgacagaaacaatcgcactaaagctcacggcaccattgcggaagtcgtgaatcatttcaaaaaacgccgtatttccatctggatgttcccggaaggaacccgcagccgtggtcgcggcctgctaccgttcaagactggagcatttcacgcggcaattgcggcgggcgtcccgattattcccgtgtgcgtctctacaacttcgaataagattaatcttaatcgactgcacaacggtctggtgattgtcgaaatgctgccgccaattgacgtcagtcagtatggcaaagatcaggttcgtgagctggctgcccattgtcgttcgataatggaacaaaaaatcgccgagctcgataaagaagtcgcagaacgcgaagccgccggaaaagtttaagtcggcaatctgtatttttgcggggaacactttcctgcacggtattactttagccagttttacatggagcaaatatgtcactcagtcggcgtcagttcattcaggcatcggggattgcactttgtgcaggcgctgttcccctgaaggccagcgcagccgggcaacagcaaccgctacccgttccgccgctacttgaatctcgccgtgggcaaccgctgtttatgactgtacaacgtgcgcactggtcatttacgccagggacacgcgcgtcggtctggggaatcaatggtcgttacctggggccgactatccgcgtctggaagggcgacgatgttaagcttatttacagcaaccgcctgacagaaaatgtctcaatgacggtggccgggctacaggtaccaggcccgctgatgggcggtccggcacggatgatgtcgccaaacgctgactgggcacccgtactgcccattcgccagaacgcagctactctgtggtatcacgccaatactcccaaccgcacggctcagcaggtctataacggccttgccggaatgtggctggtggaagatgaagtcagcaagtcgctgcctatccccaaccattatggtgtggatgattttccggtcattatccaggataaacggctggataactttggtacgccagaatacaacgaaccgggaagcggcggctttgttggtgatacgctgctggttaacggtgtacaaagcccgtacgttgaagtctcgcgtggctgggtgcgcttgcgactgctgaacgcgtcgaactctcgtcgctatcaactacagatgagcgatggtcgcccgttacatgtgatttctggcgatcagggattcctgcctgctcctgtatcggtgaagcaactttcgctggcaccgggcgagcgccgcgagattctggtggatatgagcaacggcgatgaagtgtcgatcacctgtggcgaagcggcgagcattgttgatcgtattcgcggcttctttgagccatccagtattctggtttctaccctggtgctaacgctgcgcccaaccggccttctgccgctggtcacagacagtcttccgatgcgcttgctgccaactgaaatcatggctggttcgccaattcgcagtcgcgatatcagtctgggtgatgacccgggtattaatggacagctgtgggacgtcaaccgtattgatgtcaccgcgcagcaaggaacgtgggaacgctggacggtacgcgcggacgagccgcaagcgttccatattgaaggcgtaatgttccagatccgtaacgtgaatggcgcgatgccgttcccggaagacagaggctggaaagataccgtttgggttgacggacaagtggagctgcttgtttatttcggtcagccttcctgggcgcacttcccgttctacttcaacagtcagacgctggaaatggcggaccgtggctcgatagggcaacttttggtcaatccggtaccgtaatcttcatactcgcccgaggagggcgagtatggaatacctttcgatttctctttcgttccggcttataatccccggcctttgattatttttttatcatttctggaagcaaaatgagctctatctccctgatccaaccggatcgcgacctgttctcctggccgcagtactgggccgcctgttttggaccggcaccgtttttgccgatgtctcgtgaagagatggatcaacttggctgggatagctgcgacatcattttggttactggcgacgcgtatgtcgatcacccaagcttcgggatggcgatttgcggtcgtatgctggaagcacagggctttcgcgtcgggatcatcgcccagccagactggagcagcaaagacgatttcatgcgtctgggtaaaccgaatctgtttttcggtgttactgctggcaacatggattcgatgatcaaccgttataccgccgatcgccgtttacgtcatgacgatgcctacacgccggataacgtcgcgggtaagcgcccggatcgcgccacactggtttatacccagcgttgtaaagaggcgtggaaagatgtaccggtgatcctcggcggtattgaggctagtctgcgccgtaccgcacattatgattactggtccgataccgtgcgccgttccgtgctggtggattcgaaagccgacatgctgatgtttggtaacggtgagcgtccgctggtggaggtggcgcaccgtctggcgatgggcgagccgattagtgaaatccgcgatgtgcgtaataccgcgattatcgtgaaagaggcgctgcctggctggagcggcgtggattccacccgtcttgatacccctggaaaaatcgacccaatcccgcatccgtatggtgaagatttgccgtgcgcggataacaaaccggtggcaccgaaaaagcaggaagccaaagccgtaaccgtgcagccaccgcgcccgaaaccgtgggaaaaaacctacgtgttgctgccttctttcgagaaagtgaagggcgataaagtgctgtacgcccatgcttcgcgcattctgcaccacgaaaccaacccaggctgcgcccgcgcattgatgcaaaaacacggtgaccgctatgtgtggatcaacccgcctgctatcccgctttctaccgaagagatggacagcgtttttgcgctgccgtacaagcgcgtgccacatccggcctatggcaatgcccgtattccggcttacgaaatgatccgtttttcggtcaacattatgcgcggctgctttggcggctgttctttctgttctattaccgagcacgaagggcgcattattcagagccgttcggaagattcgatcattaatgagatcgaagcgatccgcgacaccgttccaggttttacgggcgtgatttccgatctcggtgggccaactgccaacatgtatatgttgcgctgcaaatcgccacgcgctgaacaaacttgtcgccgtttgtcgtgcgtttatccggatatttgtccgcacatggacactaaccacgaaccgacgatcaacctctatcgccgtgcgcgtgatctgaaaggcattaaaaaaatcctcatcgcctcaggcgtacgttatgacatcgccgtggaagatccgcgctatatcaaagagttggcgacccatcacgtcggcggttatctgaagattgccccggaacataccgaagaagggccgttatcgaagatgatgaagccgggcatgggcagctatgaccgctttaaagagctgttcgatacttactcaaaacaggcaggtaaagagcagtatctgatcccctatttcatctccgcgcaccccggtacgcgtgatgaagatatggtgaatctggcgctgtggctgaaaaagcatcgtttccgtctcgaccaggtacagaacttctacccatcgccgctggcgaactcaaccaccatgtattacaccgggaaaaacccgctggcgaagattggttataagagcgaagacgtcttcgtaccgaagggcgacaaacagcgtcgtttgcataaagcgttgttgcgttaccacgatccggcaaactggccgttaatccgccaggcgctggaagcgatgggcaaaaagcatctgattggcagccgtcgcgattgcttagtgcctgcgccaaccattgaagagatgcgtgaagctcgtcgccagaaccgcaatacccgtccggcgttgacgaaacatacgccgatggcgacccagcgtcagacgcctgctacggcaaaaaaagcgtcgtctacgcaatctcgtccggtgaatgctggtgcgaagaaacgccctaaagcggcggttggacgttaaaaaaaatccccggcaactgacatgctgccggggatttttttatcattctgcgtacatacgcaagcagcgcaggcaatcaaaatagtcctgagcatcaagacgcgtattggctctgttagcttcggatttggcagcatagatttgtgggcgtagtgctttcatatcctgctcaagccgggcgattttggcatttaatgtttgcacattgctcgccagctgattgaccttttgctcattgacgcagccactgagcaagcaggttgccagaacaacagctcccacggtgaaaatcgttttcatatagtgttcccttttatttattgttccggctaattgttatttaattcagctcattgctttaatctggcggcggtttttgcctcaatctgcttaagtaggctgccgctgttcgggcggataaaatcagcgatttcccacttgccttcgcgccgctgtaaaaccagttcttgctcttcgttgttgccattggtcagcgtaaaacgaacatgaatgcgggcggaatcggcggttttctccaggactcgaatttcatcaacgcgtgaaaatagcgactcttcgccaaaacagatcggattgtcgtaaataaattgccgttctatttgcatatcttcatcgggattattggccgtcttgaaggtggttttatagaaggcattaaccgcctggcggtaagagtcggaaaccacccacgtccacggccagctataatcagcaatatgttcaaagagttcggcaacaaaggcttccggctgttctttttgcaacgaagctaaagcggccagcgttttttcattctcgctattaactgcttgtaagacgctgccatgattgctgacaatatcgtcaatgacccaacgaccattttccgccaccattttcagtgtctgcgtggtcttttctttatcatctttaaagatacgaaagcgcacaacggcatcggcatgatcggcgtcagtttgagttatcgctacgctttctagcaccagatcgccaaaatcctgacaatcacaaaccggatcataatccagccagccaatattgcccggcagcgtaagattatcgttcagggtaagcgcctgttgaatacgcgcagaagttatcgcccgctctccggtttcaccaaaataaggggcagtggcatctgatttatagttctgataaatatgccggactgtttgttctacggtctgtgaggggggctgtgcgtgtacggtaaaacttgccagggctgctaaaaacagaagtattattttcatctgtttttcacctctccgttgcgtttatcccggatatagatgagttgttcttttaagagcttccggctctgcatgatgatgtccttatatttggtattcctgaacaaggaagagtaacaacgggcgggacgcgaggggaataaatgatttctgaaaagtccggtagcggaacattaccgccaccgggagaatttgcacgttagccgccgaactggtcaggatcgggaccgagacgcttgccctgatcgagttttgcaatttcgccgagttcgtctttgtcgagacggaaatcccagacatcaaagttttcggcaatacgtgaaggtgtgaccgatttcgggatcaccaccaggccgctatccagatgccagcggataacaatctgcgccggagttttgccgtatttatctgccagatcgcgaatgactttctgatcgaaaacgcctttccctccttgcgctaatgggctccaggattcggtctggattttgtgtgtcgcgttccaggcgtgtagctggcgttgttgcatcagcgggtgaagttcgatctggtttatcacaggcgtcacgccagtttcatcaatcaggcgttgcaggtgatggatctggaagttgcacacgccgatgcttttgattaatccttctttttgcaattcgatcatgcctttccatgcttcgacataatggtcgatagcgggaacgggccagtgcattaagtagaggtcgatataatcaagctggagttttttcaggctgtcgagcagggcttcgcgggggcgcttgtggtcgtcgttccacagcttagtggtgatgaacagttcttctctgttgactgaggcatttttcagggctttgccgacaccttcttcgttcttataggccgcggcggtatcaatcgagcgataacccacttctaacgctttttgaatggcggtgattacttcctcattacttgcttgccagacgcccagtcccaactggggcatgacattgccatcctgtagcttaataacggttggattagccatacgttcctcctttatatgaactcaccggagcaggctccggtgaggtgttgtgaacttaagtctggacgaaatgcccgaaaacgaaagtttgaggcgtaaaaagcttagcgggcggcttcgtatatacggcggctgacatccagcgtaatgtcatgattttcgcccagttgggtcatgccgtgctcttccagttttttcagcaaagccgggatggagctgccgtccagaccgtagtcggagaggtgggtcggcacgcctaattgctcaaagaaattgcgggttgcggcaatcgcggcgtcaatacgctcatcgtcggaaccttcagtgatgttccagacgcgttcagcatattgcagcagcttagcgcgcttggtatcgcgtttttcattccacagtgcaggcaggacgatagccagtgtttgcgcgtgatccagaccgtgcatcgcagtcagttcgtggcccagcatatgcgttgcccagtcctgcggtacgccagcgccaatcaaaccgttcagcgcctgcgtcgccgcccacatgacgttggcgcgcacatcgtagttttctggctctttcagggctttcggaccatcttcgatcagcgtcagcaaaatgccttctgcgaaacggtcctgaattttggcatcaaccggtttggtaacatactgttccacggtgtgtacaaaggcgtccactacgccgttagccacctgacgcggcggcagggtgtaggtataaaccggatcgagcacggcaaatacgggctgaacatgggcagaatggaacgcctgcttatcgcctgtggttttacgggagatcaccgcaccggcgttggattctgaaccggttgctggcagcgtcagcacacagcccatcgggatggcgcttttaatctctttaccacccgtttgcagaatgtgccacggatcgatattttccggatagttagccgctgcggcgataaatttggtgccgtccagtacagaaccgccgccaaccgccagcaggaaagtcactttctgttcgcgaaccagtttcacggcgttcatcagcgtttcataagccgggtttggctcaataccgccaaattccagcacgtccatgcctttcagggcatccagaacttgatcgagaacgccggtttttttcacgctgccgccaccgtaggtaatcaatacgcgagcatcgtgaggaatttgttcgcgtaaaccagcgattgcgcctttaccaaacagaatgcgggttggggtgtgcagattaaagttgttcattacttgctccctttgctgggccaatatgagggcagagaacgatctgcctgatgtttttcattgtgatcgccagcgccctggctctcaatgctcatttctgccaatgtcttgcctatttctccagagtgctggagaaatgctacaaaattgcgcacaatcaaattgccgcattattcctaagaaattacgcgatatgaaacgtgaagagatttgccgtttgctggcggataaagttaataaaatgaaaaataaagaaaatagtttgtcagaactgttgcccgatgtgcgtttgttgtatggcgagacgcctttcgcacgtacaccggtgatgtacgagcctggcatcataattctcttttccggacataaaatcggttatatcaatgaacgcgtgtttcgttatgatgccaatgaatacctgctgctgacggtgccgttgccgtttgagtgcgaaacctatgccacgtcagaggtgccgctggcaggggtgcgtctcaatgtcgatattttgcagttacaggaactgttgatggacattggcgaagatgagcatttccagccgtcgatggcagccagcgggattaactccgccacgttatcagaagagattttatgcgcggcggagcggttactcgacgtgatggagcgaccactggatgcgcgtattctcggcaaacagatcatccgcgaaattctgtactacgtgctgaccggaccttgcggcggcgcgttactggcgctggtcagtcgccagactcacttcagtctgattagccgcgtgctgaaacggattgagaataaatacaccgaaaacctgagcgtcgagcaactggcggcagaagccaatatgagcgtatcggcgttccaccataattttaagtctgtcacaagcacctcgccgttgcagtatttgaagaattaccgtctgcataaggcgcggatgatgatcatccatgacggcatgaaggccagcgcagcagcgatgcgcgtcggctatgaaagcgcatcgcaatttagccgtgagtttaaacgttacttcggtgtgacgccgggggaagatgcggcaagaatgcgggcgatgcaggggaattaaatacgttcccggtacagcaaccgggaacagggaaaatcgtcaggcgttacagtatttttttttaatcaccacaaacagcgtgcctaacaagccagcggttaacaaggcaattggcaggatcatcaggaacgtcattacctgatcttcatggcgtttaacgaacggaatcatacttaaggcatagccaaaactggttaccacgctgacccacagcaatccacttaaccagttgaaaaactggaagcggcggtttggcagaccggaaattcccgccatggttggcagcagcgtacggacaaatgcaagaaaacgtccagccagcagcgccagcagaccgtggcggtcaaacatgcaggtggcgcgctggtgatatttagcaggaagctgtgccagccagcctttcaccgttttggtattccctaaccagcgcccctgaatataacttagccagcagcccagacttgctgcggcggtcagaatcgcaatcgtaggcagaaaatccataaccccttgggcaatcaatgcgcctgccagtatcaacaagctgtcgcctggcaaaaatgaggcgggcagcaggccgttttctaaaaacagcgtggcaaacatgacaaagtaaacaacgctaacaatatgaggatccgccagcgcggcaaagtcgtgttgccagagcgcagcgatgatatcttgaataacagccatggactttcctgtggaacagcgtttaagcctttatctgcctattgtactcctgattcgtccgggacgccttgatcccggacgcaacaatttaagacttttcacaattaaatgtctgcaaaattgtccaaaagtggcaatgttatacaattcgcgcaaaaccggcgtccagatcggcaatcagatcgtcgacatcttccagaccaatatgcaggcgaatcaaggtcccgctaaaatcgatctcgccttgtgggcgaatggcggcgatatgttctggttgattcgccaggatcaacgattcatacccgccccacgagtaggccatgctgaataaactgaagttatccagatagttcgccagctcttcattactgagttttttcttaagcacaaaggaaaatagcccgctgctacctgtaaagtctcgtttccagaattcgtgtcctttactgccaggcagagcagggtggttaactcgcgctacttgcggatgttctgccagccattcagccactttcagactgctttcatgatgttgacgcaaacgcacacctaatgtgcgcaggccacggctggttatataggcggtatcggcatcgaccatctggcccatcagataggcgttttcccgtagctgctcccagcaacgggcattgcacacggcagtgccaatcatcgcatctgaatgcccaaccagatatttggtggcggcttgaatagaaacatcgatgccaaaatccagcgccttaaacagcacaccggctgcccaggtgttgtcgatcataatgatggcatccggcaccacactgcgtacggcggcaacaatcgccggaacgtcgtggacttccatggtgatggagcctggcgattccagaaacacgattttagtgtttggctgcagatgcttaacgatatcggcaccaatcagcggatcaaaccacgatgttgttacgcccagtttgctgaggattttgctacagaaatcctgactcggttcataggcggtgttggtcatcaacacatgatcgccctgttcgacaaaagcaagaatggaattagcaaccgctgccgccccgcagggaaatagcgcgcagcctgcgccaccttccagttcacacatcgcttgttgtaaggagaaatgggttaacgttccgcgccgtccatagaacaactcgccattggcgcgattgcgcgtcgcgtgctttttggcttccacactgtcaaagaccagcgaagaagcgcgctgaatcacgctatttaccgcgccgagagtgtattttttgctgcgtcctgcattcaccagttgagtatcaagctttttgtccgccatgtcgggattcctgtttttatacgtctggatgtctaaactagcatgaatattcgcgggcgcatcctgaagaattggcataaagcagaaaattttcgcaaatggcgtgctggtgacttttttactgcgtaaacgcaaggaaaagaaagcaaaggtacggcagtatgcaaatagtaatgagaacgactatcaattcgacgtcattttgatattattatgcgcagattttgtgacttgcgtcctggagatacacagtgggtaataatttaatgcagacggacctttccgtctggggtatgtatcagcacgccgatattgtcgttaagtgcgtgatgattgggcttattttggcctccgtagtcacttgggcaatcttcttcagtaagagcgtagagttcttcaatcagaagcgtcgccttaagcgcgagcagcaactgctggctgaagcgcgttccttaaaccaggccaacgatatcgccgctgattttggtagcaaaagcttaagcctgcatttgctcaatgaagcgcagaatgagctggaactgtcagaaggcagcgacgataacgaaggtattaaagaacgtaccagcttccgtctggagcgtcgggtcgccgcagtgggtcgtcaaatgggccgcggtaacggctatctggcaaccatcggcgcgatttctccgttcgttggtctgtttggtacggtctggggcatcatgaacagctttattggtatcgcgcaaacgcagaccactaacctggcagtcgttgcgccgggtatcgcagaagctctgttagcaacggcaatcggcctcgtggcagcgattcctgcggtcgttatctataacgtatttgcacgccagattggcggctttaaagcgatgctgggtgatgttgcagcgcaggtattgttgctgcaaagccgtgacctggatctggaagccagcgccgctgcgcatccggttcgtgtcgcacaaaaattacgcgcaggataatatccgatggcaatgcatcttaacgaaaacctcgacgataacggcgaaatgcatgatatcaacgtgacgccgtttatcgacgtgatgttggttctgctgattatctttatggtggcggcaccgttagcgacggtagatgtgaaggtgaacttgcctgcttctaccagcacgccgcagccgcgcccggaaaaaccggtttatctgtcggtgaaggcagacaactcgatgtttatcggtaacgatccggtcaccgatgaaacaatgattacggcgttgaatgcgttaaccgaaggcaagaaagacaccaccatcttcttccgagcggataaaaccgtcgattacgagacgttgatgaaggtaatggatacgctgcatcaggcgggttacctgaagataggtctggtcggcgaagaaaccgccaaagcgaagtaaagtagaattgcctgatgcgctacgctcatcaggcctacaatatctattgcaacatgttgaatcttcgtgcgtttgtaggccggataaggcgttcacgccgcatccggcattaggtgctcaatgcctgatgcgctacgcttatcaggcctacaaaatctattgcaacatgttgaatcttcatgcgtttgtaggcggataaggcgttttcgccacatcaggtaagagtgaattcacaatgatgcccggttgcttttcacaaccgggcatttttttaacctaaatgctcgccgccgcacacaccgtgcacttctgcggtgacgtagctcgactcctgacttgccagataaacatatacaggggccagttccgccggttgccccgcacgcttcatcggcgttttctgaccaaactgcgggatcttatcctgcgtttgtccgccggaaatttgcagtgccgtccagatagggcctggcgcgacaatattcacccgaatacctttctccgcgacctgttttgccaggccacggctgtagttcagaatcgccgccttcgtagccgcatagtccagtaaatgcggacttggctggtatgcctggattgacgaagtggtgatgatacttgcacctttcggtagcagggggatcgcttcctgggttagccagaacagcgcgaaaacgttaatggcaaaggtcttttgaaactgttcgctggtgaggtctgcaatatccggaatggcaacctgtttcccggcgaccagcgccataatatccagcccgcctaacgccttgtgcgcttcgtgaaccagcgaacgggcgaatttctcatcgcttaaatcgcctggcagcagaacggctttgcgtccgcattcttcaatgatctttttcacatcctgagcgtcttcttcttccacgggaagataactgatcgccacgtcagccccttcacgcgcgtaagcgatggcggcagcgcgacctattccggaatcgccccctgtcaccagtgctttacgatctttcaggcgaccgctaccaacataggttttctcgccgcaatccggtaccggtgtcatcttcgcctggatgcctggcgtcggttgtttctgtttgggatattcaccagtgtaatactgcgtggtcgggtcttttaaatgagacatcgtttttctcccttcaggttcaacgtcctttaagggtagacgctctcgatgcgttgataagggaaccaggaagatccctaaacctcagaattatgcgacaaaggtttaacgtatatgttgatttgctgttgcgtgctgtttactcaattgcgatatactgttgcccgttttaactacacgacaggaatgtatggaacgttttcttgaaaatgcaatgtatgcttctcgctggctgcttgcccccgtgtactttggcctttcgctggcgttagttgccctggcgctgaagttcttccaggagattattcacgtactgccgaatatcttctcgatggcggaatcagatttgatcctcgtgttgctgtcgctggtggatatgacgctggttggcggtttgctggtgatggtgatgttttccggttatgagaatttcgtctcacagctggatatctccgagaacaaagagaagctgaactggctggggaaaatggacgcaacgtcgctgaaaaacaaagtagcagcgtcgattgtggcaatttcttccattcacctactgcgcgtctttatggatgcgaaaaatgtcccggataacaaactgatgtggtacgtcattatccatctgacgtttgtgctttctgcatttgtgatgggctatcttgaccgactgactcgtcataatcactgatctgattcgggcgcggttcgcgcgcccgttattaacaggtcatttatcggacgacgcctgccacagattcagctcgccatcggcgatatgctgatcaatctgcgccagctcctcggtgctaaatgtcagattattcagcgcctgcacgttctcctctagttgctccgcgcggctggcaccaatcaataccgacgtcacgcgatcatctttcaacaaccagcttaacgccatttgcgccattgattgtccacgctgctgtgccatttcattcaataagcgcaggctgttgaggttggcttcggtaagcattttcggcgtcagaccacgaactttattcccttcacgatgcatccgtgaatcttgcggaatgccgttgagatattttccggtcagcaatccctgagccagaggagtaaaggcaatacagcccacgccgttattttgcagggtatccagcaggccgcttttatccacccagcggttcagtaaattgtacgaaggttgatgaattaaaagcggaattttccactcgtgcagcaactcgaccattttttgcgtccgctctggcgagtaagaggagatcccgacatacagcgccttaccgctttgtaccgcatgagccagcgcagaggcggtttcttccatcggcgtattttcatcgacgcgatgagagtaaaagatatcgacatactcaagccccatacgcttcaggctttggtcgaggctggcgagcaggtatttacgtgaaccgccagagccgtaagggccgggccacatatcgtagccagccttggtagagataatcagttcatcgcgataagcggcaaaatcctcccgcagcaggcgaccaaagttctcttctgcgcttcctggaggcggcccgtaattgttggctaaatcaaagtgcgtaatgcccaaatcaaacgctttacgcaggatcgcacgctgtgattccagcgcgttaacgtgaccgaaattgtgccataaaccgagcgataacgcgggcaggcgtaaaccgctttttccgcaatagcggtattgcatctgcccgtaacgttcgggattcgctaaccagaccatgacctctcctttccaccgttcaatttcgaaacaatgtttctagtttagcgattcgccagcgcgtatcccgtagtctggctcacagagtgacgaaaaactgggcaaaaacacgtgcttatgctttgcttaaaaaaacaccagttgaggagtgcaacgatgccgcgtttaaccgccaaagatttcccacaagagttgttggattactacgactattacgctcacgggaaaatctcgaaacgtgagttcctcaaccttgcggcgaagtatgcggtgggcgggatgacggcattagcgttgtttgatttgctcaagccaaattatgcgctggcgactcaggtagagtttaccgacccggagattgttgctgagtacatcacgtatccttcgccaaatggtcacggcgaggtacggggttatctggtgaaacccgcaaaaatgagcggcaaaacgccagccgtggtggtggtgcatgagaatcgtggactgaatccgtatatcgaagatgtggcacggcgagtggcgaaggcggggtatatcgccctggcacctgacggcttaagttccgttggaggttatccgggaaatgatgataaaggtcgtgagctgcaacagcaggttgatccaaccaaactgatgaatgatttctttgccgcaattgagtttatgcaacgctatccgcaagcgacaggcaaagtgggtattaccggattttgctatggcggtggcgtatcgaacgcggcggctgtcgcgtatccggaactggcctgcgcggtgccgttttatggtcgtcaggcacccactgccgatgtggcgaagattgaagcgcctttactactccacttcgcggaactggacacccgaatcaacgagggctggcctgcttacgaggcggcgttgaaagccaataataaggtttatgaggcgtatatctatccgggggttaatcacggattccataatgattccacgccccgttatgacaaatctgccgccgatcttgcctggcaaaggacactgaaatggttcgataaatatctctcctgataggtttatctcttactggattacgtcttaaacaagcatgaaaaaatagcgtgcgcaaaagtcgttctttgcctaaaatatcgctatatatggcgatatataacgaatgaggtgaacgatgaataaccattttggtaaaggcttaatggcgggattaaaagcaacgcatgccgacagtgcggttaatgtgacaaaattctgtgccgattataaacgcggttttgtattaggctactcacaccggatgtacgaaaagaccggagatcgccagcttagcgcctgggaagcgggtattctgacgcgccgctatggactggataaagagatggtaatggatttctttcgtgagaataattcctgttctacgttgcgcttttttatggccggttatcgcctcgaaaattgatcaaacatacgtattatcttgctttaattaattacactaatgcttcttcccttcgttttagcgccccgccgcagtatcatgatatcgataaccataataaatgtgtggtaaatggcgcatcgatcgcattattgattttgcgattgaggcaaaatatatgccaggtcttcgcaacggaataactataaatgactggagataacaccctcatccattctcacggcattaaccgtcgtgatttcatgaagctttgtgcagcattagccgccaccatggggttaagtagcaaagccgctgcagagatggccgaatcggttactaacccgcagcgtccgccagttatctggattggcgcgcaggagtgcaccggttgtacggaatctctgcttcgtgcaacgcatccaacggtagaaaacctcgtgctggagactatctctctggagtatcacgaagtgctttccgccgccttcggtcatcaggtcgaagagaacaaacataacgcacttgagaagtacaaagggcagtatgtgttggttgtggatggttccatcccattaaaagataacggtatttattgcatggttgctggtgagccgattgtggatcacatccgcaaagcggcagaaggcgcagcagcgattatcgctatcggttcctgctctgcgtggggcggtgttgccgcagctggagttaacccaactggcgcagtcagcctgcaagaagttctgccaggcaaaaccgttatcaatattccgggctgcccgccgaacccgcacaacttcctcgcgaccgttgcgcacatcatcacttacggcaaaccgccgaaactggatgacaaaaatcgtccgaccttcgcctatggccgtctgattcacgaacactgcgaacgtcgcccgcacttcgatgctggtcgttttgccaaagagttcggtgatgaaggccaccgtgaaggctggtgcctgtaccacctcggctgtaaagggccagaaacttacggcaactgctcaacgctgcaattctgcgatgttggcggcgtgtggccggtagcgattggtcacccatgctatggctgtaacgaagaaggtatcggcttccataaaggcatccatcagcttgccaacgtcgaaaatcagactccgcgttcacagaaaccggatgttaacgctaaagagggcggcaacgtctctgcaggcgctattggtttgctcggcggtgtggttgggctggttgccggtgtcagcgtgatggcggtgcgtgaactgggtcgtcagcaaaagaaagataacgctgactcacggggagaataaccgtgaacagacgtaattttattaaagcagcctcctgcggggcattgctgacgggcgcgctgccgtctgtcagtcatgcggctgctgaaaaccgcccgccaattccgggatcgctggggatgttgtacgactcgaccttgtgcgtaggctgccaggcttgcgtcaccaagtgtcaggatatcaacttccctgaacgtaacccgcaaggggaacagacctggtcgaacaacgacaaactgtcgccgtataccaataacatcattcaggtgtggaccagcggcacaggggtcaacaaagaccaggaggagaacggctacgcgtacattaagaaacagtgtatgcactgcgtcgatccgaactgtgtctctgtgtgcccggtctctgcgctgaaaaaagatccgaaaaccggcattgtccattacgacaaagatgtgtgcaccggttgccgttactgcatggtcgcctgcccatacaacgtgccgaagtacgactacaacaacccgtttggtgcgctgcataagtgcgagttgtgcaaccagaaaggtgtggaacgtctcgataaaggcggtttgcctggctgcgtagaagtgtgcccggcgggcgcggtaatttttggtacgcgtgaagagctgatggcggaggcgaaaaaacgtctggcgctgaagcctggcagcgaataccactatccgcgtcagacgctgaaatctggcgacacttacctgcatacggtgccgaaatattatccgcatctgtacggcgagaaagagggcggcggtactcaggttctggtactgacgggtgtgccttatgaaaatctcgacctgccgaaactggacgatctttctaccggtgcgcgttccgaaaatattcaacacaccctgtataaaggcatgatgctaccactggctgtgctggcgggcttaaccgtgctggttcgtcgcaacaccaaaaacgaccatcacgacggaggagacgatcatgagtcatgatccacaaccgctgggcggcaaaatcatcagtaaaccggtcatgatttttggaccgttaatcgtcatctgtatgctcctgattgtgaagcgtctggtgttcggtctgggctctgtctctgacctgaacggcggcttcccgtggggcgtgtggatcgcgtttgacctgctgattggtaccggctttgcctgtggcggctgggcgctggcgtgggcggtatacgtctttaaccgtgggcaataccatccgctggtgcgtccggcgctgttggcgagtctgtttggttactcactggggggcttgtcgatcactatcgacgtgggtcgctactggaacctgccgtacttctacattccgggtcacttcaacgtgaactcggtactgttcgagacggcggtctgtatgaccatctatatcggcgtgatggcactggagtttgctccggcactgtttgaacgtctgggctggaaggtttctctcaagcgtctgaacaaggtgatgttcttcatcattgcacttggcgcgctgttgccgaccatgcaccagtcttcaatggggtcactgatgatctcggcgggctacaaggtgcatccgttgtggcagagctatgaaatgttgccgctgttctcgctgctgacggcgttcatcatgggcttctcgattgtcatctttgaaggttcgctggtgcaggcgggtctgcgtggcaacggtccggatgaaaagagtctgttcgtcaagctgaccaacaccatcagtgtgttgctggcgattttcatcgtgctgcgctttggcgagcttatctatcgcgacaagctgtcgttagcgtttgccggtgacttctactccgtgatgttctggattgaagtcctgctgatgctcttcccgctggtggttctgcgtgtggcgaagctgcgtaatgattcccgcatgctgttcctgtcagcactgagcgcactgttaggttgtgcaacctggcgtctgacctattcgctggtggcattcaacccgggcggcggttacgcctacttcccgacctgggaagaactgttgatttctattggttttgtggctattgagatttgcgcttacatcgtactcattcgtctactgccgatacttcctcctttaaaacaaaacgatcataatcgtcatgaggcgagcaaagcatgagccagagaattactattgatccggtaacccgtattgaggggcatttacgcatcgattgcgaaatcgaaaatggcgtcgtttcgaaagcatgggcttccggtaccatgtggcgcggcatggaagagatcgtgaaaaaccgcgatccgcgcgatgcatggatgattgtgcaacgtatctgtggcgtatgtactaccactcacgcgctgtcttccgttcgtgcggcagaaagtgcgctgaatatcgacgttccggttaacgcgcaatacatccgtaacatcattctggctgcgcacaccacgcatgaccatattgttcatttctatcagctttcggcgctggactgggtggacatcacttctgcactgcaagctgacccaaccaaagcctccgaaatgctgaaaggcgtttcgacctggcacctgaacagtccggaagagttcaccaaagttcagaacaagatcaaagatctggttgccagcggtcagttgggtattttcgccaatggctactggggtcacccggcgatgaaactgccgccggaagtgaacctgattgcggtagcgcactacctgcaggcgctggagtgccagcgtgacgctaaccgcgtcgtggcgctgctgggcggtaaaacgccgcacattcagaacctggcggtaggtggtgtcgcgaacccgatcaacctcgacggtttgggcgtgctgaaccttgagcgcctgatgtacatcaagtctttcatcgacaagctgagcgactttgttgaacaggtttataaggttgataccgcagttattgccgcgttctacccggaatggctgacgcgcggtaaaggtgcggtgaactacctgagcgtgccggaattcccgaccgacagtaaaaacggcagcttcctgttcccgggcggctacattgagaatgcggatctgtcctcgtatcgtccgatcacttctcattccgatgaatacctgatcaaaggcattcaggaaagcgcgaagcactcctggtataaagacgaagcgccgcaggcaccgtgggaaggtaccaccattccggcttatgatggttggtctgacgacgggaaatattcctgggtgaaatcaccgactttctacggcaaaacggtagaagtgggtccgctggctaacatgctggtgaaactggcggcaggacgcgagtctacccagaacaaactgaatgaaatcgttgcgatttatcagaaactgactggtaacacgcttgaagtggcacagctgcactctacgctgggccgtattattggtcgtaccgttcactgctgcgaattgcaggatatcctgcaaaatcaatacagtgcactgatcaccaatatcggtaaaggcgatcataccacctttgtgaagccgaacattccggcaacgggtgagttcaaaggtgttggcttcctcgaagcgccgcgcggtatgctctctcactggatggtgatcaaagacggtatcatcagcaactaccaggcagttgttccatcaacctggaactctggtccgcgtaacttcaatgatgacgtcggtccttacgagcagtcgctggtgggtacaccggttgctgatccgaataaaccgctggaagtggtgcgtaccattcactccttcgacccgtgcatggcctgtgcggtacacgtagtggatgccgacggcaacgaagtggtttcagtgaaggttctgtaatgcgtattttagtcttaggggtcggcaatattttgctgaccgatgaagccatcggtgtgcggattgtcgaagcgttagagcaacgatacattctgccggattatgttgagatcctcgatggcggcacggcgggaatggagctgcttggcgacatggcaaatcgcgatcatctgattattgcggatgccattgtgtcgaaaaagaacacgccgggaacgatgatgatcctgcgggatgaagaagttccggcgttgtttaccaacaaaatctctccgcatcagcttggcctggccgacgtcttgtcggccctgcgcttcaccggcgagtttccgaaaaagctgaccctggtcggcgtaattccggaatcactggagccgcacatcggcttgacgccgacggtcgaagcgatgattgaacctgcgcttgagcaggttctggctgcgctgcgtgaatctggcgtggaagccatcccacgggaggcgactcatgactgaagagatagcaggtttccagacctccccgaaggcgcaagtacaggcagcttttgaagaaattgcccggcgttcgatgcacgatctctcttttctgcatccttcaatgccggtgtatgtttctgactttacgctgttcgaaggtcagtggacggggtgtgtgatcaccccgtggatgctgagtgcagttatcttccccggcccggatcaactctggccgctgcgcaaagtgagtgaaaaaattggtctgcaactgccgtatggcactatgacctttaccgttggcgaactggacggtgtttcgcaatatctctcctgttcgctgatgtcgccgctttcgcacagcatgtcgattgaagagggccaacgcctgacggatgactgcgcacgaatgatcctttcgctgccagtcacgaatccggatgtaccacacgcagggcgtcgcgccctgctgtttggttgcaggagtggcgaaaatgcatgagttgtctctttgccagagcgccgttgaaattatccaacggcaggcggagcagcacgatgttaagcgcgtcaccgccgtgtggctggaaattggcgcgctctcctgcgttgaggagagcgccgtccgttttagttttgaaattgtctgccacggaacggtggcgcaagggtgcgatttacatatcgtctataaacccgcccaggcttggtgctgggattgcagccaggtggtggagattcatcagcacgatgcgcagtgtccgctctgtcacggcgagcggttgcgtgtcgataccggcgattcgctgatcgtcaaaagtattgaagttgaataaccggagttaataatgtgtattggcgttccaggccaggtgctggctgtcggtgaagatattcaccagcttgcgcaggttgaagtatgtggtatcaagcgcgacgtgaatatcgccctgatttgtgaaggtaaccctgccgatctgctgggccagtgggtgctggtacacgtcggatttgccatgagcatcatcgacgaagatgaagccaaagccacattagacgcactgcgccaaatggattacgacattaccagcgcgtgatgattagctttcgtagatactgttatggcctgcaagttttttcctggtccggtttcccggattgcaggcatgccagacacagcgccgtcaggcgctgtttttttcatcccttccgcgatttttacgccgctaccggatt

SEQ ID NO: 58 - DNA, 45493 bp, Escherichia coli
  source 1..45493: mol_type = genomic DNA
actgcgtcatgtcgccctgacgcgctgccggttttccgctcatctgctcatccttgttttatcgggttatttgtctgcttccaggcaaaaccctacagatttataagaaagccttaagtgagatatctgtcagataagaacaattaggaaaatatttatatatatttcatgaatatatgtttcgattggtataacgatgtctaaatattcctctgaacatcttcctgatacaaaaaaccgccagcgtttccgctggcggttttcaatgtattcaaaactcagcaatcaataaaaatcaccagttgccttttcggcctgatccatccacaccggtttatcgctggttttcgaccagacgcgatgcaggtagctgtaaaagcgggcgcggtctttccagaaaagcatgaaaggcagcgccagaacgcccgctgcaaccgcataagtacggcgtaaaaagataagccatgcaggatattctctgtagagttccatacttttctcccccttttgtatctacccggtgaatggcaccggaaaaatgaatttgtttatctgatgaaaatagtaccgccttttgtgtaattttactactcatccgaccacttatttttgcttattgatggtttatttacattcatcctgtaattaagttacacaaaagttaaattaatactaaacattagttaaatcatggcttttgccatttttatactttttttacaccccgcccgcagatttttgcgaaatctttgcagccagaattctacccttccggtatcacttttaggccactggaggtgcactgtgagtgcaggcgtgataaccggcgtattgctggtgtttttattactgggttatctggtttatgccctgatcaatgcggaggcgttctgatggctgcgcaagggttcttactgatcgccacgtttttactggtgttaatggtgctggcgcgtcctttaggcagcgggctggcgcggctgattaatgacattcctcttccaggtacagcgggcgttgaacgtatactctttcgtttacctggcgtctctgaccatgagatgaactggaagcaatatctttgtgccattctcggcctgaacatgctggggctggcggtgctgttttttatgttgctcggtcagcactatctgccgcttaatccacagcagttgccggggctgtcgtgggatctggcgctgaataccgccgtcagctttgtcacgaataccaactggcaatcttacagcggtgaaaccacgttgagctatttcagccagatggctggcttaacggtgcaaaactttctttctgccgccagcgggattgcggtgatttttgccctcatccgtgcgtttacccgccagagcatgagcacactcgggaatgcctgggtcgatctgctacgcatcacgttatgggtgctcgtccctgtggcgttgttgatcgcactgttttttattcaacaaggtgcgctgcaaaactttcagccttatcaggctgtgaataccgttgaaggagcgcaacagctgttacccatggggcctgtagcttctcaggaagcgatcaagatgctcggtactaacggcggtggcttctttaatgccaactcgtcgcatccgtttgaaaacccaaccgcactgaccaacttcgtgcagatgctggcgatcttcttgatcccaacggcgctgtgctttgcctttggtgaagtgacgggcgatcgccgccaggggcgcatgttgctgtgggcgatgtcagtgatttttgtcatctgcgtaggcgtggtgatgtgggcagaagttcagggtaatcctcatctgctggcgctcggcgcagacagcagcatcaatatggaaggtaaagagagccgtttcggcgtgctggtcagtagcctgtttgcggtcgtgactacggcggcttcctgtggcgcggtgattgcgatgcatgattcgtttaccgctctcggtggcatggtgccgatgtggctgatgcaaattggtgaagtggtgttcggcggtgtcggttctggtctttacggcatgatgctgtttgtcctgctggcggtgtttattgccgggctgatgattggtcgtacaccggaatatctgggtaaaaaaatcgacgtacgcgagatgaaactgactgcactggcgattctggttaccccgacgctggtgctgatgggcgcggcgctggcaatgatgaccgacgccggacgtagcgccatgctcaaccctggcccgcatggttttagcgaagtgctgtacgccgtgtcatccgccgctaacaacaacggcagcgcctttgccggattaagcgccaactccccgttctggaactgtttactggcgttctgcatgtttgtcggtcgcttcggggtgattatcccggtgatggcaattgccggttcgctggtgagtaaaaagagccaacccgccagctccggcacgctgccaacgcacggcccgctgtttgttggcctgttaatcggcaccgtgttgctggttggcgcactgacctttatccctgccctggcgcttggtccggtggcggaatatctctcctgatgatattgagtgagcactgaatatgagtcgtaaacaactggcgctattcgaaccaacacttgtcgttcaggcgctgaaagaagcggtgaaaaaattaaacccgcaggcgcaatggcgcaatccggtgatgtttatcgtctggatcggcagtctgctgaccacctgtattagcatcgcgatggcaagcggtgcgatgcctggcaatgcgctgtttagcgcggcaattagcggctggctgtgggtcaccgtactgttcgctaatttcgccgaggcgctggcagaaggccgcagtaaagcgcaggccaacagtcttaaaggggtgaaaaaaactgcctttgcccgcaagctgcgtgagccgaaatatggcgctgcggcggacaaagttcctgccgatcaactgcgtaaaggtgacatcgtgctggtagaagctggcgatattatcccctgcgatggtgaagtcattgaaggcggcgcatcggtcgatgaaagcgccatcaccggggaatcggcaccggtgatccgtgaatccggcggcgattttgcctccgtcaccggcggcacgcgtattctttctgactggctggtgattgagtgtagcgttaaccccggtgagacatttctggatcggatgatcgcgatggtggaaggcgcacagcgacgcaaaacaccgaacgagattgccctgactatcctgctgattgctctgaccatcgtctttttactggcaaccgccacgctgtggccgttttccgcgtggggcggtaatgccgtgagtgtaacggtactggtggcgctgctggtctgtctgatcccaaccactattggcggcctgttgtcagcgatcagcgtcgccgggatgagtcggatgctgggcgcgaatgtgattgccaccagcggacgtgcagttgaagcggcaggtgacgttgacgttctgctactggataaaaccggcaccatcacactcggtaaccgtcaggcgtcggagtttatccctgcgcagggcgtggatgaaaaaacgctggctgacgccgcacaactggcttcgctggctgatgaaacgccggaaggccgcagtattgtgatcctcgccaagcaacgttttaacctgcgcgagcgcgatgtgcagtcgctccatgccacctttgtaccgtttactgcgcaaagccggatgagcgggatcaacatcgacaaccgcatgatccgtaaaggttctgtcgatgccattcgccgccatgttgaggctaacggcggtcacttccctaccgatgttgatcaaaaagtcgatcaggttgcgcgtcagggggccacgccgctggtggtggtggaaggttcccgtgtgctgggcgttattgcgctgaaagatatcgtcaaaggcggtattaaagagcgcttcgcccagctgcgcaaaatgggcattaaaacggtgatgattaccggcgataaccgtctgactgccgccgccattgctgcggaagcgggcgtcgatgattttctcgccgaagcgacaccggaggccaagctggcattgattcgtcagtatcaggcggaaggccgtttggtggcgatgaccggcgacggcaccaacgatgctccagcgctggcgcaggcagatgtcgcggtggcgatgaactccggtactcaggcggcgaaagaagcgggcaatatggtcgatctcgactctaacccgaccaagctgatcgaggtggtacatattggcaaacagatgctgatgacccgtggctcgctgaccaccttcagcattgccaacgatgtggcgaaatacttcgccattattccggcggcgttcgcggcaacgtatccgcagttaaatgcgctgaacatcatgcgccttcattcgcccgactccgccattctcagtgcggtcattttcaacgccttgattatcgtctttttgattcctctggcgttaaaaggcgtgagttataaaccgcttaccgcttctgccatgttgcgccgtaacttatggatttacggtctgggtgggctgctggtgccgtttattggtatcaaagtcattgatttactgctgaccgtttgcggtctggtgtgaggtttaccatgcgtggcttacgtccggcattatcgacatttatctttctgttattgattactggcggcgtttacccgctgctgaccaccgtgctggggcaatggtggtttccctggcaggccaacggttcgttgattcgtgaaggtgatacggtgcggggttcggcattaatcgggcagaattttaccggcaacggctattttcagggtcgcccgtcggcaacggcagaaatgccctataatccacaggcttctggcgggagcaatctggcggtcagtaaccctgagctggataaacaaatagccgcacgcgttgctgcattacgggccgctaacccggatgccagtacgaacgttccggttgaactggtgacggcatcggcaagcgggctggacaataatatcaccccgcaagcggcggcctggcaaatcccacgcgtggcgaaagcgcgtaatctcagcgttgaacagctcacgcaactgatcgcaaaatacagccaacaaccgctggtgaaatatatcggccagccggttatcaacattgttgaactcaatctggcgctggataaacttgatgaataacgaacccttacgtcccgaccccgatcgtctgctggaacaaactgccgcgccgcatcgggggaagctgaaagttttcttcggtgcctgtgcaggcgtcgggaagacctgggcgatgctggcagaagcacagcgactgcggacgcaagggctggatattgtggttggcgtggtagaaacccacgggcggaaagataccgccgccatgctggaagagctggctgttctgccgccaaaacgcctggcgtaccgtgggcggcatatcagcgagtttgatctcgatgccgccctcgcccgccgtccggcgctgatcttaatggacgaactggcgcacagtaatgcgcctggttctcgtcatcccaaacgctggcaggatattgaagagctgctggaagcaggcattgatgtttttactaccgtcaacgttcaacatctggaaagcctgaatgatgtggtcagcggcgtcaccggaattcaggtacgggaaaccgtgcccgatccttttttcgatgccgccgacgacgtggttctggtggacttgcccccggacgatctgcgccagcggctgaaagaaggcaaagtctatattgccgggcaggcggagcgcgccattgaacattttttccgcaaaggcaatctgatcgccctgcgcgaactggcactgcgccgtactgccgatcgcgtagatgagcaaatgcgcgcctggcgggggcatcctggcgaagagaaagtgtggcacacgcgcgacgcgatccttttatgcatcgggcataacaccggcagtgagaaactggtccgcgcggcggcgcggctggcgtcgcggctgggtagcgtctggcacgcggtgtatgttgaaacccctgccctgcatcgcttaccggagaaaaaacgtcgggcaattctcagcgccttacgtctggcgcaggagctgggcgcggagacggcaacactttctgatccagcggaagagaaagcggtagtgcgttatgcccgtgaacataatctcggcaagattattctcggtcgcccagcctcgcgccgctggtggcgtcgggaaacgtttgctgaccgactggcgcgcatcgcccccgatctcgatcaggtgctggtcgcgcttgatgaaccacccgcccgcacgattaacaacgcgccggatagccgctcttttaaagacaagtggcgggtacagattcagggatgcgtggttgccgccgcgttatgcgccgttatcactttaattgccatgcagtggctgatggcgtttgatgccgccaacctggtgatgctgtatctgcttggcgtggtggtagtggcgctattttatggacgctggccttcggtggttgctaccgtcattaatgtggtgagtttcgatctcttttttatcgccccacgcggcacgctcgccgtctctgatgtgcaatatctgctgaccttcgcggtgatgttaaccgtcgggctggtgatcgggaaccttactgctggcgtgcgttatcaggcgcgggtagcccgttaccgcgagcaacgcacacggcacttatatgaaatgtcgaaagctctggcggtgggccgcagtccgcaggacatcgccgccaccagcgaacaatttattgcctccacgtttcatgcccgcagtcaggtgttgttgcccgatgacaacggtaaattgcagccgttaacacatccgcaaggaatgacgccatgggacgatgccatcgcgcagtggagttttgataaaggcctgcctgcgggtgcgggcaccgacacgttacccggcgtgccgtaccagattttgccgctaaaaagcggcgagaaaacctacggactggtggtggtggaaccggggaatctgcgccagttgatgatcccggagcagcagcgcctgctggagacatttacgctgttagtcgccaatgcccttgagcggctgacactgaccgccagcgaagaacaggcgcggatggcaagcgaacgtgaacagatccgcaacgccctgctggcggcgctttcgcatgatttacgcacgccgcttacggtgctgtttggtcaggcagaaatcttaacgctcgatctggcaagcgaaggatcgccccacgcccgccaggccagcgagattcgtcagcatgtgctgaacactacccgactggtgaataatctactggatatggcgcgaattcagtccggcggctttaatttgaagaaagagtggttaacgctggaagaagtggtcggtagcgcgctgcaaatgctggaaccgggtttatcgtcgcccatcaatctttctctgccagaaccgctgaccttaatccacgttgacgggccactctttgaacgggtgctgattaatctgctggagaacgcggtgaaatatgcgggtgcgcaggccgaaattggtatcgatgcccacgttgagggcgaaaatctacaactggatgtctgggataacggccccggtcttccgccaggccaggagcagacgatatttgataagtttgctcgcgggaataaagagtcggcagtaccgggggtagggcttggactggcaatttgtcgggcgatagtggatgtacacgggggcactattaccgcgttcaaccgaccggaaggtggtgcctgttttcgtgttacacttccccagcaaaccgctcctgaacttgaagactttcatgaggatatgtgacaaacgttctgattgttgaagatgaacaggctattcgtcgctttctgcgcacggcgctggagggcgacgggatgcgcgtctatgaggccgaaacgctgcaacgcggcttgctggaagcggctacccgtaagccagatttgattattctcgatctcggcctgcccgatggtgatgggattgagtttatccgcgacctgcgccagtggagcgcggtgccggtgattgtgctttccgcacgcagcgaagagagcgacaaaatcgccgcgctggatgccggagcggatgattatctgagtaagccgtttggcattggcgaattgcaggcccgtctgcgcgtcgctttacgccgccactccgccaccgccgcgcccgatccgctggtgaaattttccgatgttaccgtcgatttagccgcccgcgtgattcaccggggtgaggaagaggtgcatctcacgccgattgagttccgcctgctggcggtgctgctgaataatgccgggaaagtgctcacccagcgccagttactcaatcaggtgtgggggccaaacgcggtcgaacacagtcactatttgcgtatttatatgggacatctgcgacaaaaactggaacaggatcccgctcgcccccgccatttcattactgaaaccggtattgggtatcggtttatgccatgaatgtttattcaataaatgcgcttaaataattattaatttattattaaacctgccaaaaatattattatttggcaggtttaatttcttaacgcaaatataaaacacaaaattacaacatttaaataacaaaacagcatctaatatggcgctattcataattaatgatttattatttggggtatgatcgttttttgttgatcttcttcacagattatagccatttcatggatagaataactctaccttcaactgacacagcaagaggtaaaggtaaatggaaaataataaccgcttaatgcctcatataaggcggacaacccatatcatgaagtttgcccatcgtaatagttttgactttcatttctttaatgcccgctagtcttctgactaaagggcaccccaacgtacaggtctccctgactttaagcattacaggttaatacctgtattcctcggtgctcatatactgctaacccttttaaactctaaataattcgagtcgcagcacttgcaacttgaggtatgacgagtatagccagttaccgggctggtctgggttattgcatctgcaaaaagcaaactactgatttatttatcagcggtggagctttgctttttttccggcgtgatcgatttctcctttgagaaattgaggacctgctattacctgaaataaagagatgaacaaaatgtcagaattaaaaattgccgttagtcgttcttgcccggattttttttccactcatcgtgcatgcgtgaatatagacgaaagtaattatattgacgttgccgccattattttatcagtcagtgatgttgaacgtggaaaactcgatgaaatagacgctactggctatgacattcctgtttttattgcaacggaaaatgaagaacgtgtacccgcagaatatctgccacgtatttctggtgtcttcgaacattgtgaatcacgtaaagagttttatggacgtcagttagaaaccgctgccagccattatgaaacgcaactgcgcccgcccttcttccgcgcactggtcgattatgttaatcagggcaatagtgcttttgactgccctggtcatcaggggggtgagtttttccgtcgccatccggcaggcaatcagttcgtggaatactttggcgaaatgctcttccgctctgacttgtgtaatgctgacgtagcaatgggcgatctgctgattcatgaaggtgcgccatgtattgcacaacagcatgcggctaaagtctttaatgccgataaaacctatttcgttttaaacggtacttcatcttctaataaagtggtcttaaacgcattgctgacgccgggcgatctggtgttgtttgaccgcaataaccataaatctaaccaccacggtgcgttgctacaggctggcgcgacaccggtttatctggaaaccgcacgtaacccgtatggctttatcggtggcattgatgcgcactgttttgaagaaagttacctgcgtgagctgattacagaagttgcaccgcagcgggcaaaagaggctcgtcctttccgcctcgccgttattcagctaggcacttacgacggtacgatttataacgcccgtcaggtggtggataaaattggtcatctgtgtgactacatcctctttgactccgcatgggtcggctatgaacagtttattccgatgatggctgactgttcgccgctgttgctggatcttaatgagaacgatccgggtattctggttacgcaatccgtacataaacagcaggctggtttttctcaaacttcacaaatccataaaaaagacagccacatcaaagggcaacagcgttatgtaccgcacaaacgcatgaacaacgcctttatgatgcacgcctccaccagcccgttctatccgctgtttgccgcactggatatcaacgccaaaatgcatgaaggtgtcagcggtcgtaatatgtggatggattgtgtggtaaatggcattaatgcccgcaaactgatcctcgataactgtcagcatattcgtccgttcgtacctgaactggtggatggtaaaccctggcagtcgtatgaaacggcgcaaattgcggttgatctgcgcttcttccagtttgtaccaggggaacactggcattcttttgaaggctatgcagagaatcaatactttgtcgatccttgcaaactgttgctgacaaccccaggtattgatgcacgtaacggcgaatatgaagcgttcggtgtacccgcgacgattcttgctaacttcctgcgcgaaaatggcgtagtgccggaaaaatgcgatcttaactccatcctcttcctgctgactccggcagaagatatggccaagcttcagcaacttgttgccctgctggtacgcttcgaaaaactgcttgagtccgacgcgccattagcagaagtgctgccttccatctacaaacagcatgaagagcgctacgccggttataccctgcgtcagttgtgtcaagaaatgcatgatttgtatgcccgtcacaacgtgaaacaactgcaaaaagagatgttccgtaaggaacacttcccacgcgtaagcatgaatccgcaagaagccaactacgcctatttacgcggtgaagtggagctggttcgtctgccggatgcagaaggccgtatcgctgccgaaggtgcgcttccttatcctccgggtgtgctgtgtgttgttccgggtgaaatctggggtggtgctgttttgcgttacttcagcgctctggaagaagggatcaacctgctgccaggttttgcaccggagctgcagggtgtctatatcgaagaacatgatggtcgtaagcaagtttggtgctatgtcatcaagcctcgtgatgcgcaaagcaccctgttgaaaggggaaaaattatgagtcaggctaaatcgaacaaaatgggcgtcgttcagttaaccatactgacgatggtcaacatgatgggctccggtatcatcatgctgccgacaaagcttgccgaagttgggacaatttcaattatctcctggctggtgacagccgtaggctcaatggcactggcatgggcattcgcaaaatgcggtatgttcagccgtaaatcaggtggtatgggcggttatgccgagtatgctttcggtaagtccggcaattttatggcgaactacacctacggtgtctcgctgctgattgctaacgtcgcgattgctatttcggcggttggttacggcaccgaactgctcggcgcgagtttgtcgccagtgcagattggtcttgcgaccatcggagtgctgtggatttgtaccgtggctaactttggtggtgcgcgcattaccgggcaaatcagtagcattactgtgtggggagtcattattccggtggtaggcctgtgcattatcggctggttctggtttagcccgacgctttacgttgattcctggaatccgcatcatgcaccgttcttcagtgcagtaggttcttccatcgctatgacgctgtgggcttttctcggtctggagtctgcgtgtgcgaatactgatgtagtggaaaacccggaacgtaatgtgccaatcgcggtactcggcggtacgttaggtgcggcggtgatttatatcgtctccaccaacgtgattgcagggattgtgcctaatatggagctggcaaattcaacggcaccatttggcctggccttcgcacagatgttcacaccagaagtgggtaaagtcattatggcgctgatggtgatgtcctgctgcggttcgctgcttggctggcagttcaccattgcccaggtgtttaaatcttcatctgatgaaggctacttccctaaaattttctcccgtgtaaccaaagtggatgcaccggtgcagggaatgttgaccattgtgattatccagagcgggttggcgctgatgacgattagcccgtcgctaaacagtcagttcaacgtgctggttaacctggccgtggtgaccaatatcattccgtatattctgtcaatggcggcattagtcattattcagaaggtcgctaatgtgcccccctcaaaagcgaaagttgcaaactttgttgcttttgttggcgcgatgtatagcttttatgcgctgtactcatccggggaagaagccatgctgtacggttccatcgtgaccttccttggttggacactgtatggtctggtatcaccacgctttgaactgaaaaataaacacggttaaaaaagcaaagtaaaaaagggcgatcttgcgaccgccctttttttattaaatgtgtttacgcgtttttcagaacttcgctaacaatctcaaccgcttctttctcaatctgcttgcgatgttcttcaccgaggaagctttcgcagtagatcttatatgcgtcttccgtgcctgacggacgcgcggcgaaccagccgttgtcggtcatcactttcagaccgccgatagaagcaccattgcccggtgccgccgtcaggcgcgcggtgatcgggtcgcctgcaagggtgctggcgctcaccatttccggagacagcttagacagcgccgctttttgtgcggaagtcgcggctgcctgcaaacggttgtagctcggcgcaccaaagcgttttgccagttcgttgtagtgttcctgcgggttcttaccggtgacagcggtgatttccgccgccagcagacacataatgatgccgtctttgtcggtggaccacggcgtgccgtcgaaacgcaggaaggaagcccctgcgctctcttcgccgccaaagccgaagctgccgtcgaacagaccatcaacaaaccatttgaaacctaccgggacttctaccagcttacggcccaagtcattgaccacacggtcgatcatcgcagaagaaaccagcgttttaccgacagcaacatctttgccccactgcggacgatgctggaacaggtagttgatcgccaccgccaggtagtggttcggattcatcaaacctgccggagtgacgataccgtgacggtcataatccgggtcgttagcaaacgccagatcgaacttatcacgcagtgccagcaggcccgccatcgcacactcggaggagcagtccatacggatcgcgccgtctttatcaaggtgcataaagcggaaggtttgatcgacctgatcgttaacgatggtcaggttgaggttgtaatactcgccaatacgcttccagtattcgataccggaaccgcccagcggatcaacgcccagcgtcaggcccgctttctgaattgccgccatatcaacgatatcggccagaccttccacaaacggctgcaccagatcctgctcttttacatgaccggatgccatcgcttcgtcgagggagatacgcttcacgcctttcaggccatcggccatcagtgcgttggccctgtcttccaccactttggtgacgttggtatcagccgggccaccatttggcgggttgtacttgataccaccatcttccggcgggttatgggacggtgtaatcacgataccgtctgccagcgggccaccttttttattgtgaaccaggatggcattggaaatggcaggtgtcggagtgaagccattgttttcctgcacaatgacatcaacgccgttcgctgccagcacttccagtacggaaatgaacgcaggctcggacagggcgtgagtatctttacccacatagcaagggccagtgatgccgtttttcgcacgttcttcagcaattgcctgagcgatcgccagaatgtgcggctcgttaaagctgtggcgcgctgcactgccacggtgaccggaagtaccgaatttcaccgcgtgctccgcattccctgcttctggtttcagtacataatattgcgccgtcagttgggcgacgttaatcaaatcactctgttgtgcaggttggcctgcacgattgtggattgccattgctttgtcctttgtctgcaacgttttagatagttccgcaaaccttctcaatcaattccgccgggaattgcatcgactgcatgatgtgttcgatcatgctgcatttacggccggtgttggtgttggtgatcacccaatacggcgtgcctggcacatgtttcggcttggtctgattaccatttttcagcagcgtttgttcatctgccgcaaagtaaacgcgtgtacgaccgtgcaacgattccgttgcttcggcaaacgcctgggcgtcaagagaatatagtgtagacaacagcagcataaagcgattgaccgctcgcttttgctctgcgtattcatccgaaagcagaagttcacgcattgcgcgaaccttgtctttaatcgttttgaccggcttcgcttcgacgatagcaggtgacgcaacgcgaacctctttcgtcaccggagcagcaggctgtgatgcggcggaaaatttcaacatacgccgtaaaatgtcggatgcgctctcgccgatatgcttagtgtggctggcaatatagctgtagagttcatcatcaacttcaatcgttttcatcttaatccagtgcagtgtcttagctgaatacaagtcgccaggagtatatgaataaatcccggcagcggatagcgtcaagcctggcttgcagaaaaactcggaataaaccttatttgttgcagccctgtggcacaatggtcaacataataccctaacccgacaacgcgaaaaaaagaactttgccatgaaattgaatatccgcgcgcaaactgcacaaaaccagcacaataattctcccatcgttcttgtccatggtctgtttggtagcctcgacaaccttggcgtactggctcgcgatctggtaaacgatcacaatatcatccaggttgatatgcgtaaccacggtctttcaccgagagatccggtaatgaattacccggcgatggcgcaggatcttgttgatactttggatgcacagcagatcgacaaagcaacatttatcggtcactccatgggcggtaaagcggtaatggcacttactgcactggcccccgatcgcatcgataaactggtggcgatcgatatcgcaccggtcgactatcacgtacgccgtcatgatgagattttcgcggctatcaacgcggtcagtgaatcggacgcacaaactcgccagcaagcagcagcaataatgcgccagcatcttaatgaagaaggggtgattcagtttctgttgaaatcttttgttgacggggagtggcgctttaacgtgccggtattgtgggatcagtatccgcatattgtgggttgggagaaaatcccggcatgggatcaccctgccctgtttatccctggcggcaattctccgtatgttagcgagcagtaccgtgatgatttactggcacaatttccacaggcacgggcgcatgtgattgcaggcgcgggtcactgggtccatgctgaaaaaccggatgcggtattacgcgctatccgtcgctatctcaatgattaacgcaactgattaaaaacccagcgtccgcgtcgctttccgcgcgtgggcgttggcgtgactcatcgcgctgatgtattatggcgcgctatccatccgggcagaggcctggctgattgtttcccccgaagtcaccaagatcatggccaaagaacaaacggaccgtacgacattagatctgttcgcgcacgagcgtcgaccgggacgaccgaaaactaatccgctttcgcgcgatgaacagctgcgtattaataaacgcaaccagctaaaacgcgacaaagtacgtggccttaagcgtgtcgaactgaagctgaacgcggaagctgtcgaggcgctgaacgagctggcggagtcgcgcaatatgagccgtagcgaactgatcgaagagatgttaatgcagcaactggcggcgctgcgtagtcagggcatcgtttaaatttccactttcatgtagcacagtgtgcagtcctgctcgtttgctgattccgcaagactgcctgttctgctatgattgcctttatccgtgggcaattttccacccccatttcaataagtttcaagaggttatttcactcatggctatcactggcatctttttcggcagcgacaccggtaataccgaaaatatcgcaaaaatgattcaaaaacagcttggtaaagacgttgccgatgtccatgacattgcaaaaagcagcaaagaagatctggaagcttatgacattctgctgctgggcatcccaacctggtattacggcgaagcgcagtgtgactgggatgacttcttcccgactctcgaagagattgatttcaacggcaaactggttgcgctgtttggttgtggtgaccaggaagattacgccgaatatttctgcgatgcattgggcaccatccgcgacatcattgaaccgcgcggtgcaaccatcgttggtcactggccaactgcgggctatcatttcgaagcatcaaaaggtctggcagatgacgaccactttgtcggtctggctatcgacgaagaccgtcagccggaactgaccgctgaacgtgtagaaaaatgggttaaacagatttctgaagagttgcatctcgacgaaatcctcaatgcctgatgtgatgcggcgtagactcatgtctacgccgtattaatagataatgccaatcaaaataattgctacaaatttgtaacttttgctgttgtacctgtacaatgtcccggtgttcaagtggccttgttgttgtaaatgtaagctgtgccacgtttttattaacaatatttgccagggacttgtggttttcatttaggcgtggcaattctataatgatacgcattatctcaagagcaaattctgtcacttcttctaatgaagtgaaccgcttagtaacaggacagattccgcatgactgataacaataccgccctaaagaaagctggcctgaaagtaacgcttcctcgtttaaaaatcctggaagttcttcaggagccggacaaccatcacgtcagtgcggaagatttatacaaacgtctgatcgatatgggtgaagaaattggtctggctacggtatatcgcgtactgaaccagtttgacgacgctggtatcgtcacccgccacaattttgaaggcggtaaatccgtatttgaactgacacagcaacatcaccacgatcacctgatctgcctcgactgcggcaaggttatcgaatttagtgatgattccatcgaagcgcgtcagcgtgaaattgccgcaaaacatggcattcgcctgactaaccacagtctctatctttacggtcactgtgccgaaggcgattgccgcgaagatgaacatgcgcacgaaggcaaataagccagcctgaatgagaaaaagccaacctgcgggttggcttttttatgcaagggaaataagaaaagcgagagttacagctctcacttatttgttattactgcgaatttcctgccaaactttatcacaatcggctttcaccgcctgatcatttccggtttgcgttgcacgcagacactgctgataatccagtacgcggacactttcctggtcggcaaaatgctgatgttgtttctctttcttcagcacgtttaacacgctctggcaggcttcaattttttctggcgaaccttgtgcggtgttgatacaggcgctgtatgcctctttcagacgactgtcttcctgtggcgcggttgattgcgcacaagctaccagccccgatgccattatggcgatgagaatcagttttttcatagcaaattcctcaaacgtgcggcaggcacaaaacctgccgcgtcgggcatcagaagatggtgaatggtgcgattaccataaatttcacgtcacgctcatcctggaagatgttgccgtaaccaccgccccagcttgggatgtcggagtggttgtcgtattcggtgaagtgcagtttgaacatcgtgcctttggcgcgaccgtcctgaatggtgtagaccgcatccaggctgtatgcagactcttcaatagtccggtttttgtcgtagtacgcatccggattgctctgccaggtcgcaggtttagcatcccatgcgtaaacgtaggaagcgccgatggcgaagcctggaagattccagtttttcaggtcatacatcgcaccgaagaagaccgctttttcgccgttggcgttgaagtcggaacggttatcccaccagatatccaggcggccgttggaggaagcgtaggttggagtcatacgttgcaggaagtatccctgctgaccgtcagccttaacccaggtgccttcgaggcgcaaatccactacgtcagccgcccggtaaccaaaggtcaacgcttgcagccaggcggtgccgtcataaaggtcgttgacgctgcgatcgtcaactttatcgcgcgtaccatagaactggtagctggtggttaacgggctaccggcgatatcaaatttgtagctggctttggcaaaatattgatcgatatacccttccgcctgaccaaatgccgcttccagtacgaagttatttttgaagtcgtatttcgcaccgatggagtgcaggtaatcaactttggtggttttatcgttctgataaaactcatccatttccagatgccacggcgctttgtattcgttggtccacatgtaggagaaactcaaggcaccagcatcgccgtaatcaaaattcgccccggcttccgccccctgataagtacctggcataaagctccagtgcggcgctaacagcgtttgaccagttggctgaatgtaacctgccctcgcccaaaccggaccgtatttaaatttggccgcagctttatacaggcttataccgcttttgtcgccggaccagtcttcgtcataggctttattactttttgaaaacgcgatttcgttcgggtgggagctgtcgccgttttccgccatttcaatcgccgtaaacgcagcaatatcaaggccgaacatatcagcagcataaccggactgaaaatcgaggttggcattccaggtggagtgagaaaggttggttttgtatttgtcgccgtcggtaacatctttacggtcgcgttcacgctgccagtaatatataccgccggttaaggttgaatcgtcgatgaatccttcggcgcgagcctccggcattgccataaagcccgacattgctgtaacaccggcgatagccagcgccagcgtactacgtttgccactaaacgtacgcatgggttaatcctctttgacgtataaattgctgcaccaaaggtgaacagcgaaaaaataaaaattaaaaaagtagcgttgagaaaagtctcgctgactacaggaacagactatttttcgcgacgcgaattatcaatctctttctgtaaccagaatgtaagaacatgagcaaccgcacatattttgatgatttttgttacaaggcttaagtttgcggttgaaaggcttgcagaagaataaaagcgtgaatttccagcaagatgaaagcggttacattttatttaattatggtttgtgattttaaatttattttatggataaattgcgaagcggaattaattcgcgaagaaaagcagaaaaaacgccgcagagtgcggcgtttgggattgtttgctatttcttgccggatgcgacgtaaatgcctcacccggcctggtagaacttaaaattactcgcctactttcgcccaggtatcacgcagcccaacggtgcggttaaataccggtttttccgctgtggaatggcggctgtcgaggcagaagtaaccttcacgctcaaactggaatgctttacccgcaaccgcatctttcagcgacggttcagcaaagccctgtttgatcaccagcgattccgggttaatcaccgacaggaaatcatccgcagcaccagggttcggcacgctgaacagacggtcgtacagacggatttcaaccggcagcgcatgtgccgcgctcacccagtgaataacacctttgactttacgaccatctgccggatctttgcttaaggtgtcggcgtcataagtacagaagatggtggtgatattgccttcggcatctttctccacgcgttcagccttaatgacgtaagcattacgcagacgcacttctttacccagcaccagacgtttgtactgcttgttagcttcttcgcggaaatcggcgcgatcgatccaaatctcaccgctaaacggcacctgacgactccccatttccggtttgttcggatggttcggcatggtgaccatttcgccttcgccctgatagttttcgataaccagtttcaccggatcgataaccgccattgcgcgcggcgcattttcgttgagatcttcacggatgcaggattccagcgatgccatctcaatggtgttgtcctgcttggtcacgccgatgcgtttgcagaactcacgaatagaagcagcagtgtaaccacgacgacgcagaccggaaatggtcggcatacgcgggtcatcccagccttcaacgtgcttgtcggtcaccagcaggttcagcttacgcttggacatcacagtgtattccagattcaggcgcgagaattcgtactggcgcgggtgaacaggaatggtgatgttgtccagcacccagtcgtacaggcgacggttgtcctggaactcaagcgtacacagagagtgcgtaataccttccagggcatcgctgatgcagtgggtgaagtcgtacatcgggtagatgcaccacttgttgccagtctggtggtgttcagcaaatttaatacggtacagcaccggatcgcgcatcacgataaacggtgaagccatgtcgattttcgcacgcaggcaggctttaccttcttcaaaaccaccggcacgcattttttcgaacagcgccaggttctcttcaacgctgcggtcgcggtacgggctgtttttacccggttgcgtcagggtgccgcggtattcgcggatctgttccggcgtcagttcatcaacgtacgccaggcctttattgatcagttcgatcgcataggcgtggagctgatcaaaataatcggaggagtaacggacgttaccagaccagtgaaaacctaaccactctacgtcgtttttgatcgactcaacatactcgatatcttcttttaccgggttagtgtcgtcgaaacgcaggttgcactggcctttatagtcctgggcgatcccgaagttcaggcagatagatttcgcatggccaatatgcagatagccattcggctccggcgggaaacgggtgtgtactgtggtgtgcttaccactggccagatcttcatcgatgatctgacggataaagttagtcgggcgggcttctgcctcactcatcgtggattcctcaaagcgtaaacaacgtataacggcgtatgatcttataagcgggacaggctgacaactgttagttttttaaaattgataatctaacaaggattatggggatgattgatgaaaaaaaaagcggcagagaagatctccaccgcttgtcattgttggatgcgacgctcaagcgtcgcatcaggcataaagcagattactttttgatttcatacagcggtgtttgacccgccacaacatggccctgagctttaatgatcaagccactgaaatcgtcgatattgctgcaaaccaccgggctaatcatcgagcgggcgttagcgttcaggtaatccagatccatttccagaatcggttgccctgcgcttacctgcgcaccctcttccaccagacgtttaaagcctttaccttccagcgctacggtgtcgatacccatatggacgacgatctccgcgcctttttcggtttccaggcagaacgcgtggttggtgttgaagattttcacgattgtccctgcggctggtgatacgacgattttatctgtcggtttcaccgccacaccgtcacccaccgctttgctggcgaatgcttcgtcaggaacctgatccagtgccacgacatcaccggtaatcggcgataccagctccgcgatagataccgcgtttggtacagcctgcggttttgctacaggcgcggcagttgccggagttgcttcagctgacgcagcggctaccggaccacgggcaacgactttcttcatcgcatcgccgatggattctgctttcgcgccaacaatcacctgaatagtctgtttgttcagtttcactacaccagaagcacccagacgtttacacatcgtatcgttgacgcgggcagagtcagccacggtcaggcgcagacgggtgatacaggcgtcaattgctttcaggttgtcagtgccgccaaccgcagcaatatagttggtcgccagttgattgaggccttcttcagtgttgctgttggcttcttcagtaacgatctcgtcttctttatcttcacgacccggcgttttcaggttgaacatgcggataaccaaactgaacaccacgaagtagatagcgaagaagacaacacccataaccagcagcatccagacgttctggctggcggccggcaggttatacatcaacgcgtagtcgatagcccccgcagagaaagagaagccagcatggatacccagcagtgttgccacaaacaggctgataccggtcagcagtgcgtgcaggaggtacagcagcggtgcaaggaacatgaacaggaattccagcggctcagtcacaccggtcaggaacgcagtaacagcaacagaaagcagcatcccgccaaccatcggacgacgctctttcggtgctgcgaagtacatcgccagcgccgcacccggcagaccgaacatcataatcgggaagaagccggacatgaacatccccgcggtgccgtcaccggcatagaagcggttgatatcaccgtggaaaaccgtacccgccgcgttggtgaattcaccaatctggaaccaggcgatggtgttcagcacctgatgcagaccggttgggatcagcagacggttgatgaaaccaaagataccggaacccagcgcgcccgcagaaacgatccactcgcctcctgcatggatagcgtgctgtaccggcggccagacgtaaccaaaaatggccgccagcaccaggcagaagaagccggtggcaatcggcacaaagcgtttgccgccgaagaagctcaggaagtccggcagtttaatatcggaccaacggttataggctgcgccaccaaccagaccggtaatgatacccgccagtacacccatgtttatttctgggttgatggtcaccatcgctttggttaacacaaagtaacctaccgcacccgccagcgccgccgcacctgcgctgtctttcgaccagctggatgccacaccgatggcgaagattaatgcgaggttatcaaaaatcgcaccgcccgcctgggcaataaacgcaacgttaagtaaatctggctgaccgaatcgcagcaacagtgccgccaccggcagcaccgcgatagggagctgtaacgccctaccgagtcgctggaaaaaacctaaaatattcatcttattccccctacgagaaccctatttggctcgtttaaagccgtatttttattttgctgcaaattgtactgccgatgttctgtaatcagattgttagatcatctgctacagagtgtgtgaaaatttaattcgtatcgcaaattaaacgcgtgtcttttgtgagttttgtcaccaaatatcgttatcatcactcccttttactggctaaaccagaaaacttattttatcattcaaaaaatcaggtcggattgacgcctgtctgcgcaaatccaggttacgcttaaagatgcctaatccgccaacggcttacattttacttattgaggtgaataatgagactgatccccctgactaccgctgaacaggtcggcaaatgggctgctcgccatatcgtcaatcgtatcaatgcgttcaaaccgactgccgatcgtccgtttgttctgggcctgccgactggcggcacgccgatgaccacctataaagcgttagtcgaaatgcataaagcaggccaggtcagctttaagcacgttgtcaccttcaacatggacgaatatgtcggtctgccgaaagagcatccggaaagctactacagctttatgcaccgtaatttcttcgatcacgttgatattccagcagaaaacatcaaccttctcaacggcaacgccccggatatcgacgccgaatgccgccagtatgaagaaaaaatccgttcttacggaaaaattcatctgtttatgggcggtgtaggtaacgacggtcatattgcatttaacgaaccggcgtcttctctggcttctcgtactcgtatcaaaaccttgactcatgacactcgcgtcgcgaactctcgtttctttgataacgatgtcaatcaggtgccaaaatatgccctgactgtcggtgttggtacattgctggatgccgaagaagtgatgattctggtgctgggtagccagaaagcactggcactgcaggctgcagttgaaggttgcgtgaaccacatgtggaccatcagctgtctgcaactgcatccaaaagcgatcatggtgtgcgatgaaccttccaccatggagctgaaagttaagactttaagatatttcaatgaattagaagcagaaaatatcaaaggtctgtaattgttatccctgccctgactccttgctcagggcaatattttttaaaatcgggggtcagaatgtatgcattaacccagggccggatctttaccggccacgaatttcttgatgaccacgcggttgttatcgctgatggcctgattaaaagcgtctgtccggtagcggaactgccgccagagatcgaacaacgttcactgaacggggccattctctcccccggttttatcgatgtgcagttaaacggctgcggcggcgtacagtttaacgacaccgctgaagcggtcagcgtggaaacgctggaaatcatgcagaaagccaatgagaaatcaggctgtactaactatctgccgacgcttatcaccaccagcgatgagctgatgaaacagggcgtgcgcgttatgcgcgagtacctggcaaaacatccgaatcaggcgttaggtctgcatctggaaggtccgtggctgaatctggtaaaaaaaggcacccataatccgaattttgtgcgtaagcctgatgccgcgctggtcgatttcctgtgtgaaaacgccgacgtcattaccaaagtgaccctggcaccggaaatggttcctgcggaagtcatcagcaaactggcaaatgccgggattgtggtttctgccggtcactccaacgcgacgttgaaagaagcgaaagccggtttccgcgcggggattacctttgccacccatctgtacaacgcgatgccgtatattaccggtcgtgaaccgggcctggcgggcgcgatcctcgacgaagctgacatttattgcggtattatcgctgatggcctgcatgttgattacgccaacattcgtaacgctaaacgccttaaaggcgacaaactgtgtctggttaccgacgccaccgcgccagcaggtgccaacattgaacagttcatttttgcgggtaaaacaatatactaccgtaacggactttgtgtggatgagaacggtacgttaagcggttcatccttaaccatgattgaaggcgtgcgtaatctggtcgaacattgcggtatcgcactggatgaagtgctgcgtatggcgacgctctatccggcgcgtgcgattggcgttgagaaacgtctcggcacactcgccgcaggtaaagtagccaacctgaccgcattcacacctgattttaaaatcaccaagaccatcgttaacggtaacgaggtcgtaactcaataagagaaagtatgacaccaggcggacaagctcagataggtaatgttgatctcgtaaaacagcttaacagcgcggcggtttatcgcctgattgaccagtacgggccaatctcgcggattcagattgccgagcaaagccagcttgcccccgccagcgtaaccaaaattacgcgtcagcttatcgaacgcgggctgatcaaagaagttgatcagcaggcctccaccgggggccgccgcgctatctccatcgtcaccgaaacccgcaatttccacgcaatcggcgtacggcttggtcgtcacgacgccaccatcaccctgtttgatctcagcagcaaagtgctggcagaagaacattacccgctaccggaacgtacccagcaaacgctggaacatgccctgttgaatgccattgctcagtttattgatagctaccagcgcaaactgcgcgagctgatcgcgatttcggtgatcctgccagggcttgttgacccggacagcggcaaaattcattacatgccgcatattcaggtagaaaactgggggctggtagaagcactggaagaacgttttaaagtgacctgtttcgttggtcacgatatccgtagtctggcgctggcggagcactacttcggtgcaagtcaggattgcgaagactccattctggtgcgtgtccatcgcggaaccggggccgggattatctctaacgggcgcatttttattggccgcaacggcaacgtcggtgaaattggccatattcaggtcgaaccgctgggtgaacgctgccactgcggcaactttggctgcctggaaactatcgctgccaacgccgctattgaacaacgggtgttgaatctgttaaagcagggctaccagagccgcgtgccgctggacgactgcaccatcaaaactatctgcaaagccgcgaacaaaggcgatagcctggcctcggaagtgattgagtatgtcggtcgtcatctgggcaaaaccatcgccattgctatcaacttatttaatccgcaaaaaattgttattgccggtgaaatcaccgaagccgataaagtgctgctccctgctattgaaagctgcattaatacccaggcgctgaaggcgtttcgcactaatctgccggtggtacgttctgagctggatcaccgctcggcaatcggcgcttttgcgctggtaaaacgcgccatgctcaacggtattttgctccagcatttgctggaaaattaatgtgcttttatagtggcgcttattgttgtcaatattctgggtagtccatgaccattaaaaatgtaatttgcgatatcgacggcgtgctgatgcacgataacgtcgccgtaccgggtgcagcggaatttttgcacgggattatggataaaggcctgccgctggtgttgctgaccaactatccttcgcagaccgggcaagatctggcgaaccgctttgccactgccggtgtcgatgtgccggatagcgtgttttatacctctgcgatggcgactgccgatttcctgcgtcgccaggaaggcaagaaagcgtatgtggtgggcgaaggcgcactgattcatgaactgtacaaagccggtttcactattaccgatgtgaaccctgattttgtgattgttggcgaaacgcgttcctacaactgggacatgatgcataaagcggcctatttcgtcgctaacggtgcacgctttatcgccaccaacccggacacccacgggcgcggtttttatcccgcttgtggcgcgttgtgtgcagggattgagaaaatctccgggcgcaaaccgttctatgttggtaagcccagcccgtggatcatccgcgcggcattaaacaaaatgcaggcgcattcggaagaaacggtgattgtcggcgataacttgcgcaccgacattctggcgggcttccaggcgggtctggagacgattctggtgctttctggtgtttcatcgctcgacgatatcgacagtatgccgttccgcccaagctggatttacccgtcggtcgctgaaatcgacgttatctgaatagcaaccacgtctcagggcgtggtttcttatttttacccatcattaaaatcatcccattcaataaaactcgccaaaaattatcgatccatcaataaatacatcaccacaccctcccctttttcacaaatcagcaatcaccattacgttttttatttttgcactgccaaatcgcttgcgcacggtgctgctttgcggcatttttttaaacaagcaaacacaacaagcaacaaataccaggttaacggagaaggttatgtgttcaatttttggcgtattcgatatcaaaacagacgcagttgagctgcgtaagaaagcactcgagctgtcacgcctgatgcgtcatcgtggcccggactggtccggtatttatgccagcgataacgccattctcgcccacgaacgtctgtcaattgttgacgttaacgcgggggcgcaacctctctacaaccaacaaaaaactcatgtgctggcggtaaacggtgaaatctacaaccaccaggcactgcgcgccgaatatggcgatcgttatcagttccagaccggatctgactgcgaagtgatcctcgcgctgtatcaggaaaaagggccggaatttctcgacgacttgcagggcatgtttgcctttgccctgtacgacagcgaaaaagatgcatatctgattggtcgcgaccatctggggatcatcccactgtatatgggctatgacgagcacggtcagctgtatgtggcctcagaaatgaaagccctggtgccagtttgccgcacgattaaagagttcccggcggggagctatttgtggagtcaggacggcgaaatccgttcttattatcatcgcgactggttcgactttgatgcagtgaaagataacgtgaccgacaaaaacgagctgcgtcaggcactggaagattccgttaaaagccatctgatgtctgacgttccttacggtgtgctgctctcgggtggtctggattcctcaattatttccgcgatcaccaagaaatacgccgcccgtcgcgtggaagatcaggaacgctctgaagcctggtggccgcaattacactcctttgctgtaggtctgccgggttcaccggatctgaaagcagcccaggaagtggcaaaccatctgggcacggtgcatcacgaaattcacttcactgtacaggaaggtctggatgccatccgcgacgtgatttaccacatcgaaacctatgatgtgacaactattcgcgcttcaacaccgatgtatttaatgtcgcgtaagatcaaggcaatgggcattaaaatggtgctgtccggtgaaggttctgatgaagtgtttggcggttatctttacttccacaaagcaccgaatgccaaagaactgcatgaagagacggtgcgtaaactgctggccctgcatatgtatgactgcgcgcgcgccaacaaagcgatgtcagcctggggcgtggaagcacgcgttccgttcctcgacaaaaaattccttgatgtggcgatgcgcattaacccgcaggataaaatgtgcggtaacggcaaaatggaaaaacacatcctgcgtgaatgttttgagtcatacctgcccgcaagcgtggcctggcggcagaaagagcagttctccgatggcgtcggttacagttggatcgacaccctgaaagaagtggcggcgcagcaggtttctgatcagcaactggaaactgcccgcttccgcttcccgtacaacacgccaacctcaaaagaagcgtatctgtaccgggagatctttgaagaactgttcccgcttccgagcgccgctgagtgcgtgcctggcggtccttccgtcgcgtgttcttccgctaaagcgattgagtgggatgaggcgttcaagaaaatggacgatccgtctggtcgtgcggttggcgttcaccagtcggcgtataagtaagaaatgcgaaacagccccggtgaaatccggggctgtttcagttattgaggtgcttgttaattctgatatgcagtaaggaaatgttccgggtttgccacatcactgtttgacaactcatcactgtaggccagtatttcatagattaatttcccaccactattgttgaattccgaatttcatcctgtacgacaaaagaatggctgtagggtggggaaaaaacacaaagtaaacaataattgacgaatatagcgccacgctgttcgcaacctaaccaaacagtcactttcgagcaattttccttgaaaaagaggttgacgctgcaaggctctatacgcataatgcgccccgcaacgccgataaggtatcgcgaaaaaaaagatggctacgtagctcagttggttagagcacatcactcataatgatggggtcacaggttcgaatcccgtcgtagccaccatcttttttgcgggagtggcgaaattggtagacgcaccagatttaggttctggcgccgcaaggtgtgcgagttcaagtctcgcctcccgcaccattcaccagaaagcgttgtacggatggggtatcgccaagcggtaaggcaccggtttttgataccggcattccctggttcgaatccaggtaccccagccatcttcttcgagtaagcggttcaccgcccggttattggggtatcgccaagcggtaaggcaccggtttttgataccggcattccctggttcgaatccaggtaccccagccatcgaagaaacaatctggctacgtagctcagttggttagagcacatcactcataatgatggggtcacaggttcgaatcccgtcgtagccaccaaattctgaatgtgtcgaatacgttcggcaaattcaaaaaccaatttgttggggtatcgccaagcggtaaggcaccggattctgattccggcattccgaggttcgaatcctcgtaccccagccaatttattcaagacgcttacatcgtaagtgcgcccagttggggtatcgccaagcggtaaggcaccggattctgattccggcattccgaggttcgaatcctcgtaccccagccacattaaaaaagctcgcttcggcgagctttttgcttttctgcgttcattcaatgtcgaatgcgatgttgacacgtcttatccttcaatgtcggatgcgacgctgccgcgtcttatccgacctacggttggcacgcatccggcaatgttgtaaggctacaaccctaacgcatatttcagcgcctgacgtttcaacacgccagcacgctccgccgccatcaaaccaagattacgcacaaaacgcagcggcggcagattattactgaatccggcataaaacagatccataccgctctgcataatgaagttatccgccatgcgccgcatctggtaacgcttgaggacaggataactggcccacgcttcgccgtagctgcgggcattcaccagaacatcaatcagggcatcgacatcacgataaccaagattcaccccctgccccgccagcggatggatggtatgcgcggcatcgcccaccagtgcaagccctggttgcacatactgcaacgcatggcgacgcgtcagcggaaacgcaccagcggcaagcggtgtcacgtaacccagacgcgacgggaaatgcttcgcgatttccgtctggagctgcgccatattcatattctgcaactggcgaatacgcgccggagagtcataccacaccagcgatgcccagttatcaaacaacggcagaaacgcacgcggtccgtccggggtaaattgctgccaggtgctgtcgccgggatcgttctcacactgtacgctaatcaacatgcacgactgcgcatactgccaggcatgaacgccaattcccgccatctgccgcacctgagaatttgcgccgtcggcaccaatcaccagtttcgcgcggatcgtttcaccgcccttcagttccagctcctgaagatcattatctcgatgtaatgcaatcagcgagcctggcacacgtaacgttactttcggatgcgcttccagctcctgccacaacgcctgttgcaggactgtgttttccaccatgtagccaagcaacggcaactttaattcggctgcgtcaaataccacatgtgccgtttcccactcccaggtttccagtctgcggtaaggatggcaacgcatagcctgtactgcatcccagacccctaaccctttaagcaatgataccgaagccgcgctgatcgccgagatccgcacgtccggttggctgtcagcaacaaacggcgcaggttctgcgtgctcgatcaccgttaccgcaaatccgtgctgtgccagccccagcgccagtgcgccgccgaccattcctccgccgacaatggcaatttccgttggttgatttgtcatggtcaatcatcctgttagcaatatgctttaagtttacaggatttttacccctaagggctgataacgctcatactggtcacaacggcagcaaagcattacactatgcgccctgcattcctggctactatttcgcaagagcaagtcgatgaccaaaaaactccatattaaaacctggggctgtcagatgaacgagtacgattcatctaagatggccgatctgctggatgccacccacggctatcaactgaccgacgtggcggaagaagcggatgtgctgctgctgaacacctgctcaatccgcgagaaggctcaggaaaaagtcttccatcagttgggtcgctggaaactgttaaaagagaagaatccagacctgattatcggcgtcggtggctgcgtggcatcgcaagaaggcgagcacattcgccagcgcgcccactatgtcgatattatttttgggccgcaaacgctgcaccgtctgccggagatgatcaactccgtgcgcggcgaccgcagcccggttgtagatatcagcttcccggaaatcgagaagtttgaccgtctgccggaaccgcgcgccgaagggccgaccgcgtttgtctccatcatggaaggctgcaataaatactgcacctactgcgtggtgccttacacccgtggtgaagaggtaagccgtccgtccgacgatattctgtttgaaattgcccagcttgcggctcagggcgtgcgtgaagtcaacctgctcggtcagaacgtgaacgcctggcgtggtgaaaactacgacggcaccaccggatcgtttgccaatctgctgcgtctggttgcagcgatcgacgggatcgatcgtattcgctttaccaccagccatccgatcgaattcaccgacgatatcatcgaagtgtatcgcgacacgccggagctggtgagcttcctgcatctgccggtacagagcggttccgatcgcattctgaacctgatgggccgtacccatacggcgctggagtacaaagcgatcatccgtaaactgcgtgcggcgcgtccggatattcagatcagttctgacttcattgttggcttccctggcgaaaccaccgaagacttcgagaaaacgatgaagctgattgccgacgtcaatttcgacatgagctacagctttatcttctctgcacgtccgggtacaccagccgccgatatggttgatgatgttccggaagaagagaagaagcagcgtctgtatattctgcaagagcgcattaatcagcaagcgatggcgtggagccgccggatgctcggcaccacccagcgtattctggtagaaggtacatcgcgtaagagcatcatggagctttccgggcgtacggaaaataaccgcgtggtcaacttcgaaggcacgccggatatgatcggtaaattcgtcgatgtagaaattaccgacgtctacccgaactctctgcgcggtaaagtggtgcgtactgaagatgaaatgggtctgcgcgtggcagaaacaccggaatcagtgattgcccgtacccgcaaagaaaacgaccttggcgtgggttattatcagccgtaattctcaggcctgccgttccggtgggccttgttttttctctctttatccccatctttatcgcaatgcttgcgcctttttcctgtggcgtgaataatttccttataggccggtgaatgttcagcttccggcggcatacagataagaggaacggtttgaacatagacactcgcgaaatcaccctggagccagcagacaatgcgcgtctgttgagcctgtgcggcccgtttgatgacaacatcaagcagctcgaacgccgtctcggcatcgaaatcaatcgccgcgataaccactttaaactgaccggccgtccgatttgcgtcaccgctgcggcagacattctgcgtagcctgtatgtcgatactgccccgatgcgcggtcagattcaggatatcgaaccggaacagatccaccttgcgattaaagaagcgcgggtactggagcaaagcgcggagagcgtgccggagtacggcaaagcggtcaatatcaaaaccaaacgcggcgtaattaagccgcgcacgccaaaccaggcgcagtacatcgccaatattctcgaccatgacattaccttcggcgttggcccggcgggtacgggtaaaacctacctggcagtggctgcggcagttgatgccctggagcgtcaggagattcgccgtattctgctgactcgtccggcggtcgaagccggtgagaaactgggcttcctgcctggcgatttaagccagaaagtagacccgtatctgcgcccactgtacgacgcgctgtttgaaatgctgggctttgagaaagtcgagaaactgattgagcgcaacgttattgaagtcgcgccgctggcctatatgcgtggtcgtacgctgaatgacgcctttatcattctcgatgagagccagaacaccaccatcgaacagatgaagatgttcctgacccgtatcggttttaactcaaaagcggttatcaccggcgacgtcacacagatcgacctgccgcgtaatactaaatcaggcttacgtcatgccatcgaagtgctggccgatgtcgaagagatcagctttaacttcttccacagcgaagacgtggttcgtcacccggtggtggcgcgtatcgttaacgcctatgaagcctgggaagaagccgaacaaaaacgtaaagcggcgctggcggcagaacgcaagcgcgaagaacaggaacaaaaatgagtcaggtgatcctcgatttacaactggcatgtgaaaataattccgggttaccggaagagagccagtttcagacatggctgaatgcggtgatcccgcagtttcaggaagagtcggaagtgactattcgcgtggtcgataccgccgaaagccacagtctgaatctgacctatcgcggtaaggataagccgaccaacgtgctctccttcccgtttgaagtgccgcctggcatggaaatgtcgctactgggcgatctggttatctgccgtcaggtggttgagaaggaagctcaggagcaaggcaaaccactggaggcgcactgggcgcatatggtggtgcacggcagtctgcatttgttaggttacgatcacatcgaagatgacgaagcagaagaaatggaagccctcgaaacagagattatgcttgctctgggctatgaggatccgtacattgccgagaaagaataatttgccaggcatttgactggcagacgtccccgccgttggtgattaacgacggcgttttgattaactaacatgagaacccatacgacgccatgagcgacgacaattcacacagtagtgacacgataagcaacaagaagggatttttctccctgttactcagccaacttttccacggtgaaccgaaaaaccgtgacgaactgctggcgctgatccgtgattccgggcagaacgaccttatcgacgaagatacgcgcgatatgctcgaaggggtgatggacatcgcagaccaacgcgttcgcgacatcatgatcccccgctcccagatgattaccctgaaacgcaaccagacgctggacgaatgccttgatgtcatcatcgagtccgcccactcacgtttcccggtgattagcgaagacaaagatcacattgaagggattctgatggcgaaagacttgctgccgtttatgcgcagcgatgctgaagccttcagcatggacaaagtgttacgtcaggcggttgtcgttcctgaaagtaagcgcgtagaccggatgctgaaagagtttcgctctcagcgttaccacatggcgatcgtcattgacgaattcggtggggtttccggtctggtgaccattgaagacatcctggaactgattgttggtgagattgaagacgagtatgacgaagaagatgatatcgacttccgtcagctgagtcgtcatacctggaccgtgcgcgcactggcttccattgaagacttcaacgaagcgttcggcacccactttagcgatgaagaagtcgacactatcggtggtctggtgatgcaggcattcgggcatcttccggcgcgtggcgaaaccatcgacatcgacggttaccagttcaaagtggcgatggccgacagtcggcgtattattcaggttcatgtcaaaatcccggatgactcaccccagccgaagctggatgaataaaaccgaaactggatagataactacatggcttttgcctcattaattgaacgccagcgcattcgcctgctgctggcgttattattcggtgcctgcggaacgctggccttctctccttacgatatctggcctgcggcgattatttcgctgatggggcttcaggcgttgacctttaaccgtcgtccactccagtctgccgctattggcttttgctggggatttggtctctttggcagcggtattaactgggtctatgtcagcatcgcgacctttggcggaatgcctggcccggttaacatcttcctggtggtgctgctggcagcgtatttgtcgctgtataccggactgtttgctggcgtgctgtcgcgcctgtggccgaaaaccacctggctgcgcgtggcgattgccgcccctgctctctggcaagtgaccgagtttctgcgcggttgggtactgactggcttcccgtggttacagttcggctatagccagattgatggcccgttaaaagggctggcaccgataatgggcgtggaagccattaacttcctgctgatgatggttagtggcctgctggcactggcgttggtcaaacgcaactggcgtccgctggtggtggccgtcgtgctgtttgccctacccttcccgctgcgttacatccagtggtttaccccgcaaccggagaaaaccattcaggtttcgatggttcagggcgatattccgcaatcgctgaaatgggacgaaggccaacttcttaatacgctgaagatttactacaacgcaacggcaccgctgatgggcaaatcatcgttgattatctggccggagtcggcgataaccgatctggaaattaatcagcagccgttcctcaaagcactggacggtgagttgcgtgataaaggtagctcgctggtcaccgggattgtcgacgcgcgtctcaataagcagaaccgctacgatacctacaacaccatcatcacgctgggtaaaggtgcaccgtacagctacgaatcagccgatcgctataacaaaaaccatctggtgccgtttggcgagtttgtcccgctggagtcgattctgcgtccgttagcgccgttctttgatctgccgatgtcgtcgttcagccgtgggccatatatccagccgccgctgtcagtaaatggtattgagcttactgcggctatttgctacgagatcattctcggcgagcaagtgcgcgataacttccgcccggataccgactatctgctgactatctccaacgatgcgtggtttggtaagtctattggtccatggcagcacttccagatggcgcgaatgcgtgcgctggagctggcgcgcccactgttgcgcagcaccaacaacggcattacggcggtgattggcccgcagggtgagattcaggcgatgatcccgcagttcacccgcgaggtgttgaccactaatgtgacaccgaccaccggactcacaccgtatgcacgtaccggcaactggccgctgtgggtgctgacggcgctgtttggttttgccgctgtgctgatgagtctgcgagcacgtaaacgttgatgtgcctgatgtatcctgcatgagcaaaacgtactttctcattgagctttggggcatggttatcatgcccctttttcttacggttcagggatacaagccacattgccatattggggatgacgaataattgcctgcggatcaagcgagcgcgtcctgtccatttggatcaacccgttcttcgccatgacaaatatttttctaccatccgctgaaaaacgaaggtgattaacgtagctggcaggataaacgccaataatctgcccggcattaatattgagcaggatgacataaccttgcaggccatatgacaccaacgctaaatattgaccgtccgggctaataccctcaacggaataaacgctcctgctacaccattgcgtcataatgctggcttgttgatcccctacgcttatacgtgaaatcccctgactatcggcaaaaataacctcgccattttttggtcggaatcccatcgcagaaacgacaccacgcgcatcacctgcgggaaagtcttctttctgatgcgtgatggtattgatccgcacgatgttacctctgcctgctcccggaaccagtaatgttctttcatccggggaaagtgccataacccaggcgcctagtttaccgctcgtccccgtcccgtcgtatttctccagcgggatatccgccacatgctgataagtcaccagatcaatcgctgacacactattactggtgcgattcatcacccaggcttttgtgccatcacgcgagaggataaaactgtcaggatgtgcaccggtggtaatcgactgaataatctcccctgtcgccacgttaatgaccgataacgcattcgcttcaaatgacgtcgcataaatcaacttttcatccgggcttaatgccagcgatctgacgccctgatctttacagccaccacaatgtttgactgacttttctttcgctatgggcgctgtaaaggtatgcaggattttcttttgtccgaggtcgaaaacaacaatgctgttggtgttttcaattgcggcatacaacgtattaccatcccgactgatcgccatatcatggatatcggcaatctcagcgagtaaatcaccactggcctgttcacgacttaccggagcggataatgtttccctgagggcgttgcgttcctccgctaactgttgttttttttgtcgtcgctcttgttcaatctcctgcggataaaacgcttcacgcaggctttgcctgacctgtaaaactgactcatccatctgctgctgcgcaagccagatagccccggtcagaagaagactgcccgcaacaataatcccgccttccgtaacgagtcggttttgcccagataaacgcgcgctcagccaacccaacgcgccacccgcaatcaggccgccaatgtggcaagcgttatctattcctgtttgccgggcaccgtacaacagtgtcagcgccaccatacccaacagaggaaatactcgccgctggtttttatggtgtgtgcccgcacctgaagcaagctgtgttgctatcgcagcgccagctattcccataattgccccggatgccccaacgctgatgactatctgctcactttcgcgtaacgcataacaggcgctgattagcccaccaaagacgccggagaataaccagataatcaggagtcgccatttccccagaatacgttccaccactccccccaccaccaggagtgcaaacatattcatcagcaaatgagaaacactgctgtgcagaaagacactgctcaataagcgccaggattcacccgacaacgtgagagaagcaacgttagcaccgagatggataagtgcggattgatcgacttcttcataactcatccattgtgcgaggtaacaaaatatcccaacacagagcgcaaaaaggataagggttattgcgggtaattgaacatttaacggcttagccgaagatgcagacataaggtgattcttccttgaaaagacaggtaaaaagcatttccccgtgtgcagttatcatcccggcaaacgtcccataccgaaaagttaactctgtccgaaatatgactttttcagcctgaaattacaatcgtaattaattcactcctaagtattttttggcatgtaagttgctttatttactgtgtaagcaatgaaatcagccgcgatgcaaccgggttgcaccaccacaaatcagcggtagcaccaaaaaggtgcggtttaagaattttgcttcggaatggtgcggcgcatctcgcaaaaacaaacaataaaacagcaatatctttacatttagccaaactaaatgttacctaacaggcacaacactgcacaataaagttgcagacgataacaacacaaacactcacaacgggtatccatgcgttcttaacgcagaagataaaggagttggatatgcaattacgtaaacctgccacagcaatcctcgccctggcgctttccgcaggactggcacaggcagatgacgccgccccggcagcaggcagtacgctggacaaaatcgccaaaaacggtgtgattgtcgtcggtcaccgtgaatcttcagtacctttctcttattacgacaatcagcaaaaagtggtgggttattcgcaggattactccaacgccattgttgaagcagtgaaaaagaaactcaacaaaccggacttgcaggtaaaactgattccgattacctcacaaaaccgtattcctctgctgcaaaacggcactttcgattttgaatgtggttctaccactaacaacgtcgaacgccaaaaacaggcggctttctctgacactattttcgtggtcggtacgcgcctgcttaccaaaaagggcggcgatatcaaagattttgccgatctgaaaggcaaagccgtagtcgtcacttccggcactacctctgaagttttgctcaacaaactgaatgaagagcaaaaaatgaatatgcgcatcatcagcgccaaagatcacggtgactctttccgcaccctggaaagcggtcgcgctgttgcctttatgatggatgacgctctgctggccggtgaacgtgcgaaagcgaagaaaccagacaactgggaaatcgtcggcaagccgcagtctcaggaagcctacggttgtatgttgcgtaaagatgatccgcagttcaaaaagctgatggatgacaccatcgcgcaggtgcagacctccggtgaagcggaaaaatggtttgataagtggttcaaaaatcccattccgccgaaaaacctgaacatgaatttcgagctgtcagacgaaatgaaagcactgttcaaagaaccgaatgataaggcactgaactaattacaagaaccaggggcggaaattccagccctctcgattgttacgtagcacggacagactatacgcctgatggtcgttccccatcgggcctgaaaaccgcaatacgctgggtaacaatcttcgagggtagcagttaacgctgctaccctcttttttctggagtagatttatgtctatagactggaactggggtatttttttacaacaagccccgttcggcaacatcacctatcttggttggatctggagtggttttcaggtgacgatcgctttgtcgatctgcgcctggattatcgctttcctcgtcggttcatttttcggcattttacgtaccgttccaaaccgttttctctccggtctgggtacgttgtatgtcgaactgttccgcaacgtgccgttgattgtgcaattctttacctggtatctggtgatcccggagctgttgccggagaaaatcggcatgtggtttaaggccgagctggatcccaatattcagtttttcctttcatccatgctctgcctggggctgtttaccgccgcccgtgtttgcgaacaggtacgcgccgcgattcagtcgttgccgcgtgggcaaaagaacgccgcgctggcaatgggtctgacgctaccgcaggcttaccgctatgtactgctgcctaatgcttatcgcgttatcgtcccgccgatgacctccgagatgatgaacctggtgaaaaactccgccatcgcctcgactattggtctggtggatatggcggcgcaggcgggtaaattgcttgattactcagcccacgcctgggagtcgtttaccgccattacgcttgcgtatgtgttgattaacgcttttatcatgctggtgatgacgctggttgaacgtaaagttcgcctgcccggcaacatggggggcaaataatgtacgagtttgactggagttccattgtcccttccctgccatatctgctggatggactggtgatcaccctgaaaatcaccgtcacggcagtcgtgattggtattttgtggggcaccatgctggcggtgatgcgcttgtccagctttgcgcctgttgcgtggtttgccaaagcctacgttaacgtattccgctcgattcctttagttatggttttgctgtggttttacctgattgtgccgggttttctgcaaaacgtgctgggattatcgccaaaaaatgatatccgtttaatttcggcaatggtggcgttttcgatgtttgaagcggcctactattcagagattatccgtgccggtattcaaagtatttcccgtggtcagtcgagcgccgcgctggcgttggggatgactcactggcagtcgatgaaactgattattctgccgcaggcgttccgcgcgatggtgccgctgctgctcactcagggcatcgtactgttccaggatacctcgctggtgtatgtgttatctctggctgatttcttccgtaccgcctcaaccattggtgagcgtgatggtacgcaggtcgagatgatcctgtttgccggatttgtttatttcgttattagccttagcgcatcgttgttggtcagctacttgaaaagaaggacagcataatgattaccctgaaaaatgtttcaaaatggtatggtcactttcaggtgctgaccgactgctcaaccgaagtgaaaaaaggcgaagtggtggtggtttgcggcccgtctggttccggcaaatcaacgctgattaaaaccgtcaacggcctcgaaccggtgcagcaaggtgaaattaccgtcgatggtatcgtggttaacgataagaaaaccgatctggcaaagctgcgttcccgcgtcgggatggtgttccagcatttcgagttgttcccccatttgtcgattattgaaaacctgaccctggcgcaggtgaaagtgcttaaacgcgataaagcgccggctcgtgaaaaagcattgaaattgctggagcgcgtgggactttccgcacatgccaataaatttccggcgcagctttccggcggtcagcagcagcgtgtggcgatcgctcgcgcattgtgtatggatcctattgcgatgctgttcgacgaaccgacgtcggcgctggatccggagatgatcaacgaagtgctggacgtgatggtggaactggcgaacgaaggaatgaccatgatggtggtgacccacgaaatgggctttgcccgcaaagtggcgaatcgggtgatctttatggatgagggtaaaattgtcgaagactcgccgaaagacgctttcttcgatgatccgaaatcggaccgcgcaaaagacttcctcgcgaaaatcctgcattaatcactctggcgcgcatacccaagtgcgcgccatctcacgctttatcgtttcgcccctcgtatctgttacatcctggcgttacccttgtcgcaaagaagcacacaacaaggagcaacaatggcactgccaattctgttagattgcgacccaggtcatgacgacgctatcgcaatagttctcgccctcgcctcaccagagcttgatgtcaaagcaattacgtcttccgccggaaaccagacaccagaaaaaaccttacgcaatgttcttcgtatgctgaccttgctcaatcgcaccgatattccggtagcaggcggcgcggtaaaaccgttaatgcgtgagttgattatcgcggacaatgtgcacggcgaaagcggtctcgacggcccggcattaccggaaccggcgttcgcaccgcaaaactgtacggcggtagagctaatggcgaaaacgctgcgtgaaagtgcggaacctgtcacgattgtgtctaccggaccgcaaactaacgttgccttgctgctcaatagccatccggaactgcatagcaaaattgcccgtatcgtgattatgggcggcgcaatggggcttggtaactggacgcctgcggctgaatttaatatttacgttgacccggaagcggcagaaattgtcttccagtcagggatcccggtggtgatggctggtctggatgttactcacaaagcacaaatccacgttgaagacactgagcgtttccgcgcgattggcaaccctgtttcaaccattgttgccgaactgctggatttcttcctcgaatatcataaagacgaaaaatggggctttgtcggcgcaccgctgcatgacccatgcaccatcgcctggctgttgaaaccggagttgtttaccactgttgagcgctgggttggcgtggaaacacaggggaaatatactcagggtatgacggttgttgattattattatctgactggcaataaaccgaatgccaccgtaatggtcgatgttgatcgtcagggctttgttgatttactggctgatcgtctgaaattttacgcttaacacacgtcattgattaagatcaccacgcgttacctgggtggtcttaatctgtttatctctttttctttcaagatataaatgcaatggataatgcagaactcgccattggtatcgatctcggtactaccaatagtttaattgccgtctggaaagacggtgccgcgcaattaattccaaataagttcggtgaatatttaacaccatccataattagcatggatgaaaataatcatattttagtcggaaaaccggctgtatcacggcgtacttcgcactgatgaatcccctaatgattttggtaaaaatcattaagttaaggtggatacacatcttgtcatatgatcaaatggtttcgcgaaaaatcaataatcagacaacaagatgtgcgaactcgatat

SEQ ID NO: 59 - DNA, 44472 bp, Escherichia coli
  source 1..44472: mol_type = genomic DNA
tctgaggcagcacctggcacggctgggacggaagtcgctgtcgttctcaaaatcggtggagctgcatgacaaagtcatcgggcattatctgaacataaaacactatcaataagttggagtcattaccaactgactcttgtgcaattgcaataattaaaaatcaccgtactcctgtgcaggtcgccagaaaccatctataaaatcctcaatcggaaaacaaccgccatggcggatccgttgatcgctcatagaataaagacactgctgttccgtgttgtagacatccacaacaatatcttcacaaccgccatccaggtagcaaacaaaaagtaccagcgcgaacatttcatccccgaagtgtggtgccgtaccgttaagtttaggagagattttacaacgggggaataaccaggacaaataacccgccatgccgacgggttctttttggatcaggcaagacgcataatccaggcatcagattgttgatcgtaacgggtacggtaaaggacagagtgttcgccatttagcagggcagggatactggtttcagcatcccaggcatcgagttgcatacataaatcggggtcagatttacaaggaatggttaacgttcgatcacccggcgattcaccgtgtaattcgccgtcgtcgatttcaaaagcgcctatgcgcacactggttttcatcttcgtgctctccatttagctgccgattgtggtacgaccagtccgatcgcaccatttttcagcctagttgaggccgccgaatgtgccagtcaaaaagtgcgctttttttgtgcgctgtcaggcgttaccggtaaaaagtttcccatcgcgcaccagttcacgcggatagctgtttttcaatcgcgaaccaatccgtttggctaaaccaatcggttgatgctggaaagtaaccaatacatcatccgccactggcgcggcttgcgggtaaacatcgcgcccgcgataccactcctccgcttcctgcggtgtcagctcgaatgcattcatattatcgggtgaggcaagagcaataaccgcttcatgctgccagcgataacctttgttgtgcgtctcggcaagtttaatccccaaccgagaaaatcggactttaccgatcagggcttcaatgcccaccgggaacaaccacagttctttgtcacgctgccagaggcgcaggttttcatcccagtttaagccaacacctgcagccgcctgccgaatttgtccagcttcgcgatctttcaccgggctgaacggaaaattgcccactttgtatgttggggggggtaaggcgggaatggcctgagttttacgcagacgagcaacgaagaagccttcgcagtcgtaaatttgtgggaaaacatgcaaaaagccttcttcggtcagcgctttgtttgcaccagggaagagctcgccaagtggtaaaaactctactgcgtcagggtaagtctctttcagccacatgcaaacggcttcgttttcttccctgtttaaggtacaggtcgagtaaaccagcgtaccaccaggacgtaatgcatgaaaggcgctgtcgataagctcccgttgtgtagctgcgatttcctgattgctttctggtgaccagttttttagcgcatcgggatctttacgcaccacgccttcgccagagcagggagcgtccagcaaaatggcatcgaacatttctggcactgccacaccaaacacgcggccatcaaaatgtgtgagcgcaacattactgatgccacagcggctgatattggcatgtaacacttttacccgactggcggaaaactcattggcaaggattgccccttcgttattcatccgcgcggcaatttgcgtcgttttggagcctggcgcagcagcgacatccatcacccgctgtgctgcattaccgtcagcaaacaaggcggcgacgggcaacattgaactggcttcctgaatataaaacaggccgcttaaatgctcggcggtactacccaatggcaatgcatcttcattgtcgcgttcaatccagaaaccttcttcacaccacggaattggcgtaagcgtccagccataaggagcggttaattgcaggaaatcagcaacggagattttcagcgtattaacgcgaatgctgcggcgcaacgggcgctgacaggcggcaagaaaatcatcaaaagagagcgtcgaaggcatcgcttcgcgcatttgcgtcagaaaggcgtccgggaaataaacggtgtgttgggccacgagcatgtaccactggcaaaaaaacaggcgcgcagtttagcataaacgctccggcgcaggcacgccggagcagtgggcattatttgggaagcgcagttccccattcacgccactctttcggttcactttcctgcaacaggaagtgtttgccttcctgggctttcggtgccagtggcgtacccggaggcgtggcgaaggcgatgccgccacggataaactggttaaaggtgccggttttcactacgccgcccgtcagaccaaagtccagactgtaacccgatgccaaccagaagacggaattgttacgcaccaggtgttgatagcgtttactgatgcgcatcgcaatcatcacgcgatctgacaatgtccccagcgtcattcctgtaaccgtaccgacttccagaccacggaacagcacaggcgtaccgatgcctaacgaaccggcttccggcgcttcaacaataatgcttaagccatccaggtaacgcgaatcagtaatggtggcctcttgtaattcaaagtcgcggcgaggattgccccggcctggttcgacgttgatatacggctggaggatagtatcaagatgctcaacgccagctgccgaaatttgcggtgtgaccactgagaagcgcgtaccaccgcgagcaaaggtctggacatattccggatagagcaccgcctttgcctgtacttcattgcgcgcggtaatcagatccagcgtctggatttgcccgatatcaataccgagatagcgaattggcatcccgaccgccagttttccggcatcgaaagcgtgaagcgtaatctgcccaccaaccgcacgggccgctgtttcggaagcatacagaattcgtttgtcgcctttacgctgactggcgctggcaccgctgaggttatcgaagctaatggctccctttaatgctctggagagcggggatgcctgtacggtcaggccactaccattcagctgaactttcgccccgccttctgcccagaacacgctattgctggtcagaaggttgcgatactccggcttaatatgcagatcgatatcaaacgcgttagctcgcggacggacggtaataacttcaccaacttcaaatttacggtagagcactaccgatcctgcctgcacatccggcagcgtctctgcactcaaactcacggttgtggtgggtaaatcgctaaggctgttctccagcgctttttccagattggcatacagtggatagctggctttcatctcgcctttatcgcccggcagaatacgtatcccgccgttaatccattctgaggcgctggcaccgagaaactcaacgccatccagccccaccttcacgtcgacacggctgttgacgacaaatttgctatcgccttttaccagttctcgatgctgaggctcgatggcgacggtaaaggtgacgcctttgctggtgagtttacgatcgataacctggcctacctgcacgccgtgaagaatgagcggctgaccagcatcaataccgtaactttccggcgcggtcagggtcagcgtcagaacatcaggttcatgcagcagtgctttttcgcctggcacaacaacgaactctttgcgtggctcgccatcgccgggtaccaactcgaaggttttgccagtcagcagggcgctgagattggcatcgctaagggataatttcggattacgtaattcgatgcgggtattttcacgaagcagggtaacgacgctgggatcaactgtcatttccccagtgactttaccaccaggatttaaatccagtttagttagctgtccgacttccagtccctgatacattaatggcgtcgagtcggcggttaatcctgccccactcggcagttccagttttattattacgccacgctggctgtgggccagatcttcatacagaccaaaggtatcttccgcctcggcaggtttcgactcttcaggtgaatcgaaggcaatcgcaccgttaaccagtgccgccagactttccagtttcaccttcgcgccactgatactgacattggcatcaacgccggaaacgttccagaaacggctaccttttttcaccagatcggtaaaacgccgctcgatcaggacatcaatcaccacgccttgcttgttgggattgatggcatagtcgtagacttttcccacagggatcttgcggaaatagaccaatgaaccgctgttcagcgaaccgagatcgggggcttgcaggtggatcatcagatcgccattgtccagtcgatatttcggttgggtatcgagtgcgacaaagtgatcctgctctttacctttacctggcatcatgccgatatagttaccaccgacgagggcgtccagcccggagacacctgccaacgatgcttttggcgtcaccagccagaactgagtctcttcgcgcagcgcatctttcatatcggacttgatgctgaccttgacttcaatcttacgaagatcgtcgctgaggctgatatcctgcactgttccgacttcaacgccctgataacgaacaggcgtacggcccgggacaataccatccgccgacataaagtcgatggtgacggtattaccccggtcctgataactgtcccaaatcagccaaccggcaatcattagcgcgatgaacggcagcagccagaaaggtgagatacggcgtttatttttaatctgcgcttcagtcgtcgaagcgggcgtttcctgactcatgtgcatcccaaagtaagcggctgtccagccattccacagcaagaatagtcaaaattaccgctgcgccgaaataaaacgcagccggtcccatagtaaaagcgaggatctgatcgcgattaatcagcgacatggttaaagatatgacaaacaggtcgagcatcgaccagcgaccaatccaggtcaccatccgcagtaacagaatgcgtgtgcgtaaaccttgctggcatttaaaatgaatgctcaacagtaaagtgaacatgacgatcactttagtaaacggtaccagaatactggcgataaacacgattcccgcaaccgcaatgttgctacttgccagcgacataattccggaaagaattgtatcttcctgccgtcctccgttcagataaatgatagaaataggcaacaggttggcaggtaacaacaaaacgattgacgctaacagcgccgcccagcatttttgcaaactatgacggcgacgcaggcgtagcgggatatggcaacgcgggcagcgaccacgctgatcaggatagccggtaaaatggcacccaagacagacacgaagtttctcgtccctacgcgtagcggggcgctgcggataaaatcgctcccacagctcctcgacattaagatgtgacaacgtcaccgtcgttaaaatcaccaacgccacaaaagagaacaagccgacacccgcctggatatgggcataatcctgtacctttatagaagcaacgccaatgccgaccaggtagatatccagcattacccactctttaagtcgctcaagcatcagcagtaccggacgtaaattcattcccagtcggttaccaaaccataaatatgctatggaggacaccagaatgaggggggcaccaataacgcagaaaaagaccatcgcccccgttatcgtatcgccctgtttggtcatttgccagatgccttgcatgacgttggcgtcgatacgaatacctaacagccagatatgcaacagcggttcgccccaggcaaacggcatcagcaacagcatggtgaaagccattgccgccaggcgcgttagcgaccagtcgcgcccgtcgcgaatttttgcctgacagcgcggacaataggcactctgatgagaatttatctcgggcaggctaaacagcatgtcgcattgcgggcaacgttggtaatcaccacgcggcagttcctcgccgattgacctcactgttatcttttttgtcggcgtaatttgtggtgtgttaagagccatgacgtgccaaatgtaataagaattaacattaatattaacccatgatgggaatgatcttgagcattaacgcatttaatgcttattttaataggctggcagttccaggtaagacaaccaagtgattatataatgaacaaaacagaattttacgcggatttaaatcgcgactttaacgcgctgatggcaggagaaaccagttttctggcaacgcttgcgaacaccagtgcgttgttatacgagcgtctcactgacgtaaactgggcaggtttttatttgcttgaggacgatacactggtactcggaccatttcagggcaaaattgcctgtgtccggatacccgtcgggcgcggggtgtgcggcactgcggttgcccgcaatcaagtgcagcgtatcgaggatgttcacgcgtttgacgggcatattgcctgtgatgcggcgagtaattctgaaattgttctgccgctggtggtgaaaaatcagattattggtgttctcgacatcgatagtaccgtcttcggtcgctttacagacgaggacgagcaaggcttacgtcagcttgtggcacagcttgaaaaagtgcttgcaacgacggattacaaaaaattctttgcgagcgtcgcaggataatcaacggataacgtagcatttactggtagcgtcattataatgacgcctgttcatgcctgcgcttgttggctacgtccgttgtaatcaggaaatttcatggaaaatcaacctaagttgaatagcagtaaagaagtaatcgcgtttctggccgaacgttttccccactgtttcagtgcggaaggtgaagcgcgtccgctgaaaatcggtatttttcaggatttggtcgatcgtgttgccggggaaatgaacctgagcaaaacgcaattacgatccgctttacgtctctacacttcgagctggcgttatctttacggtgttaaacccggcgcaacgcgtgtcgatcttgacggcaacccatgcggtgagctggacgagcaacatgtagagcatgctcgcaagcagcttgaagaagcgaaagcgcgtgttcaggcacagcgtgctgaacagcaagcgaaaaaacgcgaagctgccgcagctgctggtgagaaagaagacgcaccgcgccgcgaacgcaagccacgtccgaccacgccacgccgcaaagaaggcgctgaacgtaaacctcgtgcgcaaaagccggtagagaaagcgccaaaaacagtaaaagcacctcgcgaagaacagcacaccccggtttctgacatttcagctctgactgtcggacaagctctgaaggtgaaagcgggtcaaaacgcgatggatgccaccgtattagaaatcaccaaagacggcgtccgcgtccagctgaattcgggtatgtctttgattgtgcgcgcagaacacctggtgttctgaaacggaggccgggccaggcatgaacatgttttttaggcttaccgcgttagctggcctgcttgcaatagcaggccagaccttcgctgtagaagatatcacgcgtgctgatcaaattccggtattaaaggaagagacgcagcatgcgacggtaagtgagcgcgtaacgtcgcgcttcacccgttctcattatcgccagttcgacctcgatcaggcattttcggccaaaatctttgaccgctacctgaatctgctcgattacagccacaacgtgctgctggcaagcgatgttgaacagttcgcgaaaaagaaaaccgagttaggcgatgaactgcgttcaggcaaactcgacgttttctacgatctctacaatctggcgcaaaagcgccgttttgagcgttaccagtacgctttgtcggtactggaaaagccgatggatttcaccggcaacgacacttataaccttgaccgcagcaaagcgccctggccgaaaaacgaggctgagttgaacgcgctgtgggacagtaaagtcaaattcgacgagttaagcctgaagctggcaggaaaaacggataaagaaattcgtgaaaccctgacacgccgctacaaatttgccattcgtcgtctggcgcaaaccaacagcgaagatgttttctcgctggcaatgacggcgtttgcgcgtgaaatcgacccgcataccaactatctttccccgcgtaataccgaacagttcaacactgaaatgagtttgtcgctggaaggtattggcgcagtgctgcaaatggatgatgactacaccgttatcaattcgatggtggcaggtggtccggcagcgaagagtaaagctatcagcgttggtgacaaaattgtcggtgttggtcaaacaggcaagccgatggttgacgtgattggctggcgtcttgatgatgtggttgccttaattaaagggccgaagggcagtaaagttcgtctggaaattttacctgctggtaaagggaccaagacccgcactgtaacattgacccgtgaacgtattcgtctcgaagaccgcgcggttaaaatgtcggtgaagaccgtcggtaaagagaaagtcggcgtgctggatattccgggcttctatgtgggtttgacagacgatgtcaaagttcaactgcagaaactggaaaaacagaatgtcagcagtgtgatcatcgacctgcgtagcaatggcggtggggcgctgaccgaagcggtatcgctctcaggtctgtttattcctgcgggtcccattgttcaggtccgcgataacaacggcaaggttcgtgaagacagcgataccgacgggcaggtgttctataaaggcccgctggtggtactggttgaccgtttcagtgcttcggcttcagaaatctttgccgcggcaatgcaggattacggtcgtgcgctggttgtgggtgaaccgacgtttggtaaaggcaccgttcagcaataccgttcattgaaccgtatttacgatcagatgttacgtcctgaatggccagcgctgggttctgtgcagtacacgatccagaaattctatcgcgttaacggcggcagtacgcaacgtaaaggcgtaacgccagacatcatcatgccgacgggtaatgaagaaacggaaacgggtgagaaattcgaagataacgcgctgccgtgggatagcattgatgccgcgacttatgtgaaatcaggcgatttaacggcctttgggccggagctgctgaaggaacataatgcgcgtatcgcgaaagatcctgagttccagaacatcatgaaggatatcgcgcgcttcaacgctatgaaggacaagcgcaatatcgtttctctgaactacgctgtgcgtgagaaagagaataatgaagatgatgcgacgcgtctggcgcgtttgaacgaacgctttaaacgcgaaggtaaaccggagttgaagaagctggatgatctacctaaagattaccaggagccggatccttatctggatgagacggtgaatatcgcactcgatctggcgaagcttgaaaaagccagacccgcggaacaacccgctcccgtcaagtaatatcaatcaggcacaagaaattgtgcctgattttttaacagcggcaagatgccgtaaatcagatgctacaaaatgtaaagttgtgtctttctggtgacttacgcactatccagacttgaaaatagtcgcgtaacccatacgatgtgggtatcgcatattgcgttttgttaaactgaggtaaaaagaaaattatgatgcgaatcgcgctcttcctgctaacgaacctggccgtaatggtcgttttcgggctggtactgagcctgacagggatacagtcgagcagcgttcaggggctgatgatcatggccttgctgttcggttttggtggttccttcgtttcgcttctgatgtccaaatggatggcattacgatctgttggcggggaagtgatcgagcaaccgcgtaacgaaagggaacgttggctggttaatactgtagcaacccaggctcgtcaggcagggatcgctatgccgcaagtggctatctaccatgcgccggacatcaacgcttttgcaaccggtgcgcgccgtgatgcctctctggttgctgtcagcaccggtttgctgcagaacatgagcccggatgaagccgaggcggtaattgctcacgaaatcagccacatcgccaatggtgatatggtcaccatgacgctgattcagggcgtggtgaacaccttcgttatctttatttcccgtattctggcgcagcttgccgcgggttttatgggcggaaatcgtgatgaaggtgaagagagcaacggcaacccgctgatctactttgcggttgcaacggttctggaactggtgtttggtattcttgcgagcattatcaccatgtggttctcgcgtcatcgtgaattccatgctgatgccggttcggcaaaactggttggtcgcgagaaaatgattgccgcgctgcagcgcctgaaaaccagctatgaaccgcaagaagcaaccagcatgatggctttctgcattaacggtaagtcgaaatcgctcagtgagttgttcatgactcacccgccgctggataaacgaattgaagctctgcgtacgggtgaatacctgaagtaatatgaagtaaatactaaaaagcgcgtcctgatcgacgcgctttttttatgccctggatcgtggctgagtgatacgtaaaccactgacacaggcagcaatcactgccagaatagccgcagccatcagcgaaacgtgcgtaccattatcaccgaactgatttagcatcagcgccaccagtgccgcgccgctactctgacccagtagacgagccgttcctaacatgccactggctccaccgctacgttcgcgaggagcggaggtaataatggtgtggttattgggtgactggaacaagccaaatccagcgccacataagatcatcggccagataatattgatatccgcaggtgacgcgggcagcagaaccagggaaaaaagccccgcagccatgatgaacaaccctagagcacccagcaatcctgcatgtacgcgttcaatcaaatagcctgccaacggagccatcaccatcgttgctaacggccacggtgtcagaagtaagcctgtttcgacttcactacgcccgagcacggtttgcaggtaaaagggcagggaaaccattgccagcatttgtgcgcagaaagagcaaacagatgtgcaaatagaaagtgaaaacagcgggatacgcagtaaatccaccggtagcagcggtacgggaagagaaagctggcggcgaataaagaaaataccaacaacaaccattaccaccagttccgcagcaattaacgtcagcgattgcccctgagcgaaaccactcaacgcagtgataagcaggccgaaggttaacgcgttcatcacggcgctgggcaggtcgaaacggggtttactggcgcgagaaccattgggtggcagaaaacgcatcgccagaagcagggcgataatacctaacggtacgttgattaaaaataaccatttccaggatgcgatggagaggattgctgcagcaattgtcggcccggcagcagaagagacggcaacaataaacgagtttatgcccatccctctccccagaaaacgttgtggatagatcaggcggataagtgcggtattaacgctcatcaacgctgcaccgccgaaaccttgtatgacacgcgcaagggtgagcatttgcagcgaatcagaaagggcgcagaacagtgaagacaacagaaaaacgaccagaccgcatttataaatacgtcgatagccaaacatatcgcccagaaacgaaaacgagagcagggagatgacaatggcgatttgataggcgttcactacccagatggaactggctggcgtggcatgaaggtccgtggcgattgttggcagggcgacgttggcgattgcgccgtcaaggacagccatcgaaataccaatcacaatggttaatatcgcaccgtatcgctggggcaatggcaggccgtcggcctgaacttttggcataggaattttatatctttggtgaataatcaacaggggtatgattctagcactgatattcacggtggatgtcgcagaattgtaactaaccggcaaaagatggattgcgaccaccctggtgcgaaattataataaaaaacagttctgatttttataaaacactcgcaatgaggtgataaatggctaacgcagatctggataaacagcctgattctgtatcttccgtgctaaaagtttttggcattttgcaggcgctgggtgaagagcgcgaaatagggataaccgagctgtcgcagcgcgtcatgatgtcaaaaagcaccgtttatcgctttttacagaccatgaaaaccttaggttatgtggcgcaggaaggggagtcggagaaatattccctgaccctgaaattgtttgaactgggcgctcgcgcgttacaaaacgtcgatttaattcgtagcgcagatatccagatgcgtgagatctcccgcctgaccaaagaaactatccacctcggcgcactggacgaagacagtattgtttacattcacaaaattgactctatgtacaatttgcgcatgtattcacggattgggcgtcgtaatccgctgtacagcaccgcgattggtaaggtactgctggcatggcgcgatcgcgatgaagtgaagcaaattcttgagggcgtggagtataaacgcagtaccgagcggaccatcaccagtacagaagcgttattacccgttctggaccaggtgcgcgagcaggggtatggcgaagataacgaagagcaggaagaagggctgcgatgcattgcggtaccggtatttgatcgctttggcgtggtcattgccggtttgagcatctccttcccgacgttgcgtttctctgaagagcgtttacaggaatatgtcgcaatgttgcataccgcagcgcgcaaaatttctgcccaaatgggttatcacgactatccgttctgatgagagtaagaacctgtcggaatatcaaacagacaggttctttatttagcatgagaaaaataaagttgaaggtgcgttatattaaacgcgcttgctataagaatattttactcatgagtgagaatctggttatttattacccttaaccattatcgaccacgatattgcttttacgtaacagtgggcaatctgttatccccaagaaaccacttttagtgtgcaagtattgtaccgtgctggtgcctctggcagtcagataggtacattgcaaacctaatcctgcggcattctctttgcttccaatcaaaacgccatatccgctgagtaataatcctatccataccagtgctatcagcataactgtgcgaatgatgaatcgcattacaacctcttctctttttatgttcgcttaatcgtagcggcaatatgcgctgaagcaagctactcattccgaaaaagcacgaatatcgacatagttaggcgctgtttaactaacgcatgctagtttaatgacataaggtaggtgaagcggagattggagtgaaaaagtttcgatgggtcgttctggttgtcgtggtgttggcttgcttgctgctttgggcgcaggtattcaacatgatgtgcgatcaggatgtacaatttttcagcggaatttgtgccattaaccagtttatcccgtggtgatatcattttttcagcactagattttcttcctctccagcagtggtagaatagcgcctctactcagaggtggtgaaatgaacgaagttgtaaattcaggcgtgatgaacattgcgtctttggttgtatcggtggtggttcttcttatcgggctcatcttgtggttttttatcaatcgtgccagttctcggactaacgaacagattgaactgcttgaggcgttgctggatcagcaaaaacgtcaaaatgcactgttacgtcgtttgtgcgaagcaaacgaacctgagaaagcagataaaaagaccgttgagagtcaaaaatcggttgaagacgaagatattattcgtctggtcgccgaacgataatccttcctcaatcttgagtaaccccgtcgttgaagggttactcaattcatcctgattatacgcactgtcatggtgcaattgcttcaaattaaaactctggtctgacttcaaataattatcatattatttatttgcgtaatgggatatcagaaaaagatatttacctcattaatttattaggatgtttacatcggatttgtgattaagcgtggtattatttattagcgaaacgtttctctcttgatttttttgctcattcatcaatttttcttattttaaatttacaatccttttggggattgacttctctttagggtaattgatagccgttaactgactgttttatgagaaaaagtgatataactttttattcattgcatagcaaaaaatgtgatattgcacgcactatgtaataacttctcccactggcctggaacaactgaacttattgaactatgttagaaactacgccagtttaagtatctgcctgaactggcaaggttaagcacaatgatatatcggcgcgtattccgttgcataagtgtgcaaaaaaagtggaagacgtatcgagatttgtgcgtctgatcgagacatgtttaaaaatggcttgccataattaacgttgtatgtgataacagatttcgggttaaacgaggtacagttctgtttatgtgtggcattttcagtaaagaagtcctgagtaaacacgttgacgttgaataccgcttctctgccgagccttatattggtgcctcatgcagtaatgtgtcagttttatctatgttatgcctgcgggcgaagaaaacaatctaaggaatttttcaaatggcaaagattaaaggtcaggttaagtggttcaacgagtctaaaggttttggcttcattactcctgctgatggcagcaaagacgtgttcgtacacttctccgctatccagggtaatggcttcaaaactctggctgaaggtcagaacgttgagttcgaaattcaggacggccagaaaggtccggcagctgttaacgtaacagctatctgatcgaatccactgatctgaagtgtgaatacgcttcaatctcgctataaagcctcgtcgaatgcgaggctttttactatgctttatcttcgctcctggcgttcggatatttgcccgccgcgtgattcgcgttacacttgcggcctttagtatcctgccggagttgtcatgtcgttttcctgtccactttgccatcagcctctttcgcgtgaaaaaaacagctatatctgtccccaacgacatcagtttgatatggcgaaagaagggtatgtcaatctgctgcccgttcagcataaacggtctcgtgatccgggcgacagcgcggaaatgatgcaagcacgccgcgcattcttagatgccggacattatcagccgctgcgtgatgcaattgtcgcccaactgcgggaacggcttgatgataaggccacggcggtgctggatattggctgtggtgaagggtattacacacacgtatttgccgatgtgttgcccgaaatcaccacgtttggcctggatgtctcgaaggtagcgataaaagcggcggcgaaacgctatccgcaggtcactttttgtgtcgcttccagccaccgtttgccgttttccgataccagtatggacgccataatacgtatttacgcgccgtgtaaagcagaagaattagcgcgagtagtgaagcccggcggttgggtcattactgccacgccgggaccgcgacatttgatggagctgaaggggctgatttacaatgaagtacatcttcatgcacctcatgcagaacaactggaaggttttacattacagcagagtgctgagttgtgttatccgatgcgtcttcgcggtgatgaagccgtcgcattattgcagatgacgccgtttgcctggcgtgcgaagccagaagtctggcaaacactggcagcaaaagaagtgttcgactgccagacggactttaatattcacctctggcagcgttcttattaaccgtggaagtgcgtccagaggatctggacgccgatgccgatcagcaccagcccgccgagaatttccgcttttttcccaataattgagccgataaagcgaccaaccatcatccctaatgtcgacataatcaaggttgcacaaccaatggccaatgcggtcgcgataatgttgacctgtaggaaagcaagaccaacacccacagccatggcatccaggctggtggcaatcgcggtggttaccagtagccagaaaccgtgtcgacggcgcggctcttcatcttcatcatctgcgccacgaaaaccctcaataatcattcgcccgccgaggaatatcagcagcacaaacgcaatccagtgattccattcaaggacaaaccggctggctaacatgcccattccccagccgatcagcggcgtcagggtttcgacggcaccaaaaataaggccggttcgcaatgcttcagaaaatttcggtttatggagggtggcacctttaccgattgatgcagcaaatgcatccatcgacataccaaacgcaagaagaacagtagcagtgatattcatgacaacgtcctgaccggggtatccataaaacacatcatcgcccccagcaaacatgcatacatgaacaacaagccgcgatgggttttcgcgttcatgcaggcatagcgattgatgtgcatatggtctcgcctgactgaaagtcttcagtccgtacgtgccacgttttgcaacgagtatgttgacacgtacatttccggaatctggaaatcggctactccccaaatgagggcgcaaccttaacatattttgagaatataaaacaactgttggaatatattatttcattgctttattgataacgattttcatttagatctatatatcaatgaaacgttaaaataaataacaaataagggaagaggtaatatagcctaagctatgtctgattattaaaaatacactaaacatagctttggctaaattcataacttattgagttgaaacgagaagcttataaattttttccagatcgtcgatatttcgaacgcggattaacagccgacgctgttctaattgcatcaccaacacgccatcttccgacaagttcatcgctttgattcggctatattcaatccagacattggcgaagaaaaaacctttttgtttaaagataatcttcggaacgcggatccagaatatataaaaacccatcagagccagtgcgcttaataaccatgtcgttattaacgcaccatgattcgtgacgttgttatagataagaatgacaatcaatccgacgaagataacgctatcgatgcgaccacgccggagcaaaggaattgccagcagggtggggccgttacggcggggcatgatgaactgatcgtagatcgcgaaggccaggagtgcggcgatgaaaagaatcagtaccaggtccgtgattgtcattaatcctccagataaaaaaacggggccaaaaggccccggtagtgtacaacagtcttacagtcccagcaggccgcaagcgtaaccagcgataccgatgacgaagaagccaacgatgatccacagcgggttaacttttttgcgcagtagccacatacaagcaaaggtcagcagcagtggtaccaggcctggcattaactggtccagaatagtctggacagtagtaacgtgttctttgcccgtctggtcagtaatgcgagagacaaccagcgggatgttgacatgtgtccacttgttaaccaatgcccccatgacaaacaggccgaggatagacgccccttccgtcagtttttgcaggaagccaccacccatatctttaacgatatcgatacctttggagtaaccatacgctacgccgtagtaacgggttgccagacgcaccaggttaaacaggatgaagaacagcagcggacctaacaggctgccgctcatcgcgataccggcacccagtgctgcaaataccggacgtacggttccccagaagatcgggtcgcctacaccagccagcggccccatcaaaccgactttgataccgttgatagcaccgtcgtcgatctctgcgccattagcacgctgttcttccagcgccagggttacgccgagaatcggcgcagccacgaacggctgggtgttaaagaactccaggtgacggcgaatagcttgtttacgagcttcgttgttctcagggtagaggcgacgaattgccggtaccatagagaagcagaaacccagtgcctgcatacgttcgaagttccatgaaccctggaagaggttagaacgcaggaagacgccacgaatatcactttgagtgagttttttctcggtggtagtttgagttgtatcaaccatttcgctcacctgttagtccagttcgttatcgagatcgttgttaccagctgcctgagtaggcgcaccggctacgcggttgtatttcgggctaagttggatgtagagcactgccataacagtaccaatcacacccagagcaaccaggttaaagttggtgaatgctgcggttacgaagccgaggtagaagaacggcatcaggtagccagcacgcatcatgttgataaccatcgcataaccaaccaccacgatcatgccaccggcgatattcagaccattggtcaccacttccggaatcgcattcagcatgttctgtacttcgctggtaccaacagacagcgcaacgatgacggccggaatagccacacgcattgcttgcaggaacagagaagaaacgtggatccaggaaatcgctgtcaggttgccgttatcagcagccttatccgcagcgtgctggaaagcaacggtaatagtacgaacgatgatggtcagtacctggcccgcagcggccagagggattgccagtgcgatacctgcaccaatgctctgatgacctgcgataaccagaatggtagaaatgatagaagccagagcggcgtcaggcgcaactgcagcaccgatgttcatccagcccagcgcgatcatttccagcgtaccaccgataataataccggttttcatatccccaagaacgatacccaccagggtacacgcgattagcggacggtgaaactgaaattcatcgaggattgatcccatacctgcgatacaggctacgataaataccagcacaatttgaagagtggtaatctccattgtacttctcctgtttacgtaagactaaagtgtgaaaactgagtgataatcaacacaatacgttacttatcgattttgctgatcagatccatcattttcagtttcggatcggtggaaaccttacggacttccagctcaataccgcgcgcattcagtttcttgaacgcctcgatatctttttcatcaaccgaaaccgcgttattcacctgggttttaccctgacggaatgccataccaccgacgttaacagaggtgattttcacgccgccttcaacgagacgctctacatctgttgggttggtaaataacagcattacgcgttcgccagcatatttcgggttgttgtagacgcgaatcattttggcaacatcaactacgtgtgctgttacgcccggaggtgcaacctgggtgagcagtgtcttacgaacggtatccgcagccacttcatcactaacaacaataatacgggagacattggtttctttggtccagcgggtggcgacctgaccgtgaatcagacggtcgtcgatacgcgcaaggccaataaccatgtagtcgtttggccccattggttttgccggagttggagccgcttttggtgctgcggcagcgggtgctggcgcggctttttcaaccggtttggctttcagtgctttcacgccttcacggcctgtttctactgccagcgcaaccagttcatcaaagcttgggtcatcatcacgagccattaacgtttccacgagcattggaatgttaacgcctgcaatgacttcataatgctctttgtcgacgacaatgcggctggcagcattgaacgggctgcctccccatgtatcaacgagaaacagcacgcctttagtggtgtcgagttttgccaactgagcgttgtacttttcaatcagcgtttcggcattttcacctggaacgaaatcgatccagccgacgttttcctgctcgcctaacagcatttctgccgttttaagcaactgctctgcagcccaaccatgtgtgcctataacaatagcaatggtcacttgctacctcctttattatcgttaacacctcaacgtgccagatgtatttttgaatcgtcgtccacaatcgaatcgattcagataagggctacaaccaaaaacccctgcgtttcgcgatttattttagatatcgaaaaaattattttatgtgatgaagatccgtaatttaactttcgattagcagaaatttcgaaaggtaaaatatccttgtcacattcgtttgcaaaggaaggtaaatctttgccaaatcagaggcgtctctgatatgtttaactcccgtttaacaaccatggagtatagggcagtagcccgcagtatggatcgtcaccgacgtcatttcagcatcaggccttttaacgcctacctttctggcactctatgccgcacctttcgtttgcattttgtcgttacgcctgcattatttctggcgtcgaatagctattccttaagcaggagcttgtcatggaattcttaatggacccctcaatttgggcggggctactcacgcttgttgttctcgaaattgtgctgggtatcgataacctggtcttcatcgccattcttgctgacaaactgccgccaaaacaacgcgataaagcgcgtttgctggggttatcactggcgctgattatgcgtctggggctgctgtcgctgatttcatggatggtcacgctgaccaaaccgctatttaccgtcatggatttctccttctccggacgcgacctgattatgttgttcggggggatattcttgctgttcaaagcaacaaccgaactgcatgaacggctggaaaaccgcgatcatgattccggccacggtaaaggctacgccagtttctgggtggtcgtcacacagattgtcatccttgacgccgtcttctcgttggatgcggtaattactgcagtagggatggttaaccatctgccggtgatgatggcggcggtagtgattgcgatggcggttatgttgctggcatccaaaccgctgacgcgattcgttaaccagcaccccacggtggtggtgctctgtctgagcttcctgttaatgattggtctgagtctggtggcagaaggtttcggtttccacattccgaaaggttacctgtatgccgcgattggcttctcgatcatcatcgaagtgtttaaccagattgcgcgtcgcaactttattcgccaccagtcgactttgccgctgcgagcgcgtactgccgatgccatcctgcgtttgatgggcgggaaacgtcaggccaatgttcagcacgatgccgataacccgatgccgatgccgatcccggaaggtgcatttgccgaagaagaacgttacatgattaacggcgtactgacgctggcgtcgcgttctctgcgcgggatcatgacgccgcgcggtgaaataagctgggttgacgctaatctcggggtcgatgaaatccgcgagcagctgctctcctcaccgcacagcctgttcccggtatgtcgcggtgaactggatgaaatcatcggaatcgtacgtgctaaagaactgctggtggcgctggaagagggcgttgatgtggcggcgattgcttcggcgtctccggcgattatcgtcccggaaaccctcgatccgatcaacctgctgggcgtgctgcgtcgtgctcgcgggagctttgttatcgtgaccaacgagtttggtgtggtacaaggcttggtcacgccgctggatgtgctggaagccattgcgggtgaattcccggacgctgacgaaacgccggaaatcattactgatggtgacggctggctggtaaaaggcggtacagatttgcatgccttgcagcaggcgcttgatgttgagcaccttgccgatgacgatgatatcgcgacggtcgcgggcctcgtgatctcggcaaatggtcacattccccgtgtgggcgatgtgattgatgtagggccactgcatatcaccatcattgaagccaatgattatcgtgttgatctggttcgcattgttaaagagcaaccggcgcacgatgaagatgagtaagcgttaacgtaacggcataatgggcgtgatatgtccattatgccgggcgggcggcggttggctgcccgccagccatttgggaaaatcacgtagcggcatcggctgtgcgtacaaatacccttgcaaaatatgcacgccatgacggcgcaaatacttcgcctgttcttgcgtttccacaccctccgccaccagttcaatattcagtctttgccccagtgcgatgatgatatcggtcaccgtcgagttaaccgcgtcagaacctatagctgcggtaaatgacttatcaattttcagcacgtcaggacgtaatgtttcaagccaggaaaatgaactgttgccggtgccgaagtcatcaatcgccagtttgacgtttttacgatgtagctcgcgggcaatccgataatcaacatccagtaaggcatcgcgttcggtgatttcgaggatcagttgctgaatcgggtgagcgctaaaccagtactgattgagatcttttatcagcacaccacggcgaaaatggctgggtgcgacgttaatgccaacatgaaactgactactcatcgggaaaacatggcgctgacgaatggtttctgccatcacatagcgggtcagtggcacaattaaatgatgttcttccgcgataggaataaacacatccggtgaaatccagccctgacgcggattgttccagcgcagcaaaatctctacaccaatacattgctggctgcgcgcattaagcaaaggctgacagaacaattcgaactcatgttgcgccaggcccagattgatttcgcgggaaaagctcatccggtaagcggtcgccagccaggcgatgtagcccaccagtaaacttagcagcaccgccagcggtaattgtgttggaagatagtgccatgccagcgccgtagcccccggaccattaacgttaatggtaaaaggaaagcgttgcgaagaaacctgatagttttcattgtcttcaggttgcggaagggaatctaccagcccattaccatagagcaaatgccgtttgtccaccgtcaggctggcgctactgatttgcggcagttgtggctcaaggagcattgccgtcagtaagtcgatgttaatcatctccatgaccccagcattgctactgcccgctgcaggcgtccattgaatcaaaaccggactgcctttaatcagggcacggtcgatcgtcaggcgtaaaagtggttgcggtgcaggaagttcagccagaatgtccacgacgggcacattgcgataaccaaaaatgctggagcaatagagtgtgccgtcttgcaccaggccaatggatcgcacagtttggagttttgccgcctgtttacgtaatggcaaatgggcgacagagcagggcagaccaatcagcggaagcaagacttcgctacctgcctgtaggggaagcagtactttatctaattcctctacagcgtgattggcgaattgtactacccgttgttgatttaagttacgctgtgaaataaatcgcacgctcagggtcgaagcgagcgtaacgagtgcgcaaatcgtacaaacaatcattcgattacggcgataggttttaatgatccgttgtgctttttgcatgcgggccaccctgtaagcgtatggcgacaaacgcctgacgcaacagtggaagtgtagtggggaatattacagcagacgagaaagcgggtataaattcgcccatccgttgcagatgggcgagtaagaagtattagtcacactggactttgattgccagaccaccgcgtgaggtttcgcggtatttggcgttcatgtccttaccggtttcgtacatcgtttcgatgaccttatccagcgagacgcgcggtgcactggtgcggcgcagagccatccgtgcggcgttaatcgccttcacagaggcaatggcattacgctcaatgcacggcacctgaacctgccctgcaaccgggtcgcaggttaaaccaaggttgtgttccatgccaatttccgccgccacgcaaacctgttccgggctaccgcccagcagttctgcaagacccgcagcagccattgaacaggcaacacccacttcgccctggcaaccaacttccgcaccggaaatagaggcgttcattttatacaatgcaccaatcgcgcccgctgccataaagtaacgggtatagatgtccgggctgaccgattcaataaagtggtcatagtaagccagcactgccggaacgataccgcaggcaccgttggttggcgcagttaccacacgaccaccggcggcgttttcttcgttaactgccagcgcaaacatgtttacccagtcaatgacattcatcggatcgttagacagtttatcgctggaaactaacatccggcgtagggcagacgcacgacgtggcacgcgcagcgggcctggcagtacaccttcggtgttcatcccgcgatcgatacatgcctgcatggtttgccagacatgcgcgaaatactcgtcgatctctttcttgctgtgcagcgccagttcgttctgcatagcgagaccagacagcgaatagccggtttcattacagtacgcgagcagttcggtggcagatttgaacggatacggcacgctcacttcgttggcagcatcctgaccaaagtgttcttcatcgacgataaaaccgccgccgatggaataataagttttgctgtagacgacttcatcgccgttataggcgtggatttgcataccgttttcatgcagcggcaggttgccgttatgaaaacgcatcccgttgtcgcgcgggaaatccacttcatgccgtccctgtgccagcagcagacgttcgcgctcttctacgtcgcgaataaaaccgggaatactgtcgatatccacggtggcaggttcgttacctgcaagacccataataatggcgatatcggtgtggtggcctttacccgtcagcgacagtgaaccataaacgtccacggcaacgcgagtaacgctatccagtaagcctttttcgaccagatcatcgacgaactgtttacccgccttcataggccctacggtatgggaagatgagggaccaatccccaccttaaacatgtcgaatagactaatcacgataatactcctgacaaggtgactggacttccagtaacgaactaataacagcgcatagtgtaagagggaacgcggcgactggcttaactattcacatgaattaaactaatcaaaaaccgcgatttaactaatattgcgatgattgtctcaagtagtgttttgtagatgtaaagataagtatagtcagggtttcacaccaatttgcagcgccagctcacgaattatgcctgcggtcattccccatacaaaatactgttcgtaccaggacagccatacccgatgtgaatcgccacggcggtagatatctaaagggtgataacgacccagatgtaatgcctgggcgagcggcatttcaaacaccgccgagacttcatcttcactggcgcgatacggcagatcgggcgggataatgccgaccactggggttacctgatagccagttacgctatcgacgggcggcagcacgccgataacttcaacggcggaaggcggtatagcgacctcttcttcagcttcgcgcagcgcggcggcgataactgatgcgtccgtgtcatcgactgcacctccagggaatgccacttgtccagcgtgtttacgcagatgaattgaacgctgagtcagcaacaaccccggttgcggtcgacggacgatggggattaacacggcagcctgacgatgatttagggtttcccggttaatttgcgggcgcaaaagttgaaagcgagataaaaaatcatcaagcgtcaggctacggtattccacgtcttacttctccagttggcgtaatatcttattaactttatcaaaagtttcctgatattccgcttcttcctggctatcggcgacaattccaccgcccgcagagcagtatatttgtccgttaatggcagtcagcgtgcggatagtaatgctggtatccatgttgccgcaaaagctcaaatagccaatgctgccgcaccaggcattacgtcgctgcggttccagttcgtcgataatttccatagcccgtactttcggagccccggttattgagccaccaggaaaagctgcgcgcagcagatcgctggcgtgtaactgttctggtagtcgcgccgttatagtgctgaccagatgatgcacggcagggaagggttccaccacgaacagctctggtacttttaccgaaccggctacggcaacacgaccgatatcattacgcattaaatcgacaatcatcagattttcggcacgatctttcgctgagttcgccagtttttctgcttgtttgctatcttcctgaggatcgggcaggcgtggtagcgtgcctttaatcgggcgggtctggatttcactattatcacaaagaataaaccgctctggcgaaaggcttaaaattgcaccctgttcaagacgtaaaaaagcgctaaatggcgcgcggttggcctgattaagctgaaggaatgcctgccattcatcgccagaataggtcgcatgaaaacgctgggcgagattcacctgatagcaatcaccgctgtgcagatattcctgtacctggcgaaatttttcgccgtactgctcgcgggtcatattggattgccagtcggaagtgagcgtgaaatcttcctgcggcgagaattgctggctttccagccaggcccgacgggcattgacatcattatgactcagcaaagaaactgtatgacgctggtggtcgacaatgagcgcccaatcgtagatacccactgccatatccggcagaacgatatcttgttccgcaatttctggcagtgactcaaaacggcggcccagatcgtagccaaacaaccccagtgcgccgccctgaaatggcaaatcttcgttatgcgttgggcgaatgtctgcgcgatccagcacctgctggagcacctgtagcgggtcatcagtggtcgttgtgcgtttttcgctttcactaacaacggtttctttaccgaaagtggttaaagtgcaaatcggatcggcgaccacaatatcaaagcggctatacggatgatcggcatagccggagtgtaaaagcatcgcccacggcaggtggcttaagcgggagaaataaaattcagcggcgtcctgacgccagggtaaagtaatcacagcgggagataacgtcttcatcagtcctgactctactggctatgtgccgggtagcatgaaataattagcgccaacaatttagcaggagttaacaatgtttgcaggtttaccttcactcacccatgaacagcagcaaaaagctgtcgagcggatccaggaactgatggcacaagggatgagcagcggccaggcaatcgcgctggtggcagaagagctgcgtgccaaccactccggcgagcgaatcgtggcgcgttttgaggatgaagacgagtaacacactaatccgtatcgatttcgttatagaagccgatgatcatttgattgtgagaaaaaggacgctttttatatgtgattaaaagcgtcctgacccatttatgctgatataaatttaactcagaccagtgcttttagttcttcctgcatatatgttgaaaagtattcaggatttttaatcacagagcgttcacctgtctccattttttttgcccatccaaccattttttccgtgaacccagggttccagccttcctggtcagctcgcgccgtaatatcagcggcactcgcgggtactcccagttcttttaaatatttaaagattcccttcgccgtgctttcattcatcgaacttggtgttggcgctgatacatccatggcaccaatgaaatccagggctttatctattacagcaggcatattcttatccttaaaattaaccatgttatcgataagactatatatgaccttaatttgcatctaatatcaaagggattataacgatatggcacgagttaacctgttgacattcaggtgttttaaaggtagcagctcatggtgtgttatccagtaagatggagaaatttaacggtcagtcctcacgctataaccagattattcagctaagaaagaaaaccagagttgctagtcagagggcgaacacaacggcatggttatggttatttatatagttagttttatagataaaattgaaattataaaaataaataatgaattagcaggagcatcaacaggtaatatcttaatctctggtcgatttatgtaaaaccgaccagtattatcgataaattatcgtctgacttattttgcttcgataaagcttacaccgcagccacaatcttaatttcaactttatacttcgggttcatcaaacccgcttgtaccgtgcagcgcaccggcgcatgacccgcgacaacccaggcatcccacgctttattcatcgccgcgaagtcgtttttatcggccaggaaaatggtggcatccagaatgctcgatttattgctgccctgtttttccagcacggcgtcaatctgcgccagcgtgttggcggtttgctcaaaggcatcggcgtcgaggttttccggtacaccagtgtagtagagcgtgttgttgtggattactacatcagaccagcgggcttcagcatcgatacgaacgatagtcatcattttgtcctcattatccttccattttcgtgctgcaaagactgccacaatgtgaggtcgccgtcaccacttcaactggcgaaagcgacctcatcctgacataatccctgttcaaatcaacagggggtagtgtgacggacgattttgcaccagacggtcagctggcgaaagcgataccaggctttaagccgcgagaaccacagcgacagatggcggtagccgtcacccaggcgatagaaaaaggccagccgctggtggtggaagcaggaaccggtacgggcaaaacctacgcttacctggctcctgcgctgcgggcgaaaaagaaagtcattatctcgaccggctcaaaagcgttgcaggatcagctctacagccgcgatttgccaacagtctcaaaggcgttgaaatacacgggcaacgtggcgctgctgaaagggcgctcaaactacctctgccttgaacgtctcgaacagcaggcgctggcggggggcgatctgccggtacaaatcttaagcgatgtgatcctgctgcgctcctggtctaatcaaacagtcgatggtgatatcagcacctgcgtcagcgtggcggaagattcacaggcgtggccgctggtcaccagcaccaacgacaactgtcttggcagcgactgcccgatgtataaagattgctttgtggtcaaagcacgtaaaaaagcgatggacgccgatgtggtggtggtaaaccatcatctctttctggcggatatggtggttaaagagagtggatttggcgagttgatcccggaagcggacgtcatgatcttcgacgaagcccaccagctaccggacattgccagccagtattttggtcagtcactctccagtcgacaactgctcgacctggcaaaagacatcaccatcgcctaccgcaccgaattaaaagacacccagcagttacaaaagtgcgctgatcgtcttgcccagagtgcgcaggattttcgtctgcaactcggtgagccaggttatcgcggtaacctgcgtgagctgttagctaatccgcaaattcagcgggcatttttactgctcgatgacaccctggaactttgttatgacgtggcgaaactgtcactggggcgttccgccttgctggatgcggcatttgagcgcgccacgttgtatcgcacacggctgaagcggctaaaagagatcaatcagccgggctacagctactggtacgaatgcacttcgcgccattttactctggctctcacgccgctcagcgtggcggataaattcaaagagttaatggcgcaaaagcccggtagctggatcttcacctcagcaacgctgtcggtgaacgacgatctgcatcatttcacctcgcggcttgggatagaacaggcggagtcgttgctattgccaagcccgtttgattacagccgccaggcgttactctgtgtgccgcgcaatctgccgcaaaccaaccagccaggttctgctcgccagttagcggcaatgctgcgaccgatcatcgaagctaacaacggtcgttgttttatgctttgtacctcgcacgccatgatgcgcgatctggccgagcagttccgcgctaccatgacgcttcccgttttgttgcagggggaaaccagcaaagggcaactgttgcagcaatttgtcagcgccggtaacgcgcttcttgtggcaaccagtagtttctgggaaggggtggacgtgcgtggcgatacattgtcattggtgattatcgacaagttgccgtttacctcaccggatgacccgctgttaaaagcgcgcatggaagattgccgtttgcgcggtggcgacccgttcgatgaagtgcaactaccagatgccgtcattactctcaaacaaggggtagggcgactgattcgcgacgccgacgatcgtggcgtgctggtgatttgtgacaatcggctggtgatgcgcccttacggcgcgacgtttctcgccagtctgccgcccgcgccacgcacccgtgacattgcccgtgcggttcgtttccttgcgataccatcctccaggtaatttgttacggagtatggtatgatgcgcgcctttttattgatctaagcacgaagacccatgcgaattctggctatcgataccgcgacagaggcctgctctgtcgccctgtggaacgacggtactgtcaacgctcattttgagctttgccctcgtgaacatactcaacgaatcttaccgatggtgcaggatatcctgaccaccagcggaacttccctgactgatattaacgctctggcttacgggcgcggccccggtagctttactggcgtgcgcattggtattggcatcgcgcaagggctggcgcttggcgcggaattaccgatgattggcgtctccacgctaatgacgatggcgcaaggggcgtggcgcaaaaacggcgcaacccgtgtgctggcagccattgacgcgcgaatgggcgaagtttactgggccgaatatcagcgtgatgaaaacggtatctggcacggtgaagaaaccgaagccgtactcaaacccgaaatcgtccatgaacgaatgcaacagctttccggcgaatgggtgacggtagggacgggctggcaagcctggccggatctcggtaaagagagcgggctggttttgcgcgacggagaagttttactgccagcggcggaagatatgctgccgattgcgtgtcagatgtttgccgagggtaaaacggtggcggtggaacatgccgaaccggtttatttacgtaacaacgtcgcatggaagaaacttccgggcaaagaatgaatcttaagagtatgccctgagaaaaaaaggagtcgcatcatggcggttcaaaagaatgttatcaaaggcatactggcaggtacgtttgcgctaatgctgagcggttgtgtcactgtgccggacgccattaaaggcagcagtcccacgccgcaacaagatttagttcgggtgatgagtgcgccgcagctgtacgttggtcaggaggcacgctttggtggcaaagtggttgcggtacaaaaccagcaagggaaaacccgcctggaaattgctaccgtaccgctggacagcggagccagaccgacgctgggagaaccttctcgcggtcgcatttatgccgatgtgaacggttttctggacccggtggatttccgtggacaactggttacggtagtcgggccaatcactggtgcggttgacggaaaaatcggcaacacgccttataaatttatggtgatgcaagtaacgggttacaaacgttggcatttaacccagcaggtgattatgccgcctcagccgattgatccatggttttatggcggtcgtggctggccctatggctacggcggatggggctggtataatcccggccccgcgagagtacaaacagttgtaactgaataattgcttgtttttaaagaaaaagaaacagcggctggtccgctgtttctgcattcttacggtaaagataaaaataaatagtgacgcgcttcgcaaccttttcgttgggtaattatcaagctggtatgatgagttaatattatgttaacggcatgtatatcatttggggttgcgatgacgacgaacacgcattttagaggtgaagaattgaagaaggtttggcttaaccgttatcccgcggacgttccgacggagatcaaccctgaccgttatcaatctctggtagatatgtttgagcagtcggtcgcgcgctacgccgatcagcctgcgtttgtgaatatgggggaggtaatgaccttccgcaagctggaagaacgcagtcgcgcgtttgccgcttatttgcaacaagggttggggctgaagaaaggcgatcgcgttgcgttgatgatgcctaatttattgcaatatccggtggcgctgtttggcattttgcgtgccgggatgatcgtcgtaaacgttaacccgttgtataccccgcgtgagcttgagcatcagcttaacgatagcggcgcatcggcgattgttatcgtgtctaactttgctcacacactggaaaaagtggttgataaaaccgccgttcagcacgtaattctgacccgtatgggcgatcagctatctacggcaaaaggcacggtagtcaatttcgttgttaaatacatcaagcgtttggtgccgaaataccatctgccagatgccatttcatttcgtagcgcactgcataacggctaccggatgcagtacgtcaaacccgaactggtgccggaagatttagccttcctgcaatacaccggcggcaccacaggtgtggcgaaaggcgcgatgctgactcaccgcaatatgctggcgaacctggaacaggtcaacgccacctatgggccgttgctgcatccaggtaaagaactggtagtaacggcactgccgctgtatcacatttttgccctgaccattaactgcctgctgtttatcgaactgggtgggcagaacctgcttatcactaacccgcgtgatattccagggttggtaaaagagttagcgaaatatccgtttaccgctatcactggcgttaacaccttgttcaatgcgttgctgaacaataaagagttccagcagctggatttctccagtctgcatctttccgcaggcggtgggatgccagtgcagcaagtggtggcagagcgttgggtgaaactgaccggacagtatctgctggaaggctatggccttaccgagtgtgcgccgctggtcagcgttaacccatatgatattgattatcatagtggtagcatcggtttgccggtgccgtcgacggaagccaaactggtggatgatgatgataatgaagtaccaccgggtcaaccgggtgagctttgtgtcaaaggaccgcaggtgatgctgggttactggcagcgtccggatgctacagatgagatcatcaaaaatggctggttacacaccggcgacatcgcggtgatggatgaagaagggttcctgcgcattgtcgatcgtaaaaaagacatgattctggtttccggttttaacgtctatcccaacgagattgaagatgtcgtcatgcagcatcctggcgtacaggaagtcgcggctgttggcgtaccttccggctccagtggtgaagcggtgaaaatcttcgtagtgaaaaaagatccatcgcttaccgaagagtcactggtgaccttttgccgccgtcagctcacgggttacaaagtaccgaagctggtggagtttcgtgatgagttaccgaaatctaacgtcggaaaaattttgcgacgagaattacgtgacgaagcgcgcggcaaagtggacaataaagcctgagtgttaagtcagtcgtcagacgccggttaatccggcgttttttttgacgcccactaaagagaaaacaatttgaattaccaaatgattaccacggacgatgcgctggcttctttgtgtgaagccgtccgtgcctttccggcgatagccctggatactgaatttgttcgtacgcgcacttattacccgcagctggggttgattcaacttttcgatggcgagcatctggcgctaattgatcctctcgggatcaccgactggtcaccgctgaaagcgatcctgcgcgatccgtccatcacaaaatttctccatgcaggcagtgaagatctggaagtgttcctcaatgtctttggcgaattaccacaacccttgattgacacgcaaatccttgctgccttctgcggacgcccgatgtcatggggtttcgcttccatggtggaagagtattccggcgttacgctggacaagagtgaatcgcgcaccgactggctggccagaccgctgaccgaacgtcagtgtgaatacgcagcggcggatgtctggtatctgttaccgatcaccgccaagcttatggtagaaacggaggcctccggctggctacctgcggcgctggatgaatgccgcctgatgcaaatgcgtcgtcaggaagtcgttgcgccggaagatgcctggcgtgatatcaccaatgcctggcaattacgcacacgccaactggcctgtctgcaactgttagccgactggcgactgcgcaaggcgcgagagcgcgatctggcggtgaactttgtcgtgcgtgaagagcatttgtggtcggtcgcgcgttatatgccgggaagtttaggcgaactggacagcctgggtttatccggtagcgaaatccgctttcacggtaaaacgctgctggcgctggtggaaaaagcgcagacattgccggaagaggccttaccgcagccgatgcttaacctgatggatatgcctggttatcgtaaagcgtttaaagcgattaagtcgctgattactgacgtgagcgaaacgcataagatcagcgccgaattgctggcatcgcgtcggcaaatcaaccaactgctgaactggcactggaaactgaaaccgcagaacaatttgccggagctgatttccggctggcgtggtgagctgatggcggaagcattacacaatttattgcaggaatatccgcagtaaaatcttccgaagccggactgggcgcgctcagcgccacatccggctttggcaaactacaaatccaacaccaggcgtttacccttcgcacgcgaacaacagatcaacatactttgctggctggcacactcttcatcgctaaaatactgatcccgatggtcagcttcaccttccagtattgctgtttcgcaggttccgcataccccttcacgacataaacattccactttcgcggctttattattttcaataacctgcaaaatagtcatctcttccggcaccacaaactcttttccggaacgggcaagcaccagggtaaaggcatcgccggttttgtcttcgatagcaaattgctcaaagtgcagcgtatcggcgacgatgtccagacgcgcagcttcacttcttaccgcttcatttagcgcctcgggaccacaggtataaacgtgtgtgccaggttcgatatccgccaataatcgcgctaattccagtcgtgttccggttgatgagtgatgcaagtgaactttctcagcctgcggatgctggactagctcatcacgaaatgcgcaactttctggatttcgcgagcagtaatgtagctgccagtcgacgtcgctgtgttgcagctctgccatgtgcgacaggaaaggggtgataccaataccgcccgcgataaacagatgctttctggctgagggaattagcgcaaacaggttattaggcgttgaaatcgttaaccgattgcccacttttacctgctgatgcaaaaagcgggaaccgccgcgcgagttttccttcagccgaacggcaatctgataacaagaggtgtcatgcggcgaactcagtagtgaatacgcattgctgtactggttatcaccatcgctcatctgcacaatgacgtgacttcctccagtaaacgcaggtaatggtttgccatcggttgccaccagcgtgaagcgtttcacctgttcggtaaggggttcaacctggctcacctgtacttcaaacatttgatagtctgacattgctgtactccatcaaaaatcagcccagcggcggaaaataccgccgccgatgtcattagtccttaaacacctgcgccagcagattatggaaatgggcgataccatgttcggaaatgccactaccgctactgtcggccatgatgcgcccctgaccacgatagccacgcgatttcagccctttctgtacgctttcaaccagacgtaaatcttccggacggaacacatcgcgataccactcaatcagcgatttttgctcgtcggttaactcttcattggtgaagtaaatatcgtagttttgcagggtagtttcagaatccaccgggaattcataaatgaccgtcatcatccctttgatcggggtgacgttcagcatcgtgcacggccacagccagaaaccgtggaatgccgcatccgtaccctcttcaaatttaaacgactgttcggacggtttggcgaaaccgtattgcagcgtccagttaccgtgcatggtgtgccagtaacgatcaacctgtacggagtcggagaaacctggatgcgccggaccacagtgatagcactcgagatagttatcgacaatgttcttccagttggcaggcgtgcgggtggtaaagcgggccgccagtttcagatcgtggacttccgggcaggcttccagcactttcgcgcccaggccgggtaattgatcttctacgctggtggcgttggggtccatgttgatgaagacgaatccggcatattcttccagacgcaccggaaccagttgcgctttgtcgctatcgaaattggcgacgttttcgcagttacgtgcatgggccaggttgccatcgagtttgaatgcccatgcgtgatacgggcaggtaatcacattttttgcttttccttcaccgctcaacaactgatgaccacggtgcggacacacgttatagaacgcgcgcaaaaccttatcacgaccgcgtaccagcacgatgctttcgccaatgatctcacgcgtcacataatcattggcattcgccagttcgctgctgtgagcgacgcaaatccagcttttggcgaagacgttctctttttcgtgttcaaacgcgttctgatcggtataaaaacgggcaggaatggtccacgcctcttgcgggttagcgcaaaaattttcgggtagtacaaagtcagggctcagattgctcatagggatacctttatcgttaggatgatggcgctcagttgtcgcctttgaatacggttcccgcagggagcactggcgttttttccagggcttcaaccggtgtctgcgggagataatgttcaacttgatgagccggaatgtcggcgtaatcctgtttcagccagcgaataaatccgccgactttcaccagtaaaatgacgaggaagggaagggctgtgagcacgacggtggttttcatcgtttccagcgaagcaccggtaaacaagatggaaagcgggatcagagtgatcaccacgcaccagaaaagacgcagcccacggtcaggatcgtcaccttcctggagattacgcgtactggtcgcagccatggtgtaggccaccgcatccatatgcgaggcaaggaaaataatcatcacgcccaggtatgcggcgaggaacaatttaccggctggcaacgacatcagaacttgctgtacagctgtttcgccgcccagtgtttccagcacctgtgggacgttgattacgccattgataaactgatgaatggcatagctttccattacgccgaagaagaaccagcaaccgacggtgctgccgaggatcagtccccagataacttctttaatcttacgaccgcgggaaacgcgggtgacaaacattgctacgccaggggtgtatgagatccaccacagccagtagaaaacggtccagttgcgggtaaatgaaccatcgccaagcggatcggtgaataagctcatttgcaggaagttttgcgtggtcagaccgatggcattgatgatgctgttggtaataaattcggttgggccgacaatcagcaccagtaatggcagcaggaacgcgccccagccaaccattttgctcagacgttgcaaaccgttgttgataccaatccacgagcttaggcaaaaaatgccgccggaaagcaggatcacaaatgcctgcacggtgaagttatcgggtaaaccggtcagcgcggaaagtccacgagtaaaggttgctgcggtgacaacaagggaaatagtcagtgcgccgacagtggcgatcaggaacatcaaatcaaccagttttccccatgggccttgcgggcgaacgccggtaatcgcggcaataatgccggaaagactcagacctttgtttttacgcacatgaaagtgataagccatgattaatgaggccagcgtataagttgcccaggcgctgatgccccagtggaagaaggagtaagggacgctaaattcgagtgcctgttgtgaacgcggtgcgatatttaatccaggcgtttgataataataggcccattcagcaaccccccaataaagcgtagaagaacctaaaccggcacaaataaacataaacagccaggagagcgtgctgtattctggttttccttcgccaagacgaatattgccgtatttactggtggctaaataaatcaccagtcccattgccagcaaaaccaatacctgtacggcggaacctaacgtacgcgtaacaaaagtgtatattgcgttggccgcgtcggccgattgttgtgggaaaaggcttaatgcagctgcgatgaaaagaatggccaccaggctgatgcttatcagcggcacatcttttttcttaacattgctcatcatgagtcatctcctgggcataaaagcccgtctctggcttttgccagttgtaattatttgcagggtaatgagttgtatgttgtgtttaacaaattgattatttgcatgttacataaattaaacaattaagaatacggaaagccataaaacacgaaacggaaacaataaaaggtgaaatgacgcaggttatttactgcaaagaacgaataaaaaaaccgcgtcagtgacgcggttcaaataaactggtttgaccttaacgcaaaataattttgcaaatcgcgtcggcaacctgtggcgtggtggcattgcctttcatatcaggtgttttcggcccgtgagcaatcacttcttcaattgctgccagaataccgttatgcgcttgctggaaacgctcatcgccattgccgagaaaatcgagcatcattgcaccggcccaaatcgtggcgatagggttagcaatgtttttcccgtagatatccggcgcggaaccgtggactggctcgaagagcgacgggaaagtgcgttccggattcaggttggcggatggggcaatgccaatggtgccggtgcaggccgggccaagatcggaaaggatatcgccaaataaattggacgccaccaccacatcgaagcgttccggctgcatcacaaaacgcgcgcagagaatatcaatatgctgcttgtcccagcggatctccgggtaattctcggccattgcttccactcgctcatcccagtacggcatgctgatggctaaaccgtttgatttagtggcagaagttagcgtcttacgtgggcggctttgcgcaagttcgaaggcataacgcaaaatgcgatcgacaccacgacgcgtaaataccgattcctgaatgacgacttcatgctctgtaccttcattcactctaccgccgagcgaggaatattcgccttcggtgttttccctgaccacgtaaaaatcgatgtcgccaggctgttttcccgccagcgggcagggaacgccaggaaagagacgaaccgggcgcaggttgacgtactggtcgaattcacgacgaaatttcagcagcgaaccccacaacgaaatatggtcaggaacggtgtccggccagccgacggcaccaaaatagatggcgtcgaaacggctaagttgctcatgccagtcgtccggcatcattttaccgtgatggctgtaatactcgcagctcgcccactccatttgctcaaaactcaaggcgaagccccagcgctcagcggcagcctgtaacacgcgaatcccttcaggaaggacttctttgccaatcccgtctcccgggatcgcagcaatacgcatcgttttcatcattgggttctcacttcctgaccatcaaaattgacaacatcaccatcctataattgactgaaaaggaattaatccccgtaactggtgaaacataaaacacgaatcatgaataatttaccgctgctgaacgatttgcgcgtctttatgctggtggctcgccgggctggttttgccgccgtggcggaagaactgggcgtttcaccggcgttcgtcagcaagcgcatcgccttgctggagcaaacgctaaacgtggtgttgttacaccgcaccacccgccgcgtcaccattaccgaagaaggagagcggatttatgaatgggcgcagcggattttgcaggatgtcggtcagatgatggacgaactttctgacgtgcgtcaggtgccccaggggatgctgcgtattatcagcagctttggttttggacgacaggtggtggctccggcgttatcagcgctggcgaaggcgtatccgcaactggaattacgttttgatgtggaagaccgactggtcgatttggtcaatgaaggtgtcgatctcgatattcgcattggcgatgacatcgcccctaatttaatcgcccgcaaactggcgaccaattaccgcattctctgcgcgtcgccggaatttattgcgcaacattgcgcgccgaaacatttaaccgatctttctgcattgccgtgcctggtcattaaagagcgcgatcatccttttggtgtctggcaattacgcaataaagaaggccaccatgcgattaaagtcaccggcccactgtcgtctaatcatggagaaattgtccatcagtggtgtctcgatgggcaggggattgctctgcgttcctggtgggatgttagcgaaaacattgccagtggtcatttagtgcaagtgctaccggaatattaccagccagcgaacgtctgggccgtttatgtttcaaggctggcgacgtcagcgaaagtgcggataacggtagaatttttacgccagtattttgccgagcactacccgaatttttcactggagcatgcctgattaattattcaattatcgggttgatatcgggttaaaacctgattttctcctttctaagccgctacagattggttagcatattcacctttaatcgcgcatgatcgaaagataattaaagaggttaatgtgttcgctgaatacggggttctgaattactggacctatctggttggggccatttttattgtgttggtgccagggccaaataccctgtttgtactcaaaaatagcgtcagtagcggtatgaaaggcggttatcttgcggcctgcggtgtatttattggcgatgcggtattgatgtttctggcatgggctggagtggcgacattaattaagaccaccccgatattattcaacattatacgttatcttggtgcgttttatttgctctatctggggagtaaaattctctacgcgaccctgaagggtaaaaataacgaggccaaatccgatgagccccaatacggtgctatttttaaacgcgcgttaattttgagcctgactaatccgaaagccattttgttctatgtgtcgtttttcgtacagtttatcgatgttaatgccccacatacgggaatttcattctttattctggcgacgacgctggaactggtgagtttctgctatttgagcttcctgattatttctggtgcttttgtcacgcagtacatacgtaccaaaaagaaactggctaaagttggcaactcactgattggtttgatgttcgtgggtttcgccgcccgactggcgacgctgcaatcctgatacattcagcccgcgttgtcgcgggcttcccacttgtaatcctccctgatttttctctgatatggtgctaaaaagtaaccaataaatggtatttaaaatgcaaattatcaggcgtaccctgaaacggctggaataaaccgttttcagcgcattccccgaaggagggaataggatgctgcaaatcccacagaattatattcatacgcgctcaacgcctttctggaataaacaaactgcgcctgccggaatattcgaacgtcatcttgataaaggaacgcgcccgggggtttacccacgcctttccgttatgcatggggcggtcaaatatctcggctacgctgatgaacacagtgcagagcctgatcaggtgatccttatcgaagcggggcagtttgcggtgttccctccagaaaagtggcacaacattgaagccatgactgacgatacttatttcaacattgacttcttcgtggctcctgaagtcctgatggaaggtgcgcaacaacggaaagtcattcataacgggaaatgaatcatgggcaaagcaacgtataccgtgaccgtcaccaataacagcaatggcgtttctgtcgattatgaaacagagacgccgatgactttgctggtgccagaagtggcggctgaagtgataaaagatctggtgaataccgtgcgttcttatccggtgcgccgtaaaaccccgtccttcagggcggggatataaggcgcggttttccacctaaccaggtgtttgctgttgttcaatgtattggcggatgacggatattggcgcacctccgcagctactggcaaaatagccaggactccacaaaacgcctttgtagtaatacctgactgcaatatctggtcgatctcgtcgcagtaacctacccgatacgcctttgaggctgtttaccagactggatatcgccagtttgggaggatagttaattaacaaatggacgtgatctggttcgccatccatttcaaccagttcagcttcaaaataagcacatacatttgaaaagtaagtgcgtagtttttctgtcgcgtcatggtcaaaaatctgacgtcggtatctggtgacaaagaccaggtgaacatgcatcaggaaaacacaatgccttccacgccggatatcggtttcttttttcacagaccaaagtatcatttggcctgtgaaacgattacaggcatttaaattccagttaagaccaggtggtcaacaggagtgtgaaatgaggcgcttcgcaggcgcatgtcgtttcgttttcaatcgtgctctggcacgtcagaatgagaatcatgaggccggtaataaatacatcccttacgggaaaatggcttcctggctggttgagtggaaaaacgccactgaaacgcaatggcttaaagattcgccctcacagccattgcaacagtcactgaaagaccttgagcgggcttacaaaaacttcttccggaagcgggctgcttttccccgattcaaaaagcggggacagaatgatgcattccgctacccgcagggcgttaagctcgatcaggaaaacagccgtatttttctgccgaaacttgtctggatgcgctaccggaatagccgtcaggtcacgggtgttgtgaaaaatgtcactgtcagccagtcctgcggtaagtggtacatcagtattcagactgaaaatgaagtatcaactccggttcacccttcagcattaatggtcggactggatgctggcgtggctaaactcgccacgctgtcagatggcacagtctttgggcctgtaaacagttttcagaaaaaccagaagacgctggcgagacttcagcgacagttaagccgcaaggtcaaattcagcaacaactggcagaagcagaaacgcaaaatacagcgactgcattcctgt

SEQ ID NO: 60 - DNA, 44406 bp, Escherichia coli
  source 1..44406: mol_type = genomic DNA
aaatatcgagttcgcacatcttgttgtctgattattgatttttcgcgaaaccatttgatcatatgacaagatgtgtatccaccttaacttaatgatttttaccaaaatcattaggggattcatcagtacctggcgtcagtccttgcggggagaaggctttcgtaatcttgccctggcattattgtcgtaaaaacgcattaccggacacacgacattcacaatgtgtgttaattttactgacatctttcaaaaggagcacaatcatgccgcacatcgacattaaatgttttccgcgtgaactggacgaacaacaaaaagcagcacttgctgcagatattaccgacgttattattcgccatctgaacagtaaagatagctcgataagcattgctctacagcagattcaaccagaatcttggcaagctatctgggatgccgaaatcgcgccccaaatggaggctttgataaagaaacccggttacagcatgtaatgcttaacccgccgtaactcgcttgccgctggtaacaaacgtgccagcacctaaatgatgcaacgtattgagcttatcatcatcaaactgccagcggccttcgacaaatacccgtgcgtctgccgctgctgataccacctcgccaaacagcgtgtcgtatttttgttgcgcagaagtcgcaggtagcaggcggcactccatccacgccaggcatttctcttcaacaagtggcaaaccaagcaccggacctttcaccaccggaatgccatagcaattaaatttatcttcttcacgacccgacacgcttcccactgcccacgtccagttagttgctgcaacgcccgggataacgatgccaaatttaccgttacgttcaatcaactccctggtccatgtcgatttatctaccacaatcgccacgcgtggcggttcaaactccaccggcattgaccaggctgctgccataatgttacgccgctgggattgctcatcgaaactggtgatcatgacagttgggccatgatttaacagacggctggcatggtgtaattctatggggatgaatcggctcatggtatcgcctcgcgaagaaggtttttttaagcgtagtccgtaacgcaataagtaacgaaattaacgggattggcgatttgcaaacgtgatgcatgtccgcgatcgcacaaaatagccggtgcggcgtctattccaggttataagttgagaaaaccactaagggaaacgcctgatgacgcccattctgaatcactattttgcccgtattaactggtcgggagctgctgcggtcaatattgatacgcttcgtgcattgcacctgaaacacaattgcactattccgtttgaaaacctcgacgttttgctgccgagggaaatacagcttgatgatcaatcgctggaagagaaactggtgatagcccgtcgtggcggttactgttttgagcagaatggcgtgtttgagcgggtgttacgcgagctggagtttaacgttcgcagcttgttagggcgcgtagtgttatcaaatccgccagcattaccgccgcgcacccatcgtttgctgttggtggaactggaagaggaaaaatggattgctgatgtcggtttcggtgggcagacgctaaccgcgccgattcgtttagtttccgatctcgtgcagaccacgccacacggagattatcggttgttgcaggagggtgatgattgggtgttgcagtttaatcatcatcagcactggcagtcgatgtaccgttttgatctctgcgagcagcaacaaagcgattatgtgatgggcaatttctggtcggcgcactggccgcagtcgcattttcgccatcatttgctgatgtgccgccatttgccggacggtggcaagctaacgctgaccaattttcattttacccattatgaaaatgggcacgcggtggagcagcgaaatctaccggatgtggcgtcattatatgctgtgatgcaagaacagtttggtctgggcgtggatgatgcgaaacatggctttaccgtggatgagttagcgctggtgatggcggcgtttgatacgcacccggaggcgggaaaataatttatgtcaggttgccggatgcggcgtaaacgccttatccggcatacattagctcggttgtagacctgacaggcgaagcgcatcaggcaacggtttcagagttcaattgcccattcggcatgaaacaaaatcaccgctgtgcctgaaatggtgactttttccggttggttatcacgaattgtcaccgtcacttcaatcatgccgtcacgccccaatgcgcgcccctgatggcctttaacacataacacgttgccatcgtggggcaatacgttgtgatgtaccaaccatgcacccatcgggccattggcattgccagtcaccggatcttccacaataccaatcgcaggcgagaacatacgaccatcggtttcgtttttgcctgggcggatctggaacgggaagaaaccattgcagccaatctgtttgctgatagcgctcagcgcagcaagatcaggcgaaagggcgtcgatatccacttccggtttcaacgggatcatcacttttgagtgtcctgttgttgcgacctgaattggcaagcccggcaaaatatcgtcttcagtgagatgaagcgcgttgataatcgcctcacgtgtttcaccttccagcggtggctcaaagcccggcgtaccttgttccagcgaaatacgataatcatcgttgtgcttttcgatagtcacgcgatgttttcctgccagcgatgtttgccagattgtgcaatttcctaaacctaacaccttcgcacgtacatagtgcgcagctactgtcgcgtgaccgcaaatcggcacttcaaccgttggcgtaaagtagcggatgcgcacatcgctgtcgtcgctgtgcagcagaaaagcagtttccgaatggcctaactcgcgggcgataagctgcatttgcgcttcgctaagattatcggcggggaaaacaacaccggcagaattgccgcgaaatggttgagaggtaaaagcatcgacgtggtacacctgcggtttcattaacgttctcctgtgactggagaactatcatagcctgcaagtggccggagagcgaagggctatccggccagggtgaaattatcgccgcgaacgcacaatctgatatcgacgagtaaagtactcaaacggcgcgctccacacatgcaccagtcgggtgaacgggaagagcaggaagatggtcattcccaacaccagatgcaggcggaagacgaacgctacgccgttgagcatctctgacgatccaccacggaaagtgacaatgctttgcgcccaacccaccagcttcatcatttcgctaccatcaggatactgtgctgaaaacggtatggtacttagccccaacagacactggatcagcaaaatgctcatgatgataatatccggcgtagtggaagtggcacgcacgcgctgatttgtcagcctgcgccacagcagtcctgcgccgccaatcaacgtcaacacaccgcaaataccgccgagcaccatcgccatgagttgtttcgctgccactggcaaaaaccacgcgtacatccagtgcggcgttaacatgccgaacaagtgcccgaagaaaatccccaaaatgccgatatggaacagattcgaccatatcaccatcccgcgtttatcgagcatttgacttgaggaggcgcgccaggtgtactgcccgtagtcgtagcgcagccagctgccgaggaaaaacaccgtcgcacaaatgtacgggtagatatcgtaaaaaaagacgttcagatactgaatcatttcccacctcccgcactgatgtcgacatactgcggcgcgacatcctggctaaagcgtcgctgatattgattaagcggcgagctgtcacacgccgtggcgttatcttcaataaacttcacctgttcctcttcccacactgcatcaagcgcctggcgggtgtcatcgcgctcttcgctgtttacttgttttgtgacactgtcacttgaaagggagcttcccgccagttgcagcagagcatcaaacaacgcgtaccacggtgcctcgcgttgttttaagcgaccgccaagcagggcgaggatcggcgcaacattgagcaatccttctttcgcctgatcgtcaggcagtacgcttaaatactccagatacagcggtagataatcgggcagttcccgacaatccagttgcaggccgaccttttcatactccgccagcaggtccaccattgcctggccgcgatcgcgggactcggcatgaacatgttcgaacagcagcagcgacgtagtgcgcccgcggtcaaacacttcgcaccattcggcctgtttatccagcagcggcgcgttaagcaggttgtgggtgaaatccgtaagcatcggcgcgtcgcggcggatcaacgccagcgcgtcctccttgcattcccacaacagctcgtccggatactccatcaacaggccgatcactttgaggatctgcattattcgccctccgctttgtcgcgcacttcggtgatgttgatggcatcgatacggctactgttgaacaggttgaatttactgtccgaaccgtggcaaccgtcgccaaaggtaaaaccgcagccgtttcgttctgcgaaggcatcgcccgccatttcccgatggctcgtcgggataacaaaacgatcttcatagttggcaatggcgagatagcgatacatttcttcgacctgggcgacgctcaggcctacttcgtcgatggcacgagtatcagtaacgccttccacggtttgtgaacgcatatagtggcgcatcgccatcatccgtttcagcgcccgcagtaccggaccggtatcgccggcactcaacatattggcgagatattgcaccggaatacgcaggctttcgatggcgggcagcacgccttcgcttttcggcaaaccgcccgcatctgcgtaggactgaatcggcgacagcggaggaacgtaccagaccattggcagggtgcgatattcagggtgcagcggtagcgccagtttccagtccatcgccattttgtagacaggcgaacgctgggcagcttcaatcacgttttgtggaataccttgtttcagggcttcctcgatcactgagggatcgtgtggatcgaggaacacttcgcactgacgtttatagaggtcaacttcgcgctcggtgctcgccgcttcctcgatgcggtcggcgtcgtaaagcagcacgcccagataccggatgcgacccacgcaggtttctgagcacacggtgggttggcctgactcaattcgcggataacagaagatacatttttctgacttgccgcttttccagttgaagtagatttttttgtacggacaaccgctaatgcacaaacgccagccacggcatttatcctgatcaatcagcacaatgccgtcttcttcgcgtttgtagatagcgccgcttgggcaggtcgccacgcaactgggattgaggcagtgttcgcacaggcgcggcaggtacatcatgaaggtgttttcaaactgcccgtacatctccttttgtatggcctcgaagttgcggtcgcgggcacgtttttcaaactcgccgcccagcagttcttcccagtttggcccccagatcactttgtccatccgcttaccgtcaatcagcgagcgcgggcgagcagtagggatatgtttgccttccggtgcgctatgcaaatgttcgtagtcgaaagtgaaaggttcgtagtaatcatcaatctgcggcaccaccgggttggcgaagattttggttattacgcccatcttgctgcccagacgcggacggatcttgccattcacatcgcggacccagccgccttgccactcttcctgatcttcccagtttttcggataaccaatgcccggtttggtttcgacgttgttaaaccatgcgtactccatgccttcgcgcccggtccagacgtttttacaggtcaccgaacaggtatggcagccgatacatttgtcgaggttaagcaccatgccgacttgtgaacggattttcattttttcgcctcctgtacctgatcgcgaccttcatcatccagccagttaacgttcttcatcttgcggatcatgatgaactcatcgcggttcgatccgacggtgccgtagtagttaaagccccaggccagctgcgcgtaaccgccaatcatatgcgttggtttcgggcaaacgcgggtgaccgagttatgaatgccgccgcgcatgccagttacttccgaaccaggaatattcataatgcgttcctgggcgtgatacatcatggtcatgcccggcggtacacgttggctgaccaccgcgcgggcagtcagcgcgccgttggcgttgaatacttccacccagtcgttatcgacaatggtcagttctcgggcatctgtttcgctgatccagacaatcggtccaccgcgagagagcgtcagcattagcaggttttcactgtaggttgagtgaatgccccatttctggtgcggcgtcaggaagttaagtgctttttccgggaagccgtttggcggtatctggcgcatctcactgacgctacgggtgtcgataggcgggcgataagccaccaggctttcaccaaaagcacgcatccacggatgatcctgatagagctgctggcgtcccgacagcgtgcgccacggaattaactcatgaacgttggtgtatcccgcgttataggatacgtgatcgctttccagaccggaccaggtggggctggagataattttacgcggctgcgcctgaatatcgcgaaagcgaatcttctcgtcctctttgtgcagcgccagatgggtatgttcgcgcccggtgatctcgcccagcgcctgccacgctttgactgcaacatgaccgttagtttccggtgccagtgccagaatcacttctgaagcgtcaatggcggtgtcaatcagcggacgcccctgtgccgggccatcacgcttggtgtaattgagtttgccgaggaaatcgatttcatcctgggtattccacgaaatccctttaccgccattgccaagtttgtccatcaatggcccgagcgaggtaaagcgttcatacgtagcagggtagtcgcgctccaccgccacaatattcggcgcggttttgcctggaatcagatcgcattcgcctttgcgccagtcgagcacttcacacggctgtgagagctctgccggagagtcatgcagtaggggttgtaataccacgtcggtttctttgccaagatgacccacgcacacttgcgaaaatgctttggcgatacctttgtagatttcccagtcgctgcgtgattcccacgccggatcgaccgccgcagaaagcggatgaataaacggatgcatatccgaggtgttcatatcgtctttttcgtaccaggtggcggtgggcagaacgatatcggagaacaggcaggtactggacatgcggaagtcgagcgtcaccagcaggtcgagcttgccttcaatcgccgcagtttgccactcgacttcttccggtttgatcccgtcgctggcaccgagttcctcgccctgaatcccgctttcggtccccagcagatacttctgcatatactcgtggcctttgccggaggagccaagcaggttagagcgccagacaaacaaattacgcggatgattgctgccgctatctggttgttcgcaggccatacgtaaatcgcccgatttcagcgcctgggcggtaaattctgtgggggataatccggccttgtcggcttcagctttaatcccgagcgggttacgccccagctgcggcgcagaaggtagccagcccatacgttcggcgcgaacgttgaaatcaatcagatgaccgctgtacttactggcatcggcgagcggtgaaagtaactcctgagcagagactttttcatagcgccattggctggaatgattgtagaaaaacgaggtgctgttcatttggcgcggtggtcggttccagtcgagcgcaaaggccagtggcaaccagccggtttgtgggcgcagtttttcctggccgacatagtgtgcccagccgccaccgctttgcccgacacaaccgcagaagatcagcatattgatcatcccacggtagttcatatccatgtgataccagtggttgacgccagcgccgaggataatcattgagcgcccatgcgttttatgggcagtatcggcaaattcacgagcgatggattcaatatactggcgcggcacgccggtaatttgctcaccccaggctggggtgtacggtttgatttcagcgtaatctttcgcactgttttcatcttccagcccgcgatcgaggccgtaattcgccagtaccaaatcataaacgctgaccaccggacaggtgttgccatcgactaacgtcaggtttttaacgggcaattggcgcaccagcaccggattgtgttttacgctgcgaaaatgcggattttcaatgccgccaaagtaggggaaggccacgcctgcaacagcgtcatgttgaccgagcagggttaacgacaattcggtttccgtaccggcggcaatggattccagattccatttgcctttttctccccagcggaaaccaatcgaaccgttcggcactaccaattcacctgcggtattaactgctacggttttccactgcggattgttgctttcgcccagtccatccaccaggtcagatgcgcggatcatgcgcccgggaacgtagctaccatcgtcgcgaggctccagcattaccagcatcggcatgtcgctgtagcggcggcagtagttgataaagtagtcgctgggattatcgagatgaaactcttttaaaatcacatggcccattgccatcgccagggcgctatcagtgccttgtttcggtgccagccactggtcgcacaatttggccacttcagagtagtcaggggtaatggcgatggttttagtgcctttgtagcgtacttcggtaaagaagtgggcgtccggcgtacgtgtctgcggtacgttagacccccaggcgatgatgtagctggagttataccagtcggcagattccggtacgtcggtttgctcgccccaggtcatcggcgaggcgggcggcaggtcgcaataccagtcgtagaaacttaaacaggtgccgccaagcagcgacagataacgcgttccggcggcgtaagaaaccatcgacatcgccgggatcggcgagaaaccggcaacgcgatccgggccgtaggttttgatggtccagacgttagcggcggcaatcagctggtttagttcctgccagttggagcggataaacccgccgcgcccacgcacttgtttgtagctcaggcacttttgcggatcgttcataatcgatgcccacgccagtaccggatcgctgtgttgcttgagggcttcgcgccacagttcaatcagtcgtttacgaatgagcgggtatttcaggcggttagcgctgtaaagataccaggagtaacttgcgccacgcgggcagccgcgaggttcatgattgggcaggtcagggcgagtgcgcgggtagtcggtctgttggatttcccaggtcaccagaccatttttaacgtagattttccagctacaggagcctgtacagttaacaccgtgggtggaacgcacgattttgtcgaactgccaacgctggcgatagctgtcctcccagtcgcggttgctatgcatcacctgtccgtgaccatcggcaaaggtttcgcccttttgtttgaagtagcgaaagcgatccaaaagtttactcatgacatgactcctgctccaggaatgaattgggatctgatgccttgtcggatgcgacacggttgtacatcaggcatcgatctcttatttttggctgaacttccgccgaccataaaccagccaggtcagcagcacacaaacgatgtagaagattaaaaacactttcatcgcgccgaccggagagccggtcatattgagcgacatgccaaacgcctgcggaataaaaaagccgcccactgcgccaatggctgagataaagcccagagccgccgccgtttcggtgacggcttctttctgagcttgctcatcactaccgcctttcatctttacccgataaatggttatctggcgaaagatgacggcgatcatctggaaagtagaaccacttcccagacccgcagtcagaaacagccccataaatacggcgtaaaaggcgatgaaattaccggagcctgtgcccggtaaggtaaggaacagcagggcactgaaaatcgccataaaaataaagttgatcaacgtcacccgcacgccgccgaacttatcggaaatagcaccaccaaccgaccgcgcgatggcaccgataaatgggccaaagaacgccaggcgcagaatattcacatccgggaactgggtttttgccagcatggcaaaacccgcagaaaaaccgataaacgaaccgaaggtggcaaggtaaagcaggctcagcagccagagatgcaggcgttgtaagacagggagctggtcggcaattgaggcgcgtgaactggcgatatcattcatccctgaccaggcggcgatcgtggcaatcgccagtagcggtacccaaatccatgcggcattcgccagcgacatcaccgaaccgtcggcctgcggtacgccattgacgccgagaaaggcaaatacaggtacaaaaatgaccagcggtgcaaccagctgcattacacttacacctaagtttcctaatccgccattaatcccaagagcgctcccttgtttggcttttggaaagaagaaactgatattgcccatgctcgaagcaaagtttgcacctgcaaaaccgcatagcaaagcgataacgataaatatcccaaaaggagtattcggattttgcacggcaattccgagccagacgcaaggaataatcaggattgcagtactaaaaaccgtccatcggcgtccaccgaatataggcaccataaaggagtagggaacacgcaataatgcgccagaaacggagggtaatgcggttaataaaaagagttgatcggtagtaaaattaaaaccgattttattgagattaacggtaactgcgctaaatagcatccagacacagaaggcaagaagtagacaactgactgatatccagaggtttcttcgagcaatatgttttcctttattttcccagaaggccggattttctggtttccagtcgcgtaaaagataacgactatttttctcattttgcagtgccatattgttcctcacatgcacacattggtaatgaaaaaagacaaaacaggaggtaaggcgcaatagccagttattagaattaaggatgaattgggtgaagtgctgattgaaagaatagataagaaagcgtaaccgcgggggcagaatggggattaagtagccagatatgtgttactaaatgtaactaacaagctaaccttcaaacgggggttaatctttgaacgtatgtcatgtttcaacccttcagatcgtgaatctaaagggttacatattaactatattatcaacaagaccagacacttatagaattagtgatgatttattcactaaaaaggccatgaactggaggaaaacgatctgtccagaaggtctatcggttcctctcttattgcctgattgtaataatcgttattacagtaagtattgtttatttcatctaaggtcatgtttttaacttttatattcctctggtttacaacttcctctgtcttgtaagtgtgtatattatatggggtatatgcttttttaataggatagtgaaacaattcgttatccacatctattccgtcagagtgaacttcaaatgcaccaggcgaaagaattgccaggccagtattaagcttaagtgctggggaaaacaaattaaataacatgagctgcatagtagggcaattgttcttcccagaaacatttaaaaaatttaagtttttgctctgttttattatggggaataaagttccaatatcggatgtattattagtatcaatgtgggttattttattattgtccagtcttaaacttttgatagatggaagataagtcaggaaatcaagatttatatatttcaactggttgttagcagcgtttaatgtctgaacattgcagaagttgctatagaatattttaatttcagaaagcaaattgttgttaataagtaacgtattcaagttgggaaataagtcattgtgtaaacttgttagtttattatgggatagatccagcagtaagagttcatttttattacctgcaacaatatcaattaattgattatggctgagattcaggtattgcagccattcgcaagattctaattgcacaaactctagttgattatgtgccgcactaaaataagtaactgatgaaagcctatctatatcaatatttctgagagcattattattcatagatatatgtgtaatacttacatttctgccttgaggaaaatttattgactcaagagtattactattcagacttagctttacgagtctatcgtagttggttgcatcaaaatgtgtgagttggttattatcaagattgatagaggtgaagttttgcagccctggtggttgagtggttaaattaagtcctgataaatcaatggtcacttcattagtgtcatcaattatatttcttactgcagtccagtactgcatttgtgcaagtggatcattgttgatgccgttaactaatacatgccaaagatgttttgatgatattagttgatcaatgtcattggttggcagtaaattgttattgcttaagtttaaatattccagttttgtagtgtttttggcgtttaaatgtgcaatatggttgtcgtttaaagtgattgttttcatcctgggatgattgtgtaatataaggtcagtgatcatattgtgatgggcacttaactcaatcagagattgttgccgcgcgagccgttggcttcatcgttatagcctttaaaatcatattcccagtgaccaaaaccaatcatttgatcattgatttgcgtttctcctttaaagccgagacgggcataaattttatcaccatcgtcacgcttatcatcagtaaaataacgtagagcggtaaccttgccataaaggtcgagtttattaccatccttgttatagacttcggcagcgtgtgctacgttcgcagctaacaaaccagttacaaccaccgcaactatttttaatttcatttaacagaacccttttaattatcgttaaacgtattttctaaacgaattttaaacggcgtcatttataaatgatatactgtttttaaaatagaatggtgattaaaaacaatgagaaaaatagatgaaataatattatttatcgatatgtgatcgaagtcgaaatgagatataaggtgaattactggtatttgaaatttattttttaatattgtcggaatttatctgattaactgccgggccgtagacccggcaattattttaaccacgacgtgtcgccagccagcagagcagggaaccgccgcagaccattagcgcgccttgccagaatgagaacgacagcggggcgctgagcagcacggctgcaagcgctgaggaaagtacgggcgtaaaatacgagcctaccgccattatggtgacattgccatgcagtataccgacattccatgcagcataagcaaatcctaaggtaaatgccgcagagatgagtttaatcatgacgggcgtgctaaataccatttctggttgtggcgtgagaaaatagtaaacccacagacttgctcccgttagcaggacaaaaacggtaattccgttaaatccgcgtgcgtatttattcgttactgtgcaataggctgcccagataaacgcaccaataaacgccaggaaataactcaatgggctggtggtaatattattgatgatttcatcataatgtaacccattatcaccgcctaacacccagcagacgccgaccagggctaataataatcctggtacaatcagccagttggttttctgaccattaaacagaatggcaaagagaattgtcaggctgggccatagatagttcaccatacccacttcaatcgcctgatgacgggtcgccgcataccctaaggaaagcgccagacagatttcatagctgacgaataacagactcccggcgagtaaatagcctttcggaatctgccgaatacgcggaaatccaaccgtgaagattaacagcagcccgcttaatgaatagatagcagctgcgccgccgaccgggccgagcccctcgctgacaccgcgaatcaatcctaccatcgtgctccacaggacgatcgctattagccctatgagcgttgctttttgtcgtgtcatgctcgctgttttgtctctcttgccgttaaaaattaagctgaattttatagcatttttttaactggcctgtcaggcagtggtgcgtttttctaccgctattgaggtagttcaatttgcgcaggcggattattttgtggcaaacacgtgttctttttgatttcgcgcaaaaagattcagaattttactgttagtttcctcgcgcagtaatacccctgaaaaaagaggaaagcaatggacgtcagtcgcagacaattttttaaaatctgcgcgggcggtatggctggaacaacggtagcggcattgggctttgccccgaagcaagcactggctcaggcgcgaaactacaaattattacgcgctaaagagatccgtaacacctgcacatactgttccgtaggttgcgggctattgatgtatagcctgggtgatggcgcgaaaaacgccagagaagcgatttatcacattgaaggtgacccggatcatccggtaagccgtggtgcgctgtgcccaaaaggggccggtttgctggattacgtcaacagcgaaaaccgtctgcgctacccggaatatcgtgcgccaggttctgacaaatggcagcgcattagctgggaagaagcattctcccgtattgcaaagctgatgaaagctgaccgtgacgctaactttattgaaaagaacgagcagggcgtaacggtaaaccgttggctttctaccggtatgctgtgtgcctccggtgccagcaacgaaaccgggatgctgacacagaaatttgcccgctccctcgggatgctggcggtagacaaccaggcgcgcgtctgacacggaccaacggtagcaagtcttgctccaacatttggtcgcggtgcgatgaccaaccactgggtggatatcaaaaacgctaacgtcgtaatggtaatgggcggtaacgctgctgaagcgcatcccgtcggtttccgctgggcgatggaagcgaaaaacaacaacgatgcaaccttgatcgttgtcgatcctcgttttacgcgtaccgcttctgtggcggatatttacgcacctattcgttccggtacggacattacgttcctgtctggcgttttgcgctacctgatcgaaaacgacaaaatcaacgccgaatacgttaagcattacaccaacgccagcctgctggtgcgtgatgattttgctttcgaagacggtctgttcagcggctacgacgctgaaaaacggcaatacgataaatcgtcctggaactatcagttcgatgaaaacggctatgcgaaacgcgatgaaacactgactcatccgcgctgtgtgtggaacctgctgaaagcgcacgtttcccgctacacgccggacgttgttgaaaacatctgtggtacgccaaaagccgacttcctgaaagtgtgtgaagtgctggcctccaccagcgcaccggatcgcacaaccaccttcctgtacgcgctgggctggacgcagcacaccgtgggtgcgcagaacatccgtactatggcgatgatccagttgctgctcggtaacatgggtatggccggtggcggcgtgaatgcattgcgtggtcactccaacattcagggtctgactgacttaggtctgctctctaccagcctgccaggttatctgacgctgccgtcagaaaaacaggttgatttgcagtcgtatctggaagcgaacacgccgaaagcgacgctggctggtcaggtgaactactggagcaactatccgaagttcttcgttagcctgatgaaatctttctatggcgatgccgcgcagaaagagaacaactggggctatgactggctgccgaagtgggaccagacctacgacgtcatcaagtatttcaacatgatggatgaaggcaaagtcaccggttatttctgccagggctttaacccggttgcgtccttcccggacaaaaacaaagtggtgagctgcctaagcaagctgaagtacatggtggttatcgatccgctggtgactgaaacctcaaccttctggcagaaccacggcgagtcgaacgatgtcgatccggcgtctattcagactgaagtattccgtctgccttcgacctgctttgctgaagaagatggttctattgctaactccggtcgctggctgcagtggcactggaaaggtcaggatgcgccgggcgaagcgcgtaacgacggtgaaattctggcgggtatctaccatcacctgcgcgagctgtaccaggccgaaggtggtaaaggcgtagaaccgctgatgaagatgagctggaactacaagcagccgcacgaaccgcaatctgacgaagtagctaaagagaacaacggctatgcgctggaagatctctatgatgctaatggcgtgctgattgcgaagaaaggtcagttgctgagtagctttgcgcatctgcgtgatgacggtacaaccgcatcttcttgctggatctacaccggtagctggacagagcagggcaaccagatggctaaccgcgataactccgacccgtccggtctggggaatacgctgggatgggcctgggcgtggccgctcaaccgtcgcgtgctgtacaaccgtgcttcggcggatatcaacggtaaaccgtgggatccgaaacggatgctgatccagtggaacggcagcaagtggacgggtaacgatattcctgacttcggcaatgccgcaccgggtacgccaaccgggccgtttatcatgcagccggaagggatgggacgcctgtttgccatcaacaaaatggcggaaggtccgttcccggaacactacgagccgattgaaacgccgctgggcactaacccgctgcatccgaacgtggtgtctaacccggttgttcgtctgtatgaacaagacgcactgcggatgggtaaaaaagagcagttcccgtatgtgggtacgacctatcgtctgaccgagcacttccacacctggaccaagcacgcattgctcaacgcaattgctcagccggaacagtttgtggaaatcagcgaaacgctggcggcggcgaaaggcattaataatggcgatcgtgtcactgtctcaagcaagcgtggctttatccgcgcggtggctgtggtaacgcgtcgtctgaaaccactgaatgtaaatggtcagcaggttgaaacggtgggtattccaatccactggggctttgagggtgtcgcgcgtaaaggttatatcgctaacactctgacgccgaatgtcggtgatgcaaactcgcaaacgccggaatataaagcgttcttagtcaacatcgagaaggcgtaagggggcgaacagatggctatggaaacgcaggacattatcaaaaggtccgcaactaactccatcacgccgccttctcaggtgcgtgattacaaagcagaagtcgcaaaacttatcgacgtttccacctgtatcggctgtaaagcctgtcaggtggcgtgttcggagtggaacgacatccgtgatgaagtggggcactgcgtcggggtttacgataaccccgccgatctgagcgccaagtcctggacggtgatgcgctttagcgaaaccgaacagaacggcaagctggagtggctgatccgtaaagacggctgtatgcactgtgaagatcccggctgcctgaaggcgtgcccgtctgctggtgcaatcattcagtacgctaacgggattgtcgatttccagtcggaaaactgcatcggctgtggttactgcattgccgggtgtccgtttaatattccgcgcctcaacaaagaggataaccgggtatataaatgcacgctctgcgtcgatcgcgtcagcgtcggccaggaaccggcttgtgtgaaaacctgtccgaccggggctatccacttcggcaccaagaaggagatgctggagctggcggaacagcgcgtggcgaaactgaaagcgcgtggttacgaacatgctggcgtctacaacccggaaggggtcggtggtacgcacgttatgtacgtgctgcatcacgccgatcagccggagctgtatcacggtctgccgaaagatccgaagatcgacacctcggtaagcctgtggaaaggcgcgttgaaaccgctggcagcggctggctttattgccacttttgccgggttgattttccactacatcggtattggcccgaataaggaagtggacgatgacgaggaggatcatcatgagtaagtcgaaaatgattgtgcgcaccaaatttattgatcgcgcctgtcactggaccgtggtgatttgcttcttcctggtggcgctgtccgggatttcgttcttcttcccgacgctgcaatggctgacgcaaaccttcggtacgccgcagatgggacgcattttgcacccgtttttcggcattgcgattttcgtcgcactgatgtttatgtttgtgcgttttgtgcatcacaacatcccggataagaaagatattccgtggctgttgaacattgtcgaagtattgaaaggcaatgagcataaagtggcggatgtcggtaagtacaacgccgggcaaaagatgatgttctggtcgatcatgagcatgattttcgtgctgctggtgaccggggtgattatctggcgtccgtactttgcgcagtacttcccgatgcaggttgttcgctacagcctgctgatccacgcggctgcgggtatcatcctgatccacgccatcctgatccatatgtatatggcattctgggtgaaagggtcgattaaagggatgatcgaagggaaggtgagccgtcgctgggcgaagaaacaccatccgcgctggtatcgtgaaatcgagaaggcagaagcgaaaaaagagagtgaagaagggatataatctcttttgaactttaagctgaaaatggcgctttaagaagcgccatttttttattgcgtaaccagacggcgtagtcgcgacacatccaccgttttttctgcctctgccagactccaggcgttttgcagattcagccacatttgcggcgaactgccgatcaccacggaaagtttaatcgccatttctggtgtcaaagctgcttttccggtcagcaatcggcttgccgttgagggagcaatttccattgctctggcaaactcgcgcaggctgacattaagttcgtccagcgattcctgaataatgtcccccgggcggggatgattggccattttcatcagtgtctttactctcagtagtgttccttcatcaggaacactatcattattgttgcgtaggaaggaacaataatccatttagccatttaatgtcggagagagtgcgatgctgcgacaccaggactggcactcgcagcaaaggcctcttaacggcggaaatcaatcaccatacggccacggattttgccttcttccatctcggtaaagatggtgttgatgtccgctaacggacgcagggcgactttcggcaccactttgccttcggcggcaaactggaaggcttcggttagatcctggcgcgtgccgaccagcgaaccgaccacttcaatgccatccagcacaaggcgtgggatatccaggctcatagactccggcggcagaccgacagccacaacacgaccgcctgcacggacagcatcaactgccgagttaaacgcagctttagcaactgctgttaccaccgcagcgtgagcgccaccggttttctcctgcacaattttggcggcgtcttcggtgcgtgagttaatcgctaaatctgcacccatttcggttgccagttttaactgctcatcattgacatcaatggcgatcactttcgcgttaaagacattcttcgcgtattgcagagcgaggttacccagaccgccaagaccgtagatagcaatccactgccctggacgaatttttgacagtttaacggctttgtaggtggtgacccccgcacaggtaatgctgctggccgccgccgagtccagaccatctggcacttttaccgcgtaatcggcgaccacgatgcactcttccgccatcccgccatcaacgctgtatccggcatttttaactgaacggcagagcgtttcgttaccactattacagtattcgcaatgaccgcatccttcgtagaaccacgccacgctggcacgatcgcctggttttaatgaggtgacacctgggccaacttctgccaccacaccgatgccttcatggcccagaattacgccagttttgtcaccaaaatcgccattcttaacatgaagatcggtatgacatacaccacaacactccattttcagcagggcttcgccatgtttcagtgagcgcagtgttttatccgtaacgtcaacgtgatgatccttcgtaacaactgcagccttcatagttcctccttttcggatgatgttctgcatagcaggtgaggcaaatgagatttattcgccactacccagtatggatgagatctgaaaaagggagagagaaatagcccggtagccttcactaccgggcgcaggcttagatggaggtacggcggtagtcgcggtattcggcttgccagaaattatcatcaatggcctgttgcagagcttcggcagacgttttcaccgccacgccttgctgctgcgccattttgccaaccgcaaacgcaattgcgcgggagactttctgaatatctttcagttccggtagtaccagaccttcgccgttcaggaccagcggcgaatactgagcaagcgtttcacttgccgacatcagcatctcatcggtgatacgtgacgcgccggaagcaataacccccaggccgatgcccgggaaaataaaggcgttgttacactgggcgatagggtagattttatctttccataccactggattaaacgggctgccagtggcgaccagcgcgttaccttcggtccaggcgataatgtcctgcggtgtggcttccacgcgtgacgtcgggttagacagcggcatcacgatcggacgcggacagtgtttatgcatctcacgaatgatctcttccgtaaacagcccggtctgtcctgagacgccaatcagaatatctggttttacattgcgcaccacatccagcagtgacaacacatcgctgtcggtatcccagtcactgaggttttcgcgcttctgcaccagtttggtctggaaaggcagcaggttcggcatcttgtcggtcagcaagccaaagcgatcgaccataaagactttctgccgcgccgcttcctcgcttaatccttcacgctgggtctgggagatgatcatttcggcaatgccgcatcccgctgaacctgcgccaaggaagacgatttttttctcgcttaactgaccacctgccgcgcggcttgctgcgatcagtgtgccgactgttaccgccgcagtgccctgaatgtcatcgttaaaagaacaaatttcattgcgatagcggttaagtaacggcatcgcatttttttgagcaaagtcttcaaactgcaacagcacgtctggccagcgttgtttcacagcctggataaattcatcaacgaattcatagtattcgtcgtcagtgatacgcggattacgccagcccatatacagcggatcgttaagcagctgttggttgttcgttccgacatccagcaccaccggaagggtatacgccgggctgatgccgccacaggcggtatagagcgacagtttaccgatcggaatgcccatcccgccgatgccctggtcaccaagccctagaatacgttcaccgtcagtcaccacaatcactttaatattatggttcggcacgttttgcagaatatcgtccatattgtgccggttctggtaagagataaacacgccgcgtgaacggcggtagatctcagaaaaacgctcacaggctgcgccgacggttggggtataaataacaggcatcatctcatcaagatgattgtttaccagacggtagaagagggtttcgttggtgtcctggatgttacgcaggtagatgtgtttgtcgatttcggttttgaatccctgatactggatccatgctcgttccgcttgttcttcgatggtttcgaccacttccggcagtaaccccagcagattgaagttacggcgttcttccatgctgaaggcactgcctttattcaacaacggaaattccagcagtacagggccagcgtaagggatataaagcgaacgctgtttttttgtttttggttccatgtcactcactcttttttgaatatccatccctggggggcttttatcgtctttgctttaccgccagggcgtcggccccaagtataaagcagataaaaacaaaaacaccattgcgcaggcaatggtgtttaatcgtcattgaggactgatggttatgaattactttccagcggggcgttttctgccggttgggttatttactacgctggatttgtcaccttcggtaactattttgcgctggttcgaaattttatggtccagtccaagaatatgacgtgcctgacggttcgatttcattttaactcctcaatcctgttgctagttttaaggacaacatcgccgtagcgaagaaacacgtgctaaacccctaaattaggttgccgatcaagcatagcaccttaaagcgtagggtgctggccactgatcacataattgatcgtttgctggtagatatcactgaggatgtcgttatcagaagcttccacccatttggtcagctccatgagaatgtcatcttcagtgacaacaccgtgctctgcccgaaggccttgctcaatggcattaaccagagcgggttctgctgttgaattttctgcctgataataagtaaacatagtgattctccgtgtctgtgtatttatggtgtctgctacggatcgcagatttataaagcacattcagcatggcaaatatttgccgcttcgttgttaagattagtcctggttgatgatttttatattttaacctcatgatattgataggtattattattgtggtgagttgattaatattaatgcaatatctcttgggttatatattcccggttatctattgtggaaatttaatttaagtgcagaagtaatatttctgccggatttttattcggaatatcctgcttatcctcgtgctgtttctcacgtagtctataatttcctttttaagcccacaggagagcaacaatgacaatccataagaaaggtcaggcacactgggaaggcgatatcaaacgcgggaagggaacagtatccaccgagagtggtgtgctgaaccaacagccgtatggatttaacacgcgttttgaaggcgaaaaaggaactaaccctgaagaactgattggcgcagcgcatgccgcatgtttctcaatggcgctttcattaatgctgggggaagcgggatttacgccaacatcgattgataccaccgccgatgtgtcgctggataaagtggatgccggttttgcgattacgaaaatcgcactgaagagtgaagttgcggtgccgggtattgatgcctctacctttgacggcatcatccagaaagcaaaagcaggatgcccggtttctcaggtactgaaagcggaaattacgcttgattaccagttgaaatcgtaaagcattgccggatgacgcgtcatccggcgaacacttactgcgctacccaaccgccatccatattccacgccaccccacgcacttgtgctgccgcatccgaacagagaaacagcgccagttcacccagttgttgcggagtcacaaattcacgagaaggctgtttttctgccagtaaggcgtcacgcgcgctttccgcatcttcgccttgcgcaatgcgcttatcaatctgctgttgtaccagcggcgtcagcacccagccagggcagagcgcgttgcaggtaatacccgtctgcgcagtttccagagcaatggtctttgtgagtcccaccacgccatgttttgccgcaacataagctgatttgtctttcgacgctaccagcccatgcacagaggcaatgttaatgatccgaccccagttacgagtgcgcatttctggcagtgccagacgcgtggtgtgaaagacagaagagagattgatagcgataatggcgttccatttttctacagggaaagattcaaccggggagacatactggatcccggcgttattcaccagaatgtccacaccgccaaattcccgccgtgcgtaggccatcatgttgataatttgcgattcatcgctgaggtctgcctcatgatagccaggcgttttacccatacgagaaaccgcattgattgccgcgtcaacatcaccgaagccgttgaggatcacttgcgcgccagcgtttgccagtgtctgagcaataccgagtccgataccgctggtggaccccgtcaccagcgcagttttaccttgtaaattcatgatgattttccttagacaatgccggtggtgtagtacacgccgatgataaacagcacggccagacttttaatgatcgtaattgcgaagatgccgccgtaagcctgacggtgactcagcccagtaattgccagcagggtgatcacagcgccgttatggggcaatgtatccatgccgccactggccatagatgccacgcggtgaaaaacttccagtggaatattggcagcgtgcgcagcggcaataaaagtgtcggacatagccgcaagagcaatactcatcccgccggacgctgaaccggtaattccggcaagtgtggtgatgctgatggcttcgttgagtaatggatcaggaatggcggccagcgcctttgagagcaccagaaaaccgggtagggcggcgataaccgcaccgaagccatattctgaggcggtgttcatcgcagccagaattgcgccgcctaccgctgtacggcttccttctgccagtcttccatgaatattgcgatatccaaaaatcactaccagcaaaattccggcaatgagcgcagcttcgacggcccagattgcggtgattttggcgacatctgtggtaatcggggcggcaagtcccggcaactccagttggtggctcgcaccgtaccaaacagggatccaccaggtaaacaacaagttcaacagccccaccagaatcaatggtgaaatcgcaatgagtgggttcggtaaattgatgttatctggtgtttcaggttcattaagtaactctgtgccgtaaccttcattttttgcctgcgctttacgacgctgccgctccagatagataagcccgacggcaatgataaacagtgaaccaataagccccagccacggcgcggcccaggcgttggtgccaaagaaactggtaggaataatgttctgaatttgtggcgtgccgggcagagcgtccatagtaaaagagaatgcccccagggccaccgttgccggtataagtcgttttgggatgttactctggcggaacagttcagccgcgaacggataaacggcaaatgccaccacaaacagcgacactccgccataggtgagtaatgcacataccagcacaatcaccggaatcgcatgccgccggccgagaatgttgattgcagcagcgacaatcgaacgagaaaatcctgaaagttcaatcagttttccgaacacggccccgagcagaaacaccgggaagtacaatttcacgaagccgaccattttttccatgaacaggccggtaaatgctgggccaacggcccccggatcggtgacaagaacagcgcctaatgctgcgatgggggcaaaaaggataacgctgtatccgcgataggctgccagcattagcagcccaagcgcggcaagggcgattaatacactcatcgggactcctcaatatcgttgttatagtgggtacagcgagagaagttatggtttaagggcgaagcgaagttgatgttcccgacgctgctggatgtactgcttccgcgattcatcccagcagtaaaatccctgaccgctacgtacgccgatgtctccacgttccactttttcggcaactaatgacatcatgtcgctgccagtcgctagttcagggagcagatggcgacaaatatcctgcaccgtcgaaagtccggtcatgtcggcggcctccagcgggccgaccatggcataacgtcgcccaagcgaggcgcgcatcacctgatccaccacttctgcactggcgatgccgctttttacgatatgcagggcttcacgcaacagtgcaaattgcagacggttgccgacaaatcctggcgcagcgcgatccagcaacactgcttccagttgcagtgacacaagcaagtgttgcagccagtgcaaatgctttggctcggtaacgctgccggggataatctccacaagtggaatgaagtgcggcggatgccagaaatgggcgatcagcagtcgttgcgggtagcgcatcttcgcggccagatcatcgggcggcagaccgctggtattgctggcgacaatggcctcaggagaaataagcgtttcaagctcggtatataatgcgtgttttagttcaagtcgctccgggatcgcctcaatcagtagttgcgagtcggcgatgtctgcaagagaagtcgtgccgtgcagacgtttaagcacattctctttttccggggcagtaaactgttcgcagctaatcagctcatcaagaattccgcctgcaactacgtggatttctgcaatccggctctgctcggtatcgtacagccagatatcatgaccaaagcgggcgaaatgagtggcaatccccacgcccatcaatccggcgcccagtaccgcaaattgttcagtttgcatggtgttctcctgtggttctttccagtgtcagcgccacgccctgaccgccaccgacgcacagcgtcgccagccctttttgcgcattacgtcgcgccatttcataaatgagagtgaccagaatgcggcaaccggaagcgccaataggatgcccaagtgcgattgcgccgccgttaacattcactttgtcgcaatcccagttcagttcgtcgccaacggccagcgcctgcgctgcgaaagcctcgttggcttcaataagatcaatatcttccagcgtccatccgcaacgcttaagacattcgcgggtagcggcgaccggaccaatgcccataaaggcaggatcgacgccagaaacggcataacctgccacccgagccagcactgggaggcccagttcagcagctttgctggcgcgcattaacatgactgcggcggcaccatcattaatggaagaggcatttcctgcggtgacgcttcccgcccccggaagaaaggccggtttcagttgcgctagtttttccagttgcgtcccggaacgtggttgttcgtcggtatttacccagcgtggtggttttttaccttgtggtacgctcaccggagtaatttcgtctgcaaagcgcccggcttccattgcggcagcggctttttgctgagaacgtagcgcgaatgtgtcctgtcgctcgcgactgatggcatatttttgcgccaggttttctgcagtaatgcccatgtggtaatcattgaaagcatcccatagtccgtcatgaaccacgctgtctttcatgctggtatgcccgaggcgtaaacctgcccgcgcgccatcaataaaatagggcgcgttgctcatgctttcctggccacctgcgataattatctgtgcatcaccgcaacggatcgcctgcactgcctggtgtacggctttcagaccggaaccacataccaggttgatggtaacggcgggtgtattgtggcttaacccggctttgagcgccgattgtcgtgccgggttttgtccgcttccggcggtcaggacctgaccaaaaatcacttcgtcgatctgttctgctgcaagtgcggttttctccagcaacgaacggatggtggcagcaccgagatcaaccgcagaaagtggggcgagagcgccatgaaaacagccaatcggtgtgcgcgtagcggcaacaataacaacgtcctgcatggtgattcctcagttgaattgcatttccgggacatgttccggcacaaacaacttaccggcggttttggcgatgatttccgcaacgctgattcccggcgcgcgctcgcgcagaatgaaagctccgtcagcaatttccagcagagcaaggtcggttaagacgcgtttgatgcatccggcgccggtcaacggaagggtacagtcaggaagcagtttggattcgccggatttggaggcgtgggtcattaccacaataatattctcggcaccggcaaccagatccatggcaccgcccatgcctttaaccatcttgccggggatcatccatgaggcaatgttgccattcacatccacttcaaatgcgccaagtacagtcagatccacatgaccgccacggatcatggcgaatgattgcgccgaatcgaaaattgccgcgcctttccgcgcggtaacggtttgtttaccggcattaatcatgtcggcgtccagttcgtcttccgtaggaaatgcgcccattcccagcaaaccgttttctgactgcaacatcacatctatcccgtcaggaatgtagtttgccaccagggtcgggataccaatgccgagattgacgtaatagccatcgcgcaattcgcgggcgactcgcatcgccatttgttcacgggttaacatggtcaggctcctttgcggctaagggtgcgttgttcaatgcgtttttcaaattgcccctgaatgacgcgattaacaaaaatccccggggtatggatagcggcaggatcaagttcaccaggtggcactatttcttccacttccaccacggtgatttttccggcagccgccatcagtgggttgaagttttgcgcggtatgacgataaatcacgttgccgtaccagtcggctttccagcctttgaccagggcaaaatcaccggtgatagcctgttccatgatgtacgggcgaccgttgaattcgcggacttctttcccttcggcaacgggagtaccgtaaccggtggcagtaaagaacgccgggatacccgcgccgcctgcgcgcagttgttctgccagggttccttgtggtgtgagaatcgcctccagttcgccgttaagcacctgtttttcaaacaaagcattctcgccaacataagaagcgacgactttacggatctgtcggctttccagtagtacacccagtccaaaaccatctacgccacagttattggaaaccaccgttaatccggttactccacggtggcgaacttcagcaatcagattctccgggatgccgcacaggccaaaacctcctgccagaatcgtcatctcattggtaagtccttcaagcgcctcgtgatacgtagcgacccgtttatccaacccagccatacagttgccctccagttgtccttttcaacatcattaagggcaaaaaatgatttgttaattttaaatttgtgactcattcatttgtattacttatcaatataatgttaattaaatgtattcagtaggttaacggaatgccagatgaaaatgagcatcaaacagttacgcgcgtttttagcggtagctcacactctgaactttgcccatgccagtgaacggctgaatatgtcgcagcctgcgctaagtcttgccattaaaggactggaagatgccttagggggcgctttactgctgcgtactacgcgaaaagtgacattaacccaggagggggaaacgctattgtcgatggcacggcctttgctggctgactgggataacactgaggaggccatgcgtcagcgattcacgctcaggcggggcaaagtctcggtggcagcgatgccgtcatttgcagccaacgttctgcctccggtgctgaaaaccttccgcgattgttattcagggattaatgtcaccgtgcacgatgtggtgaatgagcaggtgatcgaaatggtgagcgaagggcgtgtggagatgggtattgcctttgaacctgactattgcggccatgtgcattttaccccactgggcgtggatcggtttgtcgctattgttccagccgattcacgactggcaaatcggcaacgcgtgagttggcgggatttgctgacgctcgattttatcaccctccagcgaccgtcagccgtcaggttgatgctggaggagcagttggcacaaagtggaacgcaactggaagtggcgctggaaagccatcaattggttacggttgggcggctggtggcaaacggtttgggaggaagcgctgtgcctgcgctgtgccgcaggcagatgagcgaactgggcgcagtgtgtctggaactggataatccagtgattgagcgacgagtaggcgtactgcgttcgtcacaccataagctttctactgcggcgcaggcgttgatggaaacgttaaaaaaaacctatgacgcataacgtttccgcagacatgcaatagccggatgccgcgtcctacagcgcccgccagcaacggatctcactgccgcaaggctgttttttctacgaacgttgcccccttgcaaccagcggatgcgaagtccggcaatcattaacgacgcgggctgacggcaacgtgcggtttcccggcagatccgttttacgtaatgcccattcttcctccagcggtttatcaatggcggggagggaatccagcaataatcgggtatatggatgtgccggagcagtcaacacctgttgcgcttcccctagttccacaatctgcccgagatacatcaccgccacccgatcgctcatatgacgtatcaccgagacattgtgtgaaatcagcacataagtcagcccgtgattgtcctgtagcgttaccagtaaattgaggatctgcgcctgcacggagatatccagcgcagaggttggctcatcaagcacaatcacgtcaggctgcgaagagagtgctctggcaatggcgatacgttgccgctgcccgccggagaacgcatgaggcaggcggtcgagatactccggacgaatacccacctgcacagccagctcctctgccaacgctcgccgctgttgttcactactacgcttagctatccagagcggttctgtgatgatgcgccacaccggtaagcgcggattgagcgaagagagcgggtcctgaaacaccatctgcataatgcgttgtgagccagaacggatgtactgcccgtggctcggttgcagcatgcccattaaaagctgtgcgagggtgcttttgccgcagcctgactcgccgacgatccctaaggtttcaccacggcggatctgtaaatcaataccattaatggcatgaacatgttccgtagttttaccaagccagtttttacgggccgggaaattgatatggacgtcgcgtaacgttaataacgtgtcagacacttatgacctcctgctgcggataccaacaggcgcagcgctggttgttgtcaccacacgctgtcagcgccgggacgttttcacactgtgcacctgccgcatagcaacgatcgcgaaaagcgcagccttcaggcaaatgggtgaggtttggtaccgtccctggaatggcgggtaatagctggcgtggtactccatgttctggtgcgcattggagcaaaccaatggtatacggatgccggggatgatggataacatctgccgtcacgccgctttcaattacgcttccggcatacatcacgtaaacgctatcgcacagttgcgacaccacggccatatcatggctgatgaacagtaccgcagttccactggcgcgggctttatgtttaagcaaacgcagtacctgcaactgtaccgtgacgtccagcgccgtagtcggttcgtcggcaataatcaattgcggctcgcaggagaatgccagcgcaatcattacccgctggcgcataccacctgaaagctcaaacggatagcgcgacataacttccacggcatccgggatttgcatctcttccagcagggcaatcgctttagctctggcttcccgacgacttattggttgatgatggcggattacgtccatcatctgaagacctattcgacgtgtcggattgagggcggtcatcggttcctgaaagatcatcgccactcgtgcgccgcgccactgacgaagctgtttttcccgagcgttaagaacatcttctcccagcagtgaaatctgcccccgatgtacgcaataactgcccgtcggtagcagacgcataatcagcattgcggtgactgatttacctgagccggattctcccaccagaccgacaatttcactgcggttaatctgcaaggacacattgttgagcgcgtgaacgtcgccgttaaaaccggggaaactcaaatgcagttgttgaatgtccagaacgggttgggtcatgactgctttcctcctgctttcgggtcaagcagatcgcgaataccatcaccaaagagattaaacccgacggcggtaagcaaaatcgctgcccccggaaatgcgcaataccaccactgatcgagtacatagttgcgaccattcgctaccatcgcgccccattcagcactcggttgttgtgcacccaggccaataaatcccaacgtggcggccattaaaatcgcgctaccgatatccagcgatgcctgcacgatcagcggcggcagggagttacgtaaaatatgccagttgatcagatgccaacgcgacgcaccaaaggttttcgccgcctgaacataagtatactggcgtacaactaatgcttgcccccgcgccaggcgcacataaaagggaattcgcacaatagcaatcgccagcatggcgttaaataaactcggcccgagagcggcagccagtgccattgtcagtaccaacgaaggaatcgacagcataatgtccatgatgcgcatgatgatggcgtctgcgcgtccgccaagcacaccggatagacatccgagtagcgaaccaatcatacccgcaatggcaaccacgactaatccggcgagaattgattgctgactgccgaccagtacgcggctgaacagatcgcgtcccacttcatcggtgccaaaccagtgcgccgcagaaggcggcaaaaggcgggcggttaaatcaatggcgttgggatcatgcgtcgccagccacggtgaaaaaatcatcatcaatagcattaatacaatgatgactgcgccggtcacggtgagcggactgcctttcagcatccataccagttttgcaccgttaaatcgcgtttgtttttgtgggcgtacggcggacgtttcctcgcttagcatcattcaccacctccacgtccgatacgcggatcaatccacaaatagagcaaatccaccaccaggttgaccagcacataagcaaatgaaaccacgacggcaaagcccatcactgccgggaagtcgagcgcctgtattgatgttactacccatgcacccattccgggccaggcaaaaacggtttcggtgagcactgcgccatacaacaaatcgcccagcgccaaacccaatacggtaatcgatgggatcaacgcattgggtagcgcataacataaaacgatataccagccgggcaagccgctggcccgggcggtacgaatgtagtcttcactcaattgttccagcatcgctgagcggatctggcgagcgacaattcccaggtgaacgaacgccagcgttaatgccggtaagatgagatgttgcaacgcattgaagaagacttcaccgttgccttcaagcagcgcatcgagcagataaaagccggtaacgtgcgttggtggatccagccagtcatcaagccttccgccgccgggaagaatttgcagatgaccataaaacagcacaatgacgcccagcccaagccagaacgcaggtgtggagattccggtaatggccattattcgcaccagatgatccagccagcgatttcgccagactgcagagagtatgcccagcgggatgccaatcaggagtgccagcagcagggcaccaaaagccagctccagcgtcgccgggaaaaatatacgcaactcttccagcaccggacgcccggtacgaatggatgttcccaggtcaccatgaaacaggtcgctgacgtagcggtaaaactgtacatacagtggctggtccagtcccagttgctggcgaatattttccacgatagcatcgctggcgcggtcacccgccagtaaccgcgccggatcgccagggatcagatgcgagataataaacgtaatcacgcagacgcccgccaccacgagcaccagcccccagcagcgttggcgtaaaatactccagaaggtcacgttatttactcatggtattgatattgaagacctgttccagcatgggattgaacacaaagcctttcacctctttgttcatcgccagttggtagtttttctggaacaggtacacataagcagcgtcatcaatgacgattttctgtgcctgctggtagtcccgggtacgctgcgtctggtcggtggtcgcaagcgcattgcgcagtaacttatcgacctcactgttttcatagaacgagcggttacccggcagaccttttttgtctgactcaaaccagtaattcataaacatatacgggtcggcaaaatccggactccagttgccaatcgcaatgtcgtaatcacctttacccactctgtcgcgcatggtggcgttcgccagcttttccagcttcacattgatgcccagcttgttgagactggattgtgtcgccaaagcaataggctcccagttcggatcgttatcggagtagagaaacgtcaggctggtgggtttgctcgtcactttatcccattcggctttggctttcgtttcgtcatggttgtattgcattgccgtcgcatcgtagccccacatgccttccggaatcgggccgcgcatctgttttccgttaccactcagaatgccgttaaccattccctgataatcggtagaccaggaaatggcccgacgcagatccgcctgattaagaggcgctttgctgttattcagatacagataggtaacgcgcagtgacggatactctgccacattgactttattttcctgcttcagggcgttgagttgatccaccggcagcgcatcggcaatgtcaatgtcgccacgggagagctgcaggcgacgggaggcactttcaccaataatttttaccgatacccgtttgaagttcggtttattgcctgggtaatgcggatttggcaccagaactaattgctgacctttttgccagcttttcagcataaatggtccggaaccggcggtattttgcgcgaggaagccgcgagcatcatccgctgcatgttcctttaagaccgccggattgataatggatgcaccgtcattcgccagcgtgtagaggaacggtgcgaatggctggctaagggtaaacttcaccgtatgttcgtcgggagcatcaatctttaaatctttgggaaatgcttctgctggcccctggccgatttttagtagccgctcaaaagagagttttactgcttcggcagtgaccggtgtgccatcggcaaatttagcattgtccttcagggtgaacgtccactctttttgatcgtcagacgctttccagctacttgccagatcgccttcaacgtcggttgagcctttatcaccgtccgttttgtactgaaccagccgctgataagacgggtaggtcaccgtccagtcgttattatctattgttaccgccgggtcgagggtttgtggatcggcggccttaccaatcaccagcatatctttcggtacggcggcgtgcgcaaccgggaaatttgtggcaaggacgagcgcgagcaatgtgggacgaaacggtatcgatctcttcatgacagtttcctgattaactgacgtgttgtgtgccaggggatataaaacaggtgaattgatcagcgagcagagggtaactcgctgcctggggtaattcgaagtgccaccattcgctggagataccgacaaaaccgccaccagtcattatcgcattcagcaacagccgattgcgctgagcggcgggcgggacggaagggtgataggcatgggagcgctcgtgcatttcatcgaaccctgcgcccatatcgaggatgttcccgtgttcatcacgaagcgtcaggtcgatcgccgtgccacggctgtgattagaaccgaccgtcacatcaacaacatattgcgggtctgggcaggcttgccacaacatcgcctgtgcttgttgtgggcgatacgcatcgtaaatcaccagttgtaagcctgacagctgggcgatactgatacttttcgccagcgcggtaatcgcatccttgtgtagcagacaacgcgcttgctgataaatagctttacctgtgatgttatcagcgcaggcgtatttcaattcgatctccagatcagggaagattacggctaaatcaaccagttcggtggtatccgacataaacggttcctgtataagacaaaaattgctgcgctttccgcttatgcagatctcatgccatgccgggataagcgccagaatgctggcttaaagttatattttttaacttttgatcaacatttgtgcagcgtagtgcagttttggtgcaagaggggaagttaaggaaggaatctcccggaatcgtagctgaaatcacagtatttaagtgacagtgtcacgttaaatgaaaacccgcgagtgcgggcgagaggaatttgtcagattttcagcggtaacacgctgctcatccagcctggaatttcttcggcgggtagggggcgggaaaagaaatatccctgaataacgcgacagtggatcttgcgtagcatctcaaattgctctttggtttcgacgccttccgccacgacggttaaattgaggctttgcccaatgctggtaatggcttcaagtaaggcaaggatgcgtttttcggtcagacaacgatcgacaaaacttttgtcaattttgatttccgttaccggaagactgactaagcgggataatccggaaaagcccgtaccaaaatcatctaccgataagcccacgcccatatcacgcaggatctgaatgcgcttaaagatttcggtatcgtgttccatcatcatgctttccgtgatttctaccgtcagctggtggccgtcaataccccaggcgtgcattgcatcagacacctgattaggcagttgattactgcgaaagtgcagcgccgacaagttcacggataatgccgggatatgaatattctggctacgccattctgctaactgacggcaagcttccgcgatgacccagcgcccaatattttcgatttcaccaatctcttctgcgagaggaataaaccgtgaagggggcacatgaccatgctggggatcgtgccagcgcgcaagggcttcgatgccgtacagttcacccgtttctgcgaagatttgcggctggtaaacaagtttcagttggttattgctaatcgcttctttcagcgctgcgcctaaaaccaaacgctcttttaccatttcgttcatcgccgggctgaagaactgccagccgttaccgccattcttgcgaatataatccattgcattgtgagcagtggagagcaggtaatcgcggtttttacccacgtcgtagctgatgccaatactcaaggtaagcgggaagggtttatcgtcaatcattatcggcttgctgaccacattccgtagctcatcggcgatttgggtaatgttactgacgtcgttttccaggctcacgaggacaaactgcgtaccttcgatacgacagagatactgatccggtttgagtttttcacgaaagcgattgaccacttccagcaatgcctgatcggcccacgcatagccaaggctatcaatcacatcctgaatatggtcaacaccgatgagatacaccaccggagagacggctttgtcgaccaggtcatcgaggtaattgtgcaggttattgcgatttggcagaccggtcatcggatcaaattggatgagttgttcaatatgctggcggcttttttcctgttccagcgccagcgcggccatatgctgactgatatctgccacgcgttcgataaaggcgctggtttctgctcctgacgaggttttaatttgcaggatccccgcaggcgcgccatcacgctgacgaatggtcgctgaccagctttgcgcattttgaacttctgcaccgtgcgaagatgacgcccagtgtatcggcatcccgttgcgcagtgcgaacagcgaaacatgcgattcgttgagaacagattcgatgttacgacaaatgatttcccccatttcatgaaatggcgggctgctgcacatggcggcgagaatattgccttcaagctggcggatttgccgttcttcggtgatatccgagaaggtcattaccaggttctgcagatgcgcgagcacgtcataaaccgggctgatagaggctttaatccagattttttcaccggtgcgcgtcaacagcagaaattcatcctgatcgcgggcggttttccatagcaactgttgtaaacgaatgcggttatcggcagggaattcaggaatgttcaggagtgtatcgggctgcataccgctggcttcgctaatgcagtaaccaaacatttcggtaaatgcgcgattgcactgcacaatatggcgttccggatcgaggacaatcaccggtcggtcgagatggtcaacggcaataatcaattgtcgagtctgttctttttgcgccatttctacgctggcatcccgtaccagcgccaggtaataaactttcccctcggcgctcactttcgatagcgcaaaacgggtccagattttactgccgtcttttttctccagctgcagctcccgactcatcccctcgacacgcgctttaccgccttcacggttatgacgaatgtattcaggatgcgcaggacgcaaatcccgcggaatcagcatatcaatgttattgccaatgacttcttcacgtttgtacccccagagcttctctgcggcggggttgaaaaacatcacttcatcattttcgttaattaacaccgcacccatcatattttgctcaagggcggggaaaaaaatgccatcggcggcattatccgcatcggttagcttcatgattacctctgcatcctggcgcatctaaagactggctttccagagttcaacacggtttctacctcgtcttttggcgatatacagagcttcatcggctatttgaatgaggcgctcatagtcaggatgaccattaaacatggcggcaccgatggaaagtgagagggcaatatcctcgccgtttgcggctttcagtttggttttctccacccgactgcgaatacgttctgcggtacgtaacgtttcgttttcagaagcttcagtcaaaacaatgataaattcatcgcccccgtagcgaaaaacataatcactactgcggacgttgtcataaaaggcctgagagactttacgcagaatttcatcgccagtgttatggccccacgtatcgttgatctctttgaatttatcaacgtcaataatcagcactgacagtggtgtaccggtccggttggcatgggcaatttcgcgtttgaagatagtcggcaggaaacggcggttaagtaatttcgtcagtacatccataccgacttcgtggcgcgatacttcttcaaacaattcacgcagcaaggtaataatctgcgatacggtatttcttatctgtaatagaaatttcacccgcaaacttctgttattcaaattcctggtgttacgcatggtttgattgaaaataccatcgaaatcctgaatcagacgggagatatggcccacttcggcaatgccgctaaaataatgtcgacctttatggttaaaccacaggccaaaatcagcctggcttaaaggcaaactgctgcctaaatcagaatccagcaggactttatagataatatctatttcccatgaaagtattgaggctatttgccgttctttttcttcttcggcgttttccagtaacgagaagatacgatagttttcatcttcctttgaggcactactgtcactaaaggtaaacgcgcgggtcatcacttccatagcgatatcaatactgttaatcgagaaatggtagacctgaagtttttctgcggcggaataatccgaagagaagattaccggatagaggatttttttcagcacccgaaaccccatctcgacaatttctaccggaattcctatgcgggcatgcacttccgcgacggtatgctggatttgtattagcctttcgacatcgtcaacctgggcagaaagcacgttaataatccagcgttccatcgcacttttcaactgccgctcaacttgttcattactcaagaattcttcggcatgcgggtcgatgcggacaattcgataaaactcgatactcagataatgagcatgcgcaagggcaatttctgcggctttagcacgaatgagaggatctgcctgttcgacaagtccggtccactcatctttcattcttttaaaatacatctccataattcacacccttataaggctgggaaatcagacggaatcaaaacgcaacgtgcgagatcgactaactgcaccatattctcctgaaatatgaagatatactgaaaagaaataagcgacttaggacagttttaatctacgctactgttcttcagaagagtatagcccatcgtaattatttttcggtgacagcgaatatcgtatggtttttcatattcatacatttttattagggatttatagctgtttaactaagtgtggttaattgcgtggttaatttgacttatgtaagcatgattactagtgggatatttcacaaggtgtaacacgccggtgggtaaagcaccggcttgttacaaagtaagcatgggagtttaactgccccaacgactttgcagatagctgaccgcttgttgagtctgcggtttattcagatagtcctcacggaacaagatggtgccgctaatttctggtaccgcatcgttaagatcgagctgctttttcagttccggtacgccgccgttaatcatccagtctggctctatctttgaaggttcacccactttatagaaggcgataccgatatacaggcgggtcctggtcggtttaacgacatccgcccaccattttgccaacacgtcataacgcgcggcactccgtgagaacggccagtaaatttggggagcaatgtaatccagcaatccttgttccacccatcgacgggtgtcagcgtaggattcgtcataggctgccgcgcctcgggtatcggaaccgagcggatcgtgtgatcggttacgccacacgcctgccgggctaacgccaaattcgactcccggcttaatgcttttaatggtgtgtgatacctttgcaattaactgctgagtattgttgcgccgccagtctgcttttgacgcaaatgcgcctccgtatttacggtacgtttcgttatcatttagccgtgaacccggtgattcagtatagaaatagtcgtcaaactgcacgccatctaccggatagcgggaaaccacttcagcgactattgatgtgatccagtcctgaacctcagggatgcccgggtcgaggacaaagcgatcgccagacgttctgatccagtcacggtgttgcacatagacgctcgccggttgttgagacagagtgctattcagttccctgatagtaccgggcttcgtattaaccgatacgcgataggggttaaaccaggcgtgtactttcatcccacgcttgtgggcttcgtcgagcataaattgcagcggatcgtaacccggattttcaccaatcttaccggtcataagatcggaccacggcaaaattttcgatggccacagggcggtaccgtccggcttgacctggaaaaagaccgtgtttatgccgagacgttgcagatgatccagtttgtcgatcatcgcctgttgttgtacacgggcccggctggtggggttactaatgttaaccgaggaaaccggtggccagtcgagccgagaaaccgtggccagccagatgccacgcatcggttgtgacgattgttgcgtcgtggctggtggctttgaacctgctggtggtgtcaccatggactctggaggcgtgcttttacaactacacagtaaaagtgccagtgcaactagtatcgctggtcttctaatcgttaatttcttgtttcgggagcagatatccatatgtgctggtttccggtaaacagatgtgcgctcattctcgtacttatcccggttaagtcaatacgacagcaagcacgaaaaagggagcgatgacttatcgctcccttgtcttataaccattcagacatggttagtgtttcttgtcattcatcacaatatagtgtggtgaacgtgcacgcgggtgcaggaagaagtgaccttttggtgcgttctgactgttgattggctccagagtgacgccggtattcgctttgcctttacgatcatgaacagcatagagaataaagggcagggcaagtaccaccaggaaactaacaaccagtaattcaacatacatatcggtagaatcaccctggatgttatccggcggcaggaaggaaacaataaacgccataattgaagtcagcagaccgacaattgccacgaccagtttcacccctttaccaccagggatattaaatgtgcgttttaagtcaggatgtttaagaaccaacacaatgtagccaataaacagcatgaaataagcacacagataaatcaccaccgtcagcgccagagcgatcaggaaggacatgttgttaccgccaccggtattggtgaggatgatcaacgcgatagaagtaatcaccagctgcgaaatgaccagcgttaccggtacgccatttttgttcattttagcgaatgccgctggcagcaggtttttctgcgctgtgacatacatcccgcgagaaggaccaacaatccaggaggcgatttccgccagaacacccagcaacagcagtgcggagatcacgcgaaccgtccactcaatttccggtgccacatgggacatcagaacggtaaaggtttgcattacacctgcggagaggttgatttcattacccggaatgaccatcgcaatagataaaccgccaacagagcttaagcagattgccgccaccatcagcagtaacatagccagtggatagtcgcgcccggggttgctcatttcattgacgtgagttgcggaagcttctacgcccatataactcaaaatgaaggcaacaaatacaaccagtgtgcccactttagagaagtcagggaagaaggtcttcgaatccatttcgatagcaacgggggcaccggagtgcagataaatagccgctaatgcgatcaaaataaatgcaggtaacaggataccggcgaagaagccaactttagcaattcgcgccgtgtatttcgtgccaccaaactgcgttaatgccagcgcccaaagaatgatgagtgctgcaatagttttggtaatggggtcttcattcagcgctggccatttcaggatgtaggagagtgcccctaacacgaaatagagcatcggaataaaaccaatggcgatttgcagatagccaaatgagatcgctgcaaatccccatctcggccccagagtatttgatacccaggcgaagacaccaccttcttcccagccgtcgacggtggccatttccgcagcacaaagtcccacgggaataaaccataaaatcccgcctaatagcaggaagaagactaatgaaaagcccgatgttgcgaaggtagggtattcataaacagccattaccatcgatgccgttatggcaaagaatccgagtaatgtgagctgcttagctttacctgtctgtactgatgtagccatattatccccctaaaacggtattcctgtcggaaccgcacctgttttgttctgaagcgtattcagaacaatattttccgttgctaatgccagtgaacagactttggaaattgtcccgaaacgggttcgtttcgggacaccgttaccgttaaacgttatcaggtatgtttaaagctgttctgctgggcaataccctgcagtttcgggtgatcgctgagatatttcagggaggctttgtagtcttccagcaacagttcagcaaagtccatttcgaagccgcgacgacacataa

SEQ ID NO: 61 - DNA, 42941 bp, Escherichia coli
  source 1..42941: mol_type = genomic DNA
gatcacgtgctggcaacagcgatactggatcggttgctacatcactcaaccacgctgaatatcaaaggagagagttaccggttaaaagagaaacgtaaagctggagtgctgaccaaaaacacaacgccaatcagtgatgatgaaatggtgaaaagcggacagcatcagtaacgaaagtatcttagcgggcatgaaaatggcaaataacggtcaaacatcgtggcgttgacagccactcttcaccttgcaacaacttctcgcgaggatctccccagcgatcactgttttcaagccagatgtcccggcggcgcagtgcatcctgaaggcgttccagcaaacatagtgaataacctgcacgctgtatccgtccctccgcatcgtatacgaggcgtttccagggaccggtgataatatgttcaggcgcatcatcaaggatgcgctttttcgaaccattcagttctgccagataatgaatcgcagccagtacatgttcacctgccggtgccgcacggaaatgcaggtcccgcaacaccgccggaagaaaacgtttaacccgaccgtactgctcaaccatttcgtcatggaaattattgttctgtggacgagcaagttcattaaccttgcttacagattctgccagtctgtttttgggtacgcacttgaagataacctgcctgagatctgggacatctgtattatcatccagcaacaatgcacatgcccgcgccagtaacaatgcggcctgatcaagatctttcagtgtcctgagtctttttttttgcccggttttctttgcttcgcggataatgtccagaattagcatatcaagcacatcaacggcatcgtctaatgccgttatttcctgtgctttaacgaatgcagtaagtacagcaagctttctctgctgtggcattcgagcgatatattttaccgacgccatgccagcataacgagccagattacgcagttgaatggcaggcagaccggaaaagttcagtcgggaaaactcaagacttcgtaatcggatatatcgttccagcgcctcattaaacgcaggtccactgactgtaacagggccttttttcaactgttccagtgctgatacacgctgaccttccggaatgaccagaagctccatcacttgagctgcctgccatttgttcggcagtgcggccagctttttccacagccgctgatttgccctttcacgaatttcactgatgagacgtactagtgtggttgctccgggcagtaataccttattttgaagcaaccatgcagtggcaaaatcaaacatcagacccggtcgctcattactgagccacgcccgggtatatagcagacgcttcaggcggaaagaccatggaaaatcaccaaattcatgatagccgtaatattccttaattaatgcagtatgttctctaagggtagtgtcccgttcagcatagcgggagagaacttctggacggtggatattaagctgtaccgcgacaaaatgttgaacaccaggcagaacctgagttaaatccgtcagaaatgttcccagaaaacgggctgtggtgagctgaagcgcaatgcccagcctattatgtttgccccgtcgttggttaatgaaggccagatcccgttcatcaagatgaaaatagcgcgccagttgcacgtcattaggttctgcagcataacaaccgtaattctgtttttggtcagaggttagaaagtcgacaggcatatcaggctccctacctgacagttattcattaacaattttgcaactgtccgaaatattataaattatcgcacacataaaaacagtgctgttaatgtgtctattaaatcgattttttgttataacagacactgcttgtccgatatttgatttaggatacatttttatgcgactttttggttacgcacgggtatcaaccagccagcaatctctcgatattcaggttcgggcactcaaagacgcaggcgtgaaagcaaatcgcatctttactgacaaggcatcgggcaggtcaagcgatcggaaagggttggacttgctgaggatgaaggtggaggaaggtgacgtcatcttggtgaagaaacttgaccgccttgggcgcgatactgctgacatgatccagttaataaaagagtttgacgcccaaggtgtatccattcggtttattgatgacggaatcagtaccgatggggagatgggtaaaatggttgtcactattctatctgcagtggcccaggcagaacgacagagaatactagagcgtaccaatgaaggtcgccaagaggcaatggcaaaaggagttgtttttggtagaaaaagaaaaatagatagagatgcagtattaaatatgtggcaacaggggttaggtgcctcacatatatcaaaaacaatgaatattgctcgttcaacagtatataaagtaataaatgaaagcaactaacataaaaggttgaatatggaattgaatattacttcaaagtctaatccgtttggtgatacgacagcagaaaatgataaaaagatgttgcgtaatgctttcattgaaactgctgactttaggactctaattgaaactgatgacaggaccattgttgttggtagacgagggacaggtaaaagtgctttatttattcagctaaatgagcattggaagaaagacaaaaaaatattaatcctgagtttctcaccagacgattctcaaattattggtttcagatcaatgttgaaaccatttacaggatcatttaatttagcaagggcagcaacaagactattatggcgatacgctatgctaatggagatagcatcatatatatcatctcattacaaattgtcatctcaaatatcatcagaaacattgttgaatgaacatttgaaaaaatggaattctgcacaaggtgacattttaagaaagtgtaggcttgtcgcaaaggagtatttagatgaaaataacccagaagaatcaattggtgatcttcaattcaatttgaatatctcagaaatagaaaataatatagtatcacttcttgaacgctcagacaggaaagttgtcatattaatggataagctagatgaggcgtatgaaccggataatataggaattggaatcattgcaggtctagcatatgcatctattgaattaaatcaaaaagcaaaatgcattcgtccaataatttttttaagggataatatatttaggtcgctatcaaaggaagatcctgattactcgagaaatatagagggtcaagtcataaggttgcattgggactgggcacaactcctaatgctgtcagctaaaagaatgaaagtagcatttaagctagatattgagaaagatcaacgagtttgggatagatgcacagcggatgatcttaaagggaggaatggttttaagcgatgtttgcaatttaccctttaccggcccagggatttactatcattgttgaatgaagcttttttttccgcattcagagagaatagagaaactatcataaacactgacctagaatatgcagccaagtcaatttccatggccagacttgaagatctctggaaagagtatcagaagatctttccttcaatacaggttataactagtgcatttcgtagcattgaacctgaattaacagtttatacgtgcttaaaaaaaatagaagcatctttcgaattaatcgaagaaaatggagatcctaaaataacgtctgaaatacagttgttaaaggcaagtggaattctccaaagtttgtatagtgtaggatttgttggtattcatgataaaaacacctcatcctattcattttgccatgacgggcgaactccagataaaggttttgaaagtaatgagaaattattaattcatccatgttactggcttggtttgaatctaaatcgtaatgcacttgctccagaggaagcagaggagataaatgacgaatatgatattaatattatttcagataattcagccattagaaataaaacaataggtcaaataactactcatctagatcagataccgataggaaatgaaggtgccactgaatttgaacaatggtgtttagacgcactaagaatagtatttgcatcccacctaacagacatcaagtcccatccaaatggtaacgcagttcagagacgagatattataggcaccaatggtggcaaatctgatttttggaaacgagtattggaggactataaaacaagacaagttgtttttgatgctaaaaattttgaagaattaggtccatctgagtatagacaattacaatcatatttaacaggtccgtatggaaagctcggttttataattaatagagatgagagtgaggtattgaaatcaggaaaagatttagattggacaaaggaaatgtatcaatcccataattcattaataataaagttacctgcgaaatatatatctaaactgctgcagaaattaagaaatcctgaaaaacatgacgctatagatagacagatggggaaacttttaactttatatgaaacatcatatatggctattaaaagcacccaaaagaaaagaagaaaataaaatcagctacaacatacgaaaggggccctgaaaagggacctttgtatactgtattataatcaataagttataccataaacgtacgttttcgttccattggccctcaaaccccgtgaagtgttttaaaaacacttatggcggctggtttgctgtataccgaattgcagactgtgttccgatgcgggagaaacgcccactgacgaataaacaacagctggctggccagcggctttccgttttatccagactaaagaacttctcttttccttagcgtgtgttatcgcagaaatgcccacggagccccatattgcgccgaaagttgtctgtggcttctgtatggttgtcactaccagtgaccagtgagtaaaaatcgactatttgttgcgtacctttccagcatataacaaacgtctgtatgactccgggcaactgattttttatcaccttcagctttaaccagttatcaagttggttgttgattacaaaaatgtaatcaacccgtaaggtgtatactcttcagtatgcatataatcttctttattttgttaacgttaaatgacaagctatacacgaggtgaaatcgaataaatttatctggaagcaacatctatttattgtagtgttaataatcttgttttataaattttacaacattcaataaaaggagtttttatgaggaccgcaatagctggatttttaatatttttgtcttctgctgcttatgctgatatcaatctgtatggacctggtggcccgcatacagccttgctcgatgcggccagactttacacaaaaaaaaccggtgttacagtgaacgttcattacggtccacaaaaaaaatggaatgaagatgccaggaagaatgcggatatcttgtttggtgcatcagaacaatctgctctggctatcattagggaccataaagacagattcagtgaaaaagatatacaacctctttatctgcgaaaaagtattttactggtaaagaaaggtaatcctaaaaatattcagagtattgacgacctgaccagagccgggattggtatcatcgttaatgatggtggtggtaccagtaatacatcaggtactggcgtctgggaagatattgccggacgtaaggggaatatagaaacggttgcagcaatccggaaaaatattattttgtatgcgcccaatagcgggagtgcacgtaaggcacttgagaatcagcctgaagcagatgtctggataacttgggctgactgggcggccagtaatcctgatattggtgatgtcgtggaaatagcaccagactacgttatatggcgtgatatgaacattaccgtacgtcaggatgcaaatgatgaaacccgtcgatttgcagcatggctacaaactgatgaagcaacgcctgcattcaaaaaatatggctggactaggaaaggagtttgacatcctccacgttcttcaggacgaggaggatgttttccggatgccgcgtcagcggcatataaggcggcactctgttgttgtatatggcacaggagtaaaaccgccaaagtgccaaaacccggcgcaagacgatacggtcgtccgcatatcactagtcaccctccacgcataactcataagtgttcaacttccctgattgatgctcattcttaatccagataaaatagctcacatataacatgtaattaacttgtaacaacaactgacaaataacgctaatttaagatgacatcattaatttcttcacaaaaagtatcaaaacagcattttgttccacaatattacattaaacaattttataataaaaataacaaagtatatcgaggatgcattaaatataatcacataaaggaagtaacagcagcacaaactttctacgttcctggtttatatgatatagaaatactaggcatgtgttttaataaaatagaatcatattatagcatgatggagaattgtcttagccaactatataatcacctgccgaatataaatgatgagcatattatgaatgcagacatgaccaagacattaaaatcggctatagcaatgcaatatttcagaacaaaagatatgaactatgatatatttacgcattactgcaccaatcttgttagtatttacaacaaaaaaaaagactttatgttagatgaattttcattcataaatgaagtagagctttctgattttgaaaaaagaataaaaaagggcgtaagaaaaaataagaagtatgctctaggattaataagattattacaatataccgtattgccttttttacttgctgattttaaagatgggaatataaaaattatttatcacaaaaccaataaatatataagcagtgataaacctgttgtatgcacaaatattgaagagattttgagatttgagaactttttatatccattggcaccaaacattttagtttattcattgggtgcagatgtaacagaagaacttataagagatgaaaataaagtgaatgaatatatatatataaatgcgaaggagtatattatttccgaggacgaaaccaaaataactcgttatttaaaaaattaattttatattactgacatctccagtatctgtcagcagatacccttaaccttaaggggcagagatcgatgatattagcgagatatgaccccatggtagcggtgatacgctggataaaagctcgtccggtaagttccgggcgattatcacgagcccctgaagcatgatcctgatgtaaatgccggggccacggcttacgccgggcttgtatcacatgtaaccacagcgggctgacggtctcggtactgacaatccgttaccggtgcctcgctgatggaactgaagtggaccagtaaggcgccttctgatttggcgcggttatatgattttctggcgctagccaataaaccagcaataatagcgacagtgcaagtgattatttcataataatgatagcgtgtttattttatgtaataattggcaatgaaataacttgattgagctccctttatccagtctgatagtgggtaaagggaactcaataataattgaattaatttattagcttcatcgcattttttttggtctcttcatcacttttttgctcttgttgtgaagaggattgagagattgttgaagaattaaaatcggccatctcttttggaaatagcgatctcaatatattcacgatatctgaaaatgtggtttctttcgtcagcagttcacataaaagaaatggggccctgggatcttgtctgtataaggccagacctgccgtcagtgcggcccggttaaggcggctgcgttccccttgcgggatactgtccagtgtatcacaaacaattttatctgtttgatttacatctggatttagcttgaaggcaatggttctgcgcttgtccattattaattacctatgagatacataccgttaactaaatcatattgagagttattggttttgaaaaaacgttcatcacgaatctgtgtgtgtttttttactgcatcacatattaattctgcgccaccacctataaccataacatgagtataaccagaaaattcattgagcgtatttaatacacgctgctcaagtttacgaagtgcttcattcattgcttcggtgactattgatattttgttctcatcattaattcgttgcttcagatagttgttatcttttctgtgaataattatatcgtcagcaagatagctacttccttttgttctcgcaagagaaagggcatcttttactgcagatgtgaccagagatacaccaagagatgagtctccgtatattttgctgatccctgataatttacccattacctgagagatatctaatgtggtgcccccgagatctataattaataaagaatctaactcatccagttcttgtagaacttcataacctgccggtatagattcaggcatgacttttacatcttttattgtgaatgtatccccaccattcaatgtaatttttttccggaagtttgcttttttacgctcaatattttccgtattgggttggttattcctgtcgtaatactctgtcagaggaagtgtgcaaacaatatccacttcgcttaccggcagaccactggtcagtaaggcgtggtgcaccgcaacgacattaacgtcgctgtattgccatgcgatattggttgtgactacagcatccgggctgattggatcaaatgaatactgttcgccgttcagtgtgtagttaaagacctttttatcaccaaaagagactgcccactcgcgtttgaagctgttcgggctaatgtgctgtttaattgttccgtcgttttcctgccactgtagtttgatgtttgttgaaccgtcatcaatgaataccaacatttataaaactccttatggtgtttatgtggtgtatctttgggtgtgttttgggttttgagtggggttgtttgtcaagtttaccccatttcaactatcaatcaatgattatttgtgttgtttttggtttttgttggggtggttttgggttgttttttgggttttgtttggcgagtaacaaaagatgtcgctgtgcttctctttttactgcgccagctgacgcggcgcggcaggaacgctgcctgtggtcagtgtcccgcgtccggccgggcacgggacgggcgcttttaccgctcccggctggcgtcggtgacagtgtacgccagcccgtcgcccttttctgatgaacgcccttcaagccgctttcgcggcatagccttgccgtcaaaaagacgacggctgcggtattccacggtcggcctgacccgttaccggacgcggtgaacagcccacaggcagcggggaacgggcaccacaggggtgccctcccggtgtcctctgtaagagaaggagttttgtatgtcccgttttgtcctcggtaactgcatcgatgttatggcgcgtatccctgataacgccattgatttcatattaaccgacccgccttacctggtgggcttccgtgaccgttccggacgcaccattgccggtgacgttaacgatgactggctgcaacctgccagcaatgagatgtaccgcgtgctgaaaaaaaacgcgttaatggtcagcttctatggctggaaccgcattgaccgctttatggccgcctggaaacgcgccggattcagcgtggttggccacctggtcttcaccaaaaactacacatccaaatctgcgtatgtcgcgtaccgtcacgaatgcgcttacatcctggcaaaaggacgtccggcgctgcctcagaagccattgcccgacgtgctgggctggaaatattcaggcaaccgccatcacccgacggaaaagcccgttaccagcctgcaaccgctcattgagagcttcacacacccgaacgcgattgtgctggacccgtttgcaggcagcggctcaacctgcgtcgccgccctccagtccggacgccgctatatcggtatcgagctgcttgagcagtatcaccgtgccggacagcaacgactggccgccgtgcaacgggccatgcagcagggggccgcgaatgataactggtttgaaccggaggctgcgtaaatgaactatgccggacacgaaaaacttcgcgccgacgtggcggaggtggccaacaccatgtgtgaccttcgggccaggctgaacgatatggagcatcgctgtcgctttgattccgatgtgcttgttgaacgcctgacacgccagacgctgtatcgcgccaatcgcctgtttatggaggtgtataccgaaattctggaactggattcctgcttcaaagattgagaaggagacgagaatgtacggaacatgcgaaacgctgtgccgggcgctggcagcaaagtatccgggagacgcgccgctgatgctggttatctggtcccaggaagaaattcaggccctcgctgacggaatcgatatttccctgtccgatcatgaaatcaggaccgtcctggcgcgcctggaggacatcccggaagaccagcggattgagtccggtatttcttccggcgtggcgatggagatcatcaataacgtgagagaaaaccgccaggtgaccgtccctgctgaactgctggcgtccctgattcagaccgccgaacaggcactgtggaaacgtgagtgggccgcccgtgataacggcctcgccgtcccggaatgcgtcacccgccgacaggcggtggttaatcaggcccgcatcctgctgaaaaacaacacacacgaaaacggctgatgttatcgccgcctgcgggcggcgatacagggagaacgattaatcatgaacgaaaacacaacgctgaatgcactgatttgtcgccacgcccgtaacctgctgctggcgcagggctggccggaagagacggatgttgaccagcgaaatccgaaccatccgggctggatcagcatttacgtgcggctggatgcgccccggctggcgacgttactcgttaaccgccacgatggtgtgctgccgccgcacctggcctccgccattcagaaactgaccggaaccggggcggaactggtactgtccggcagtcagtggcagtcgctgccggtacttccggcagacggaacgcaggtgtctttcccgtatgccggagaatggctgaccgaagacgaaatcagggcagttcttgatgcggtgcgagatgcagtatgcagtgtcagttgccgggtggcagaagatgcgcggcgtatccgggcggcgctgaccaccaccggtcagacgttgctgacccgccagacgcgccgctttcgcctggtggtgaaggaaagcgatcatccctgctggctcgatgaagacgacgaaaacctgcctgtggtgctcgatgccatcctgaaccggggcgcacgtttttcgtcggtggaaatgtacctggtcagcgattgtattgagcatatcctgtccagtgggctggcctgcgatgtgctgcgtataccggatgaaccgccccgccgctggtttgaccgtggtgttctgcgggaggtggtccgggaagcccggaccgaaatccgcagcatggcggatgccctggcaaaaatccggaaatgatgacactggcggggtaaatccccgcctttttcctgccggtccccggacagagcacaaaggaagtcgccgccggctccgctttacccggccatgcagggcatggccttgtggtttttcagttatgtggcctcagcgtcgtgtgcgggcggtgccgtgcctccatcttagccgggctggcgttgatgcaagggtacgcttcgccgctgcggtcacccggtccctccttcccgtctgccgtgattttccggtcgttcacccgctcagatttcgcggtctcaccctgcaactcccgtcagccgtgtgcgtcaggctgcggcttcccttgcgcccctgcatccccgcctgttcgcccggcttttatggaggcacggcaccgcccggtgtcgcggaatatgtgaacaacggaggaaaacatcatgcaatatgcgaaacctgtcactctgaatgttgaagagtgcgaccgtctctcctttctgccgtatctatttggcaacgattttctgtatgccgaggcgtatgtgtacgcgctggcgcaaaaaatgatgccggaatatcagggaggcttctggcacttcatccgcctgccggacggtggcggttacatgatgccggatggcgaccgtttccacatggtgaacggtgcaaactggtttgaccgtaccgtgagtgctgatgccgcaggcatcatcctgacctcccttgtgattaaccgccagttgtggctgtaccacgacagcggggatgcaggactgacccagctttaccggatgcgcgatgcgcagttgtggcgtcacatcgaatttcaccccgaatgcaacgcgatttacgcagcactggactgattaacggacggggcggcaatgccgcccctgtaaaggagacgagaacatgtactgttaaagaaatcatccgcgatgtactggatacagacgtgccggacagtgaatgcgtttttgccgtggtgctgacccgtggggatgtgcgtcacatagcccaggactggagcctgtcagacgatgagctggaaaccgtcatgcagcgactggacgatgcctttgagcatggtgcggatgtcagtgttgttcacgacgttgttcgtgaactgatggaggaaaagcgcgccagtcgtcaggtgacagtcccggcggtgatgctggaaaaagtgatggcgctggcaggcagtgaaatgaagcgcctgtatgccgtcgggagtgagaacgggggcgacggtgacgcattcgtcagggaagaacgcgaagcgatggacgttgtgttacaggcgctggacggggagacgatgtcatgaatatcagcacagaaacccgcgaaattctgcgcaattacagggccgtgattaatgcgcggcgtcgtgaaatggggcagaaaccgctcaccacggcgcagattgttgatgaaatctgcgattttgtggcgaatcagcaggctgttttcctgggcggacactacatcttacagggtagcagacacaggtgatacagggcaggcggtggaggccgcctgtcagtccgcgcgaaaacccctggcaggctgacgcctgccggaagggaagcgggccacgctggcgcgtcgcccgttacccttcccgtctgtgatgtgtctgactcaggagtgtttctttcttatgttatggaactgttcctgatgttgttgttcctttatctgctgctctgattctgactactgcagtgttgttctgtctgccgggcgcaccttcggctcccggctgcctggcggcatccggtcgtcaggcccgactccgacaggcagctgctggcgcacctgccagtctccgccgaacccgctggcgcggtttcgggctgccgctacggtccgatgcgtgaaaaccccgggcttgcagcgaccgttccggtcgcgccgcctctgtcgcgccgtggcctgcgctcccggcatcccggcaaaaggccgccgggatgtaaggcgcaacgccgtttcgcgcacgcgctctccgtcgttgcggcgggtccctgctcattgcctgccgggtgccacacacccgtatgagtccctgtcgccgggggctgatacagccacaacctgccgcactgactgtccagggtaaatgaacagcccacaaaattttttacccaaaaaccggtaaaaaattttgcgttctgccccggacaggtgcgtcaggccgtggcagtgatgccccttgcggcgaaggttctcaaacgggtgaagttcataccacagggaatacagcagcaggttcccgcgaaacgtcaaaaccgcggctcccgaaactcaacgggtgatgttctttaaaaatcaggatttatttcaggctccggcaatacacatttatgtgttctgtcagtcatccggctggcaggtaatgagaacgcaggaacagaaggaggaaaacaccggagaacgtcagatgcagatatgaaaaaagcaggtcagggacctgcttaatccacgccgtagaaatcgccgcaatcgattttcacggcttcactaacctgtgtcataaggagtttcatttatgacagtaagtattgtttcaccttccgcagcggctgtaaagccccgccgtcatccccgtttcagacgcgaagacatccccgcgccggaaattgaccccgtgctgaaagcattcgggcgacacatagcccggagttttcaccggggacgtggtgtacacatccccgccatgaaaaacacggctttcgggcaggtgctccgcacacttgaactgaaacgcgcttttaactgatgaggtgagccgccccgcaaggggcggcaacagacggaaggagaacattttatgacattagcagcaatcaccatgaccgccccggaagccgccagccctgtgcagatgtaccgcgcgacctactcaccggatgacaacaaactgcgcctgtatgccgcgtcacgtcttgacccggagacgtataaaaaagtgcatgatgccggttttcgctgggcaccaaaacaggcgctgtttgtggctccagcctggacaccgggccgggaagacgtgctcctctcacttgccggagagattgaggatgaagacagcacgctcgctgaacgtcaggaagcacgggcggagcggtttaccggatacagcggaaagcgggccagtgaatccgcacaggcacttgatgaagtggaaagactggccgcgatgatcccgcccggtcagcccattcttgtggggcatcacagcgaacgccgcgcccgtcgtgatgcgcagcgtattgaaaacggcatgaaacgagccgtgatgctctttgaacgtgcggaatactgggaagagcgggcgcggtcggcactgcttcacgcgaagtataaagaacgtccggacgttcgctggcgtcgtatcaaaaaaatcgaagctgatttgcgcaaggctgaaaagaccatcgcgcagtcgcagaaatatctgacgatgtggcgggctgaatcgctggatctgaatatggcaaaacttatcagcagtcatgaccatatcagcgcctgtttcccgctggataagtacccgcgcccggcagaaaaaagccagtatgaaggaagtcgattgttatggtcggccctggatgatgacatcatcaccacggagcaggcccgtgaaattgcgatccgctgtcatgaacggcagagccagcatcagcaacgctgggttaaccactatcagaaccgcctgatctatgagcgtgccatgctggacgaaagcggcggtgtggttacccggacacaggattttgagccgggcgggcaggttttcagccggggcgagtggctgaccatcatccgcgtgaacaaaagcaacggggcggtgagttcagtcacaacgccaaattacagttttctcgggtacagcggcacgatgaaagtgacgcccgatcgcatcacggactacagagcaccatcggcagaagaggctgccgtcgccagtcaggccgcgaagcgtccgccggtagtcaactatccgggggaaggtttccgggaaatgacaaaggcgcagtgggccgccctgccccgggactgtaaggccgtgcgcagtgtggcagagacagaagaccacggggcataccgctaccgccgcacaatggacaataatttccgcctggtgaatgtgtatatcaccgacatgaaaattacggaaatcccacagaaataaggtatatccccccgggaaaatccccgggggatgacggagataatgacatgcacagtcagttaagagaacgtatccggctgatgcgcgcaaggctggataacgccgcgccggttgctgagatccgggctgaatctcagctttttgtgactccagccccggtctgtgatcgcctggtgacgctggcggagatcagcaaccgtgatcacattctggaaccctctgccggcagcggggccatactgcgggcgattcgggataccgtgccgggggccatgtgtgatgcggtggagattaacagcgggctggtccggtatctgcgggaaaattttaacggtgtcagggttcagtgtggcgacttcatggaatggcagccggcgcagtattacagccgggttatcatgaatccgccgttcagccacgggcaggatatccggcatatcctgcgggctttttccctgttgcgtccgggtggcgtgctggtcgccgtgtgtctcaacgggccacgccagcaggagaagctgttacggttttctgacgtccacgaggagctgccgcgcggcacgtttgcttataccgatgtcccgacgatgattattcgtctgcgtgcctgatgacgccgggcagacgggagaataaatgcccgtctgcccgcgccgggaaaagaccgcgcgccggtggcgctgaaaggggccgcgctcacgcgccgcccctttcattacgcggacgttctgctgtgggcttctgtcttttcatccctgtgattctcctgtttcctgggatgtttttgttcctgctactgttcttctttttcctgctgctctgattactgtctgttttgttgttctcctgcttatgccttttccgggcgtccccctggcggggcgggctgtcgtgaacggagccagcggagctgtctccgccctggcgggcttccatccctgacgcgaaaccccgggcttgcagcgaccggaacggtcgcgtcgcctctgtcgcgccgtggcctgcgctcctggcatcccggcaaaaggccgccgggatgtaaggggcaacgccgtttcgcaaaccgcgcttcacgtcgttgcggcgggtccctgcccgttgttctgtccggtgccattcacctgtttaagcccctgtcgccgggggcaaagacagccacaaccgtctccgccagtccaggggtgaaatgcacatcccgcaaaagtttttgcccaaaagcaggcaaaaacttttgcggtctgcccccggacagtcgtttccggccgtggcagtgatgccccttgcggcgaaggttctcaaacaggtgatggttaataccggagggaacaaacggcaggtccccgcaaaacgtcaaaaccgcggctcccgaaactcaacagatgatgggggctgaaaacatcaacagaaggagacacatcatggcagttcgtggcattaacaaggtcattctcgtaggccgactgggaaaagatccggaagtccgttacatccccaacgggggcgcagtggcaaacctgcaggtggccacgtcagaaagctggcgtgacaaacagacgggggagatgcgggagcagacggaatggcaccgcgtggtgctgttcggcaagctcgcggaagtggccggtgaatatctgcgcaagggctcgcaggtctacatcgaggggcaactccgtacccgtagctgggaagataacggtagcacccgttacgtcactgaaattcttgttaagaccacgggcaccatgcagatgttggggagtgcaccacagcagaacgctcaggcgcaaccggaacctcagcagaatgggcagccacagagtgctgacgcgacgaaaaaaggtggcgcgaaaacgaaaggccgtggacgtaaggccgcgcagcccgagcctcagcagccgtctgaacccgcgtatgacttcgatgacgacattccgttctgaacgactgacagtgacaaccgccccgtccagtgcggggcatcaccggagagctgaggatgagcgaatatttcagaatatttcaggggctgcctgacggctcctttacccgcgaacaggctgaagccgttgccgcacagtaccggaatgtctttatcgaggatgatcagggaacgcattttcgcctggttgtccgtcaggatggcacgttgatctggcgctcctggaattttgaggactgtgccgggtactggatgaaccggtacatcagggatttcggcattcgtaagtaagagaggtgccggacggggatgacgtccggcagacattaactaaaccgtaagaggaataatcatgtcagttacagagtttaaggtaaaaacggtgcgtaaatccagccgtaaatcgtcaaaagaacaggaaaccgccctgtctgccctgctggcgcagacggaggaagtgagcgtgccgctggcctcactgattaaatcaccgctgaatgtgcgcacggtgccgtattccgcagagtccgtcagcgaactggcggagtccattaagggcgttggcctgttgcagaatctggtcgtgcatacccagcctggtgaccgttacggtgtcgccgcaggtggtcgccgactggctgcactcaacatgctggcagagcgtggcatcattccggctgactggcctgtccgtgtgaaggtcattccgcaggagctggcgactgccgcatcaatgactgaaaacggtcatcgtcgggatatgcatcctgccgaacagattgccggattccgcgcaatggcgcaggaaggcaaaacacctgcacaaatcggtgatttgctgggctattcaccccgccatgtccagcgaatgctgaaactggctgaccttgcgcctgtcatcctcgatgcgctggcagaagaccgcattaccaccgagcactgtcaggcgctggcgctggagaacgacaccgcgcgtcaggtgcaggtgtttgaagccgcctgtcagtcgggatggggcggtaaaccggaagtacagaccattcgtcgtctggtgaccgaaagtgaagtggcggtggcggggaacagtaaattccgcttcgtgggggctgatgccttctcgccagacgaactgcgcaccgatttgttcagcgatgacggggacggttatgtcgaccgcgtggcgctcgatgccgccctgctggaaaaactccaggctgtcgcagagttccttcgggaagccgaaggctggggatggtgcgccggacgcatggagcctgtcggtgagtgccgtgaggatgccggaacataccgctgtctgccggagccggaagcggtgctgacggaggcggaagaagaacgtctgaacgaactgatggctcgttacgacgcgctggaaaaccagtgtgaggaatctgacctgctggaagcagaaatgaagctgatgcgctgcatggcgaaggtcagagcgtggacgccggagatgcgtgccggaggtggagtggtggtgtcctggcgttatggcaacgtgtgtgtccagcgtggtgtgcagttacgcagtgaggatgatgcggctgacgacgctgaccgcacggaacaggtgcaggaaaaagcgtcagtggaggaaatcagtctgccactgctgacgaaaatgtcttccgaacgcacgctggcagtccaggcagcactgatgcagcaaccggacaaatccctgacactgctggcatggacgctctgcctgaatgtgtttggcagcggagcgtacagtaaaccagcacaaatcagcctggaatgtaaacattattcgctgaccagcgatgcgccatcggggaaggaaggcgccgcattcatggcgctgatggcagaaaaagcccgtcttgctgccctgctgccggagggatggtcacgggacatgacgacattcctgtcactcagtcaggaggtgctgttatccctgctctgtttctgcaccgcatgcagccttaacggtgtccagacccgtgagtgtggtcacacgtcacgcagtccgcttgacacgctggaaaccgctatcggattccacatgcgcgactggtggcagccgacaaaagcaaacttcttcggacacctgaaaaagccgcagattatcgcagctctgaatgatgccggactgtccggtgccgcacgggatgcggagaagatgaagaaaggtgatgcggctgaacatgcagagcaccatatgaaagacaaccgctgggtgcctggctggatgtgtgcaccacgtccacagacggataccactgaacgcaccgataacctggctgatgccgcctgatgaacaaccacaccgccccgccggagacggggcggcagcaagggagataccgtgatgaaaactgaactgaccctgaatgtattacagaccatgagtgcacaggaatatgaagatatccgggctgccggaagtgatgaatgccgtgagctgacacacgccgtgatgcgggaactggatgcgccggacaactggacgatgaatggcgagtacggcagcgagttcggcggctttttccccgtccaggtccgtttcacgcctgcccacgaacgttttcacctggcgttatgttcaccgggtgacgtctctcaggtctgggtgctggttctggtgaatgccggcggtgagccgtttgcggtggttcaggtgcagcggcggtttgtaccggaagccgtcagccattcactggcactggcggcgtcactggatgcgcaggggtacagcgttaatgacatcatccatatcctgatggcggaaggaggtcaggcatgagcgtacgttcacgggcactggttcccctcagcacagagcaacaggccgcatggcaggcggtggcggagacggaaaaacgccgccatcagggaaacacgctggctgaatatccgtatgcgggtgcgtttttccgctgtctgaacggaagccgcaggatatcgctgtctgacctgcgatttttcatgccgtccctgaccgcagaagaactgcacggcaaccgtcttcagtggctgtatgccatcgatgtgctgattgaaacacagggcgaggtctgcctccttccccttcccggtgatgcagcagagcgcttgttcccgtcggtgcggtttcgtgtcagggaacgcagtcgccataaatccgcgctggtcatgcagaagtacagccgccagcaggcgagggaggcagagcagaaagcccgtgcgtaccaggcgctggtcgctcaggctgaaatcgaactggcattccattcgccggaaacagtcggaagctggcatgcacgctggagtgaccgggtggcagagcatgacctggaaaccctgttctggcagtggggcgagcgttttccgtcactggccggaatggaacgctggcagtggcaggatatgccgttctggcaggttattgcggaagccagtcttgcagcaagagaggccggtcacgctgtccgtgagatggagcggtggatggtgccgaacaaactccgggaggcagcgtgatgcggcaacaatcacacggatttcccgtgaacggtctgaatgagcggattattttcagggaaagtgagtgtggtcagcgtgcaggtatatgggctatgatgtgcccggcgcttgaggctttctgcctcatgacgtgaaggtggtttgttgccgtgttgtgtggcagaaagaagatagccccgtagtaagttaattttcattaaccaccacgaggcatccctatgtctagtccacatcaggatagcctcttaccgcgctttgcgcaaggagaagaaggccatgaaactaccacgaagttcccttgtctggtgtgtgttgatcgtgtgtctcacactgttgatattcacttatctgacacgaaaatcgctgtgcgagattcgttacagagacggacacagggaggtggcggctttcatggcttacgaatccggtaagtagcaacctggaggcgggcgcaggcccgccttttcaggactgatgctggtctgactactgaagcgcctttataaaggggctgctggttcgccggtagcccctttctccttgctgatgttgtacgggcatgaacaacctgacttcaggaaggtcgtttcccttcaggaacggggatgaacgcgcgcctgcggcgcccgttcttttcccccgccttctctggttatggcctgtcagaaatcacatcaccttccctgtgattattctctttttcttcctgctctgattctgactactgcagtgttgtcctgtctgccgggcgcaccttcggctcccggctgcctggcggcatccggtcgtcaggcccgactccgacaggcagttgctggcgcacctgccagtctccgccgaacccgctggcgcggtttcgggctgtcgctacggtccgatgcgtgaaaaccccgggcttgcagcgaccgttccggtcgcgccgcctctgtcgcgccgtggcctgcgctcctggcatcccggcaaaaggccgccgggatgtaaggcgcaacgccgtttcgcaaaccgcgcttcacgtcgttgcggcgggtccctgcccgttgttgtgtccggtgccattcacctgtttaagcccctgtcgccgggggcatagacagccacaaccgtctccgccagtccaggggtgaaatgcacatcccgcaaaactttttgcccagaagcaggcaaaaacttttgcggtctgcccccggacagtcgtttccggccgtggcagtgatgccccttgcggcgaaggttctcaaacaggtgatggtgaataccggagggaacaaagagcaggtccccgcaaaacgtcaaaaccgcggctcccgaaactcaacagatgatgggggctgaaaaccagagagaggagaaagcaggatgagtacccgaaatatccacgttaacaccgcgtcgtacacgcttcttgttgccgggaagaaaaaaaacaccggggaagagtgggacgtcctggaattcagcagcctgactgagctgaaaaaatatcgcaaaagccacccggaaaagatggccttcagttatagctacgcgctcagtcagggtgtggataagcagttccgccatatcaacattgcggaagccgatcacttcaaacagttcctgcgtcagattaagcgtgccggcctcgatatccgggcgatctgctgaccggatgtgatgaatatccctcctgattgttgcaatcttgttaatgtagatcggggggggtgatattaagcggaaaaattttttattaaatttattctttcataaaggagtagctgttatgcgattagcttcccgttttggtcggtataattccatccgccgtgaacgtcctttaacggatgatgaattaatgcagttcgtgccttcggtattttccggtgataaacatgagtcccggagtgaacgttatacgtatattccaacaatcaatatcatcaataagttacgtgatgaaggtttccagccattctttgcctgtcagagtcgggttcgtgatttgggacgtcgcgaatacagtaaacatatgttacgtcttcgcagggaagggcatattaacggacaggaagttcctgaaattatcctgcttaattcacatgatggttcatccagttatcagatgatccccggaatttttcgttttgtctgcacaaatggcctggtgtgcggaaataattttggcgaaatccgcgttccacataaaggtgatattgtcgggcaggttatcgagggagcgtatgaagtgctcggtgtctttgataaggtcactgataatatggaggcgatgaaagaaattcatcttaacagtgacgagcaacatttatttggcagagctgcactgatggtcaggtatgaagatgaaaataaaacgccagtgacacctgaacagataattactccccgtcgtcgggaagacaaacagaacgatctctggacaacctggcagcgggttcaggagaatatgataaaaggtggattatcggggcgaagtgcctccgggaaaaataccaggacaagagccattacaggtattgatggtgatataagaatcaacaaggcgttatgggtgattgccgaacagttcagaaagtggaagtcatgataatataagtaaagccccgaaaaaattttcggggctttacttatattatcatttttcggcattgctgtgtcgtctgatatacctcaatttcatcgaccggctttccggttgtctgtaaatattgtgcccgcgaaaaatggtctggcaggaggctgcgcagttaccgggtatatataagatgggttcccgcttcgcggggcttcggccagtcagtattgtcactcatatgatatttttgtgtgtggccttccatgccgcttttgcggcataaccggtatctgacaatgtctgtaagattaattgttctgcacgctgttaatttccggaagtgatttcttcgtggccggaagccggatacctttactgctttttatcccggtataaatccggtaaacctctgatgcgtaggcaagacgtctctggttctggcgttcggatttcctgaatcctgcattgtatgcaccaacggcctcccaggtgacgccccattttttaaatgctattgccagataataagcaccggtataaatgttcatgcagggatctgttgtcagatgttctggcttaattccgtagcgggccagttcgttaaaatgctgggaatctacctgcatcagtccgctgccatatcccgttaccggattaataccgatagcattaacccggtaacgggattctttccatgatattgctctcagtaaatcaggatctattttgtaatcccggcctgcaagatcaaagcaatcagtggcatggcagatctcatttataaacatcaagcagatggctaacatccattttttcatttttccacctctggtgactttatccgtaaataatttaacccactccacaaaaaggctcaacaggttggtggttctcaccaccaaaagcaccacaccccacgcaaaaacaagtttttgctgatttatctttaatatcattgagttgtatttgtggatttatattgtttaaatctgatttatttaaagcagcgtcgttaacgcagctacagcaacgcgccgacaccgctttgtaggggtggtactgactatttttataaaaaacattattttatattaggggtgctgctagcggcgcggtgtgtttttttataggataccgtcaggggcgctgctagcggtgcgtccctgtttgcactatgaattctagtgtttcgaaattaactttgttttatgtttaaaaaaggtaatatctaatggctaaggtgaatctgtatatcagcaatgatgcttatgaaaaaataaacgcgattattgaaaaacgtcgacaggagggggcgagagaaaaagatgtcagtttttcagcaacggcttcaatgcttcttgaactgggtcttcgtgtatatgaggctcagatggagcgcaaagagtctgcatttaatcaggccgagtttaataaactacttcttgaatgcgttgtaaaaacacagtcatcagtagcgaaaattttgggtattgagtctctcagtcctcatgtctcaggaaatccaaagtttgaatatgccaatatggttgaagatatcagagagaaggtgtcggttgagatggaaaggttctttccaaaaaatgatgatgaataaagggaaataaattttgactttgttcaaatatcagactttttaatggttcaaactgatgacaataatcagaataattagtatattaattacgtggttaatgccacgttaaaatttgaacttgaaaatcgccgatgcagggagcttgtccctccctgcatcgactgtccatagaatcctttgaggaggttcctatgtgtgtgatggatactagagaaagagcactcatacgtcaatcaggcctgccggaaattattttatccgcaaaatatccagtctgtgtccgcacagagtcaggaaaattcatagactcaaactctgtttttttacacttaataaagtgtcagaatagtaattctgaaatatggttttctggtattgatattgatacgcaaattttatttcatactgctgaagttgatgctttctcgtcctcgaatggagtgagtattattaatggtgtaatattgaatgatgtatcatgggatgtggtggttgaaagtacggaagtgaataacttgaatttgtttgtctggagattctttgaaagatacgtagttagtagcttttttataaagggcaaggagtttagttgtgaacctgacaaatatcgctttaataagataataccgtatcttttgggttatagtcatgagtattcttctcagagaatggatatctctgttgaccaatctaaaaaaatatttatgaattttaaaaaacactatggtttctcagacagggatgagtggttgcgatatgctataatctctgatgtgttattttatctatatcaatacttcgctagtaatattaacagccttcactgtaaagaaatgtaagcatttccggcactaaaagtgccggtttttgttaacgtaatttactattttgttgtttatttttgtgtgcgtcttatgtgaatattttgactaaatctcttttatttatgggagggagggtgattaaaggagctttaagatctgcgccaagtagaaaggttttacttacccttgatgaggaaacgaataaattattacttggagccagagagcgtagtggaagaacgaaaacaaacgaagcattggtgaggttgcaggatcatttgcaacgttatccagatttttataatgaagaaatattcagggaggtgaccgaagagagcgagtcaacatttaaagaactttagtttttatctatcaatatttaacagaggaatcatatggacgccgttttaagtgttcagggtgcttctgcgcccgtcaaaaagaagtcatttttttctaaattcactcgtctgaatatgcttcgcctggctcgcgctgtgatcccggctgctgttctgatgatgttcttcccgcaactggcaatggcagcacagggccaggacctgatggcaagcggtaacaccacggttaaggcgaccttcggtaaggactccagtgttgttaaatgggttgttctggctgaagttctggtcggtgctgtcatgtacatgatgaccaaaaacgtcaagttcctggccggttttgccatcatctctgtatttattgctgtgggtatggccgtcgttggcctgaaataaaacgatgtcgggagacgagaataaacttaagaaatatcgtttcccggaaacactgaccaaccagagccgctggtttggcctgccactggatgaactgatccccgcagcaatctgtgttggctggggtatcacaacatcaaaatatctgttcggtattggtgcagcggttctggtttatttcgggattaaaaaactgaaaaaagggcggggcagttcctggttacgagacctgatttactggtatatgccaacagccctgctgcgcggtatttttcataatgttcccgattcgtgtttccggcagtggattaaatagaactgataccaggattgttatatggaacacggtgcccgtttaagtaccagtcgtgtaatggccatcgcctttatatttatgtcagtgcttattgttctcagcctctctgttaatgtcattcagggggtgaataactaccgtcttcagaatgagcaacgcactgccgtgacgccaatggcatttaatgccccctttgccgtgtcacagaacagtgccgacgcctcttatttacagcagatggcgctgtcatttattgccctccgtctgaatgtttcatcagaaaccgtcgatgcctcacatcaggcgcttctgcaatatatccgcccgggcgcacagaaccagatgaaagttattctggctgaagaagcgaagcgtattaaaaacgataacgtgaactcagcctttttccagaccagtgttcgtgtctggcctcagtatggccgtgtggaaattcgtggtgtgcttaaaacctggattggtgattcaaaacctttcactgatatcaaacattacatccttattctgaagcgggaaaacggggtgacctggctggataatttcggggaaacagacgatgagaaaaaataatacggcaataatattcggcagcctgtttttttcctgcagcgtgatggccgcaaacggtacgctgtcccccaccgtggtgccaatggtgaacggtggtcaggccagtattgccatcagcaataccagcccgaatctgtttaccgttcccggtgaccggattatcgccgtgaacagtctggatggtgccctgaccaataatgagcagaccgcctccggcggtgtggtggttgccaccgtcaacaaaaagccctttacgttcattctggaaacagaacgtggtctgaatctttccattcaggccgttccccgtgaaggcgcggggcgtaccattcagctggtcagtgacctgcgcggaaccggagaagaagccggtgcgtgggaaacgtccacgccttacgaatccctgcttgtgaccatcagccaggctgtccgtggcggaaaattacctgcaggctggtatcaggttcctgtgacaaaggaaaccctgcaggccccggcggggctgtcttcagtggcagatgccgtatggacggggaatcacctgaagatggtccgctttgccgtggaaaataaaacgctgtctgccctgaatatccgggaaagtgacttctggcagccgggaacccgtgccgtgatgttcagccagcctgccagccagttactggcaggtgcgcgcatggatgtgtatgtcatccgtgacggggagggcaactgatggccagtatcaataccattgtgaaacgcaagcagtacctgtggctggggattgtggttgtcggtacagcctccgcgattggtggggcactgtatctgtctgatgtggacatgtccggtaacggtgaaaccgtggctgaacaggagcctgtgccggatatgaccggtgtggtggatacgacctttgatgacaaggtgcgtcagcatgccaccacagagatgcaggtgacggcagcgcagatgcagaagcagtatgaggaaatccgtcgtgagctggatgttctgaacaaacagcgcggtgatgaccagcgtcgtattgaaaagctgggacaggacaatgccgccctggcagagcaggtaaaagccctgggtgctaatcccgtcacggcgaccggtgagcctgtaccgcagatgcctgcctcaccgcccggcccggaaggcgaaccacagccaggaaacacccccgtatccttcccgccgcagggcagcgttgctgttccaccgccgacggcgttttatcccgggaatggtgtcacgccaccaccacaggtgacgtaccagtctgtgccggtgcctaaccggatacagcgtaaggtgtttacccgtaatgagggaaaacagggaccatcactgccgtacattccgtcaggaagttttgcgaaagccatgctgattgaaggggcggatgccaatgcctctgtcaccggtaatgaatccacggtgccgatgcagctgcgtatcaccggcctggtggaaatgccgaacagcaagacgtatgacgcaacgggatgttttgtgggtctggaagcctggggggatgtgtccagtgagcgtgccattgtacgcacccgcaatatcagttgcctgaaggacggcaaaactattgatatgccgattaaggggcatgtcagcttccggggtaaaaacggtatcaagggcgaagtggtgatgcgtaacggcaaaatcctcggctgggcatggggcgcgggatttgttgacggtatcggtcagggaatggagcgcgcctcccagccggctgtcgggctgggtgccacagccgcttacggggctggtgatgtcctgaaaatgggtatcggtggcggcgcatcgaaagccgcacagacgctcagtgactactacatcaaacgtgccgaacagtatcacccggtgataccgattggtgcgggcaacgaagtgaccgtggtgttccaggacggcttccagctgaaaaccgtggaagagatggcgctggaacgcacgcagagcagagcggaagaagacaatccggaaagtccggttcctgttccgccatcggctgaaagtcatcttaacggctttaatactgaccagatgctgaagcagctgggcaacctgaatccgcagcagtttatgtccggcagtcagggagggggcaatgatggcaaataatacgtcgtcccgtcaggcgggccatgccgcccggtatgttgtcgcccgggttctgcgaggactgttctggtgtctgaaatacgccgtcattctgccactggccacaatggccctgatggctctgtttgttttatggaaggacaacaccacaccaggaaaattactggttcaggaaattgacttcgtaagacaaacagcccctgccgggcagtttcctgtaagagaatgtttgccttctctgcatgatcttccaggagcagaagagaaaatctgccgttaccgtgctgctgatgctgcagattatgtcagggagactgaccggtcactgatgcaactggtcaccgcattctgggcaacgctggcacttatgtatatgtcgtttgcggcaggcaccgggaaatatccggtgcgacccggaaaaatgaaatgtgtccgtgtggcaacagcagatgagcgtctgaaggaagttcttgcagaagacacttccctgccgggaaaaatcagggaatgccatgtttatttccccgatgacagaacaatcagaaacaacggagaaaaatgaaaatgcgtaatattaatgttattacagccctttctgtgccgggtaaaaccgtgtcagatgattttatgcatgctgttctcagtaactgcaccacaagaatcgtccttcctgcaccgaaggaattcagttctgaatcattgccgcacaattttaatatggctgctgtcggtgtgatgaaggagggaatgtcgatgcgtttattttcttctccggggcatattgtggttgccggacaatccggtggcggaaaatctgttccggtgaaagaactaatcgacagaattattcagaaatataaggaacccattcgatgaataagctggtttctgatggcagcgtcaaaaaaataaattatccggtgctgtatgagtccggaataacacctccgttatgtgaagtcagtgcaccagagcctgatgcgggtgggaaacgcattgtggcatatgtttataaatcatcacggaatacggtttttgaaaatcctgacattgtaaaaacctgtacggtcagggatttgaagaatgattttgtgaactgcgatgagaaaggtgagggacaatgaaacagatttctttatttattcctctgctggggaccttattactttccggctgtgccggaaccagtacggaatttgagtgtaacgccaccacatccgatacctgtatgacgatggagcaggccaatgagaaggccaaaaaactggagcagtcctcagaagcaaagccggttgcggcatcactgccgcgcctggctgaagggaacttccggacaatgccggtgcagaccgtcaccgcgaccactccgtccggcagcagacctgcggtgacagcacatccggagcagaaactgctggcacctcgcccgctgtttaccgctgcccgggaagtgaaaacggttgttccggtcagttcagttacgccggtaacaccacctcgtccgctaagaacgggtgagcagacggcagcattatggatagcgccttatattgataaccaggatgtttatcatcagccatccagcgtgttttttgttattaaaccgtctgcgtggggaaaaccacgtattaattaactggccctgaagttgtatatcagccggcaatgccggcgggctttctgtattcaaaatctgcctgtaaaacgagtgccctgtgcgtgaaaagggatgggcggtagcgtgtcagaacatgtcgggaggaatattccgtgagtgatgaagccgatgaagcatattcagtgacagaacaactgaccatgacaggaataaaccggatacgccagaaaataaatgctcatggtattcctgtttatctctgtgaagcatgcggaaatcctgttccggaagcccggcggaaaatatttcccggtgtgacgttgtgcgttgaatgtcaggcgtatcaggaaagacagagaaaacattatgcataagtcagtcgcagaacatagtgatttaactccggatgaacatgagtggatattcagaaaacagaaatctttgtatatgcgccgggaaatggcgcgttaattacaggtattcccttcatggctaccgcatttctcgctttatttttcaactaaggaattcatgtgaataacccacttgaggccgtcactcaggcggttaactccctcgtcacagcactgaaactgcctgacgaatccgcaaaggccaatgaagttctgggcgaaatgagcttcccgcagttcagtcgtctgctgccgtaccgtgattacaaccaggaatccggtctgttcatgaatgacaccacgatgggctttatgctggaagccattcccatcaatggggcgaatgagtccattgtggaggccctcgatcacatgctgcgcaccaaactgccgcgcggggtgccgttctgcatccatctgatgtccagtcagctggttggtgacaggattgaatacgggctgcgtgagttctcctggtcgggtgaacaggctgaacggtttaacgccattacccgtgcctattatatgaacgcggcagcgacacagtttccgctgccggaggggattaatctgcccctgaccctgcgccattaccgggtattcttctcgtactgttctccctcgaagaaaaaaagccgggctgatattctggaaatggaaaacctggtgaaaatcatccgggcgtcgttacagggggccagtatcaccacacaggcggtggatgcacaggcctttatcgatattgtcggggagatgattaaccataacccggactccctgtacccgaaaagacgtcagctggacccgtattctgatctgaattatcagtgtgtggaggacagttttgacctgaaagtccgggcggattacctgacgctgggcctgcgtgagaacggcaggaacagcacggcccgcatcctgaatttccatctggcccgtaacccggaaatcgccttcctgtggaacgtggccgacaactacagcaacctgctgaacccggaactgtccatctcctgtccgttcatcctgacgctgactctggtggtggaagaccaggtgaaaacccacagcgaagccaacctgaagtacatggacctggagaaaaagtcgaaaacctcctatgccaaatggtttccctccgtggagaaagaggcgaaggagtggggggaactgcgtcagcggctgggctccggtcagtcttctgtcgtgtcctacttcctcaacatcacagccttctgcaaggacaataatgaaacggcactggaagtggagcaggacatcctgaacagcttccgtaaaaacggttttgagctgatttcaccgcgctttaatcacatgcgcaatttcctgacctgcctgccctttatggccgggaaagggctgtttaaacagctgaaagaggccggtgtggttcagcgcgcagagagctttaatgttgccaacctgatgccgttagtggcggataaccccctgacaccggcaggtctgctggcacccacctaccgtaaccagctggcgtttatcgatattttcttccgggggatgaataacaccaactacaacatggcggtctgtggcacctccggggccggtaaaaccggactgatacagccccttatccgcagcgtgctggactccgggggctttgccgtggtgtttgacatgggggatggatataagtccctgtgtgagaacatgggcggggtgtatctggacggtgaaaccctgcgttttaacccgtttgcgaacatcaccgatattgaccagtcagcggagcgtgtccgtgaccagttgtcggtgatggccagccccaacggtaacctggatgaagtgcatgaaggtctgctgctgcaggcggtcagggcctcctggctggctaaaaagaacagggcgcgcatcgatgatgtggtggatttcctgaaaaacgcccgtgataacgaccagtatgtcgagtcaccgaccatccgcagccgtctggatgaaatgattgtgctgcttgaccagtacactgctaacggcacttatggccagtatttcaactccgatgagccgtccctgcgggatgatgcgaaaatggtggtgctggagctgggcggactggaagaccgtccgtccctgctggttgcggtgatgttcagccttatcatttacattgagaaccggatgtaccgcacgccgcgtaacctcaagaaactgaacgtcattgatgaaggctggcgtctgctggacttcaaaaatcacaaggtcggtgaatttattgagaaaggctaccgtaccgcccgccgtcataccggtgcctatatcaccatcacacagaacatcgtcgactttgactctgacaaggcctccagtgcggcccgtgcagcatggggtaactcctcctacaaaattatcctcaaacagagtgcgaaggagttcgcgaaatacaaccagctgtatccggaccagttcctgccactgcagcgtgacatgattggtaagttcggtgcggccaaagatcagtggttcagttccttcctgctgcaggtggaaaaccattcctcctggcaccgcctgtttgtggacccgttaagccgcgccatgtacagctctgacggcccggattttgagtttgtgcagcagaagcgtaaagaggggctgagtattcatgaggcggtgtggcagctggcgtggaagaagtcagggccggagatggcttcgctggaagcctggctggaagaacatgagaaatacaggagtgttgcatgaccacaacgcaaaaaacgactgacgttacagcccgtcgacgcagccactggtggtggacggtgccgggatgcctggcaatggtgttactgaacgcagccatcagttacggcattgtcagactgaacgcaccggtgactgccgccttcaacatgaaacagaccgtggatgcgttttttgacagcgccagtcagaaacaactgtcagaagcacagtcaaaagccctttcagcgcgttttaacacggcactggaagccagcctgcaggcatggcagcagaaacaccacgcggtcattctggtgtcgcctgccgtggtacagggggctccggatatcacccgggaaatccagcaggatattgcccggcgaatgagggcggaaccatgagatgccgggggctgattgccctgctggtatgggggcagagtgtggccgccgccgatcttggcacctggggcgatctgtggccggtaaaggagccggacatgctgacggtgatcatgcagcgcctgacggcactggagcagtccggtgagatgggccggaaaatggatgcctttaaggagcgggtgatccgcaacagtctgcggccccctgccgtgcccggtatcggacgcacggagaaatacagcagccggttgtttgacccgtccgtcagactggcggcggatatccgggataacgaagggcgggtgtttgcccgtcagggtgaagtgatgaatccgctgcagtatgtgccttttaaccagacgctgtatttcatcaatggcgatgatccggcgcaggtggcctggatgaaacgccagacgccgcccacactggagagcaaaattatcctcgtgcagggcagtatcccggagatgcagaagtctctggacagccgtgtttactttgaccagaacggtgtgctctgccagcgcctcggcattgatcaggtcccggcacgggtgagcgccgttcccggcgatcgcttcctgaaggtggaatttattccggcagaggagggcagaaaatgaagcgaagcctgtggctgctgatgttattccttctcgccggtcatgtccctgcagcgtctgcggattctgcctgtgaggggcgttttgtaaacccgatcacggatatctgctggagctgtattttcccgctctcgctgggcagtatcaaagtcagtcagggtaaggtccccgacacggcgaacccgtcgatgcccattcagatttgtccggcaccgccgccgctgttcaggcgtatcgggctggccattggttactgggagccgatggcgctgacggacgtcacccgatcaccgggatgcatggttaacctgggcttcagcctgccggcttttggtaaaacggcacagggaacggcgaaaaaggatgagaagcaggtgaacggggcgttctatcacgttcactggtacaaatacccgctgacgtactggcttaacatcatcacatcgctgggctgtctggaaggtggtgacctggatatcgcttatctttctgaaatcgaccccacctggacggacagcagcctgaccaccattctcaatccggaagctgtcatctttgccaatccgatagcacagggggcctgtgcagcagatgccattgccagcgcctttaatatgcctctcgatgttctgttctggtgtgccggttcgcagggcagtatgtacccgttcaatggctgggtgagtaatgagtccagtccgttgcagtcctccctgctggtcagtgaacgcatggcgttcaagctgcaccgtcagggcatgattatggaaaccatcgggaaaaataacgccgtctgtaatgaatatccgtccccaatcctgcccaaagaacgctggcgttaccagatggtgaatatgtacccggacagcggacagtgccatccgttcgggcgcagtgtgacccgctgggaaaccgggaaaaatccgcccaatacaaagaaaaacttcggctacctgatgtggcgtaaacgtaactgtgtcttcctgtaaatctactaattctgaaggattttttatgtataaacaggcaacagaattaatgctgaactttaaagaccgcattctgattaagggggaagaagataccggcaagtcaactctcctgactgaaataagaatcagtgatagtgattcccggtattacaactttaaaactcttaactctgcggggtacaaccggctttgtgatgaaaatattgataattttgattttctgaatacacctgaaaagacgttaatccttgatggagtcaggctgtgtgaaaagaaaatgacatcaaaagttatcaggttaattaaacaggccagaaaatatcataaacgcctggttgtggttgcagactcatgtgagtctgagtttatcgaactgttgtttgatggtgttattgcattgtccttcaattctgacagagaaaggagttgcaatgtttatacgccatcaaggcatcgtaatacagataatatttatgctaggtaaatgtgtaaacaaaaaaagaggagggtgtaatgagtaataatataaaatatggctccagaatacttgatatgggtgttctgctggagatgaaagcgcttgtgaatgcaaatggtggtgtgtcacggtgcattatggagtgtcggcagcttgcctgtgaggtccgtcattcgcaacaattactggataagctgtcatgtattgacgactggttgtgccggttttcctcaataatgtatcaccgttttgataaagaacagattcagtggcgggaggatgtggacagggattatcccagagaaaaagtttatattttcagtcccgataatgtttccgtccataataatgatattaaagactctgccaataacacatcaggaataaccgtgtcgattacagccagtaaaatatgcgcaggtcagaaagagtttgatgcttttttaaaactggcagaaaaattgagagaaaaccctacgggtaattaaattgtaacaatgccatcaggatatatcatgaactggaaaacatttgcgctttttgccctgactgcaggaatgcatatcactgttcatgcctcagacaatgtgaacactcctgaaaaccgccagttcctgaagcagcaggaaaatttaagcagacaactgcgtgaaaaacctgaccatcagctgaaggcctgggcggagaaacaggtgctggagaacccccttcagcgttcagataaccatttcctggatgagctggttcgtaaacagcaggcttcgcaggacgggaaaccccggcagggggccctgtattttgtgtcgttttccattcccgaagaggggctgaaacggatgctgggcgaaacccggcactatggtatacccgccacactgcggggcatggtgaacaatgacctgaagaccaccgctgaagccgtgctgtccctggtgaaagacggcgcgactgatggtgttcagatcgacccgacgctgttttcacagtacggcattcgcagtgtaccggcactggtggtgttctgcagtcagggatacgacatcatccggggaaacctgcgggtcggccaggcgctggagaaagtggccgccacgggtgactgccggcaggtggctcatgatttactggcagggaaaggagattccgggaaatgaaacgtattttacctctgatactggctctggttgccggcatggcactggctgacagcaacagtgattaccgggccggctctgattttgctcaccagatcaaaggacagggaagcagcagtattcagggctttaagccacaggagagtatccccggctataacgcgaatccggacgagacaaaatactacggtggcgtgactgccggcggggatggcggcctgaaaaatgacggcaccacggaatgggcgaccggtgaaaccggaaaaaccatcacagagtcattcatgaacaagccgaaagacattctttcaccggatgcaccgtttatccagaccggcagggatgtggtgaaccgggctgacagcattgtgggaaacaccgggcagcagtgcagtgcgcaggaaattagccggagtgaatacacgaattacacctgtgagcgggatttacaggtggagcagtactgcacacgaactgcccgtatggagctgcaggggagtaccacatgggaaacccggacgctggagtatgaaatgagtcagctacctgcacgtgaagtgaatggtcagtatgttgtctccattacctctcccgttaccggtgaaattgtcgatgcgcattacagctggagtcgtacttacctgcagaagagtgtacctatgacaattacagtactgggaaccccactgagctggaatgccaaatactcagcagatgcctcatttacaccagtacagaaaacactgactgccggtgttgcttttacgtcatctcaccccgtccgggtcgggaatacaaaattcagacgtcatacggcaatgaagctgcgtctggttgtcagggtaaaaaaagcctcgtacaccccgtatgttgtctggtctgaaagctgcccgttcagcaaggagctggggaaactgacaaaaacagaatgtacggaggctggcgggaacaggacgctggtgaaagacggtcagtcatacagcatgtaccagagctgctgggcataccgggacacgtatgtcacacagtcagcagacaagggaacctgtcagacctacaccgacaatcctgcctgtaccctggtgtcacaccagtgcgccttttactccgaagaaggtgcctgtctgcatgaatatgccacgtactcctgtgagtcaaaaacatccgggaaagtgatggtctgtgggggagacgtcttctgtctcgatggcgaatgcgataaggctcagagcgggcagagtaatgattttgccgaagccgtttctcagctggcggcactggccgcagcaggtaaggatgttgcggcgctgaacggggtggatgtccgtgctttcaccggtcaggcgaaattttgtaagaaggctgcagccggatacagcaactgctgtaaggacagcggctggggacaggatatcgggctggccaaatgcagcagtgatgaaaaagccctggctaaagcaaaatcaaacaaactgaccgtcagtgtcggagagttctgttcgaagaaagtgctgggtgtctgcctggagaaaaaacgcagttactgtcagtttgattcgaagctggcgcagatagtccagcagcaggggcgcaacggacagctgcgtatcagttttggcagtgcgaagcatcctgactgtcgggggattacggttgatgagctgcagaaaattcagttcgacagactggatttcaccaacttctacgaagacctgatgaataaccagaaaatcccggacagtggtgttctgacgcagaaagtgaaagagcagattgctgaccagctgaaacaggcaggacagtaaggtagggaaaataaccggggaaaatgatgaaagtcatattcacgtcgaaccgttttattgattttcttatccggcttttgattacagcgattgtcatttccccggtaattatctggtcgtgggatacggtaaaagaaaccactgcaggtgagatacttgctgctgctttcgttattttttactccggtgtgctcctgtttattctgtatttttgtttttctgccctgactgacctgcagaaacctgatgaaagaaaaagtgatgaaaggaatgaagatgaataaagcattactgccactgttactctgctgctttatttttccggcgtcaggaaaagatgcaggctggcagtggtataacgagaaaataaatccgaaggaaaaagaaaataaaccagtacctgcagccccccgtcaggagccggacattatgcagaaactggccgcactgcagacggcaacaaagcgggcgctgtacgaagctattctgtatcccggcgtggataattttgtgaaatatttccggctgcagaattactggactcagcaggccgggcttttcaccatgagcgccaaaaaagccatgctggcgcatcccgaactggactataacctgcagtacagccattacaacggcacggtccggaaccagctggcggcagaccaggcgcagcagcgacaggccattgcgaaactggctgaacactacggcatcatgttcttttaccgggggcaggaccccatcgacgggcagctggcgcaggtcattaatggcttcagggatacctatggtctgagtgttattcccgtttccgtggatggcgtgattaatccgctgttgccggattcccggactgaccaggggcaggcgcagcgcctcggcgtgaaatatttcccggccatgatgctggttgacccgaaacagggcagtgttcgtccgttatcatacggttttatttcgcaggacgacctggcaaaacagttcctgaacgtttctgaagattttaaaccgaacttctgaattacggatattttccgttcgtcagtaaattccattaattctgaacctggtaataattcaccatttattccggtagtcccttatttaattctctgtatgacaggagagttttactgtgcataaatataaattctctttaccccggcttgatattacgggaatgtgggtattttccctgggggtctggtttcatatcgtcgcccgtcttgtttacagcaaaccctggatggctttttttctggcggagttgattgcggccatccttgtgctgttcggcgcataccaggtgctggatgcatggattgcccgtgtcagccgggaagagcgtgaggcactggaagccaggcaacaggccatgatggcagagcagcaggagggcggacatgtctctcactaaattactgccggtcattttgttgatgatggccacaggtgtgcaggcctccacccgggatgaaattgaacgactctggaatccgcagggtatggccgcgcagcctgcacaaccggcagcagacacatcagccaggacagaaaagccggctccccgctggttccgcctcagcaacggcaggcaggttaacctggccgactggaaggtggtgctgtttatgcaggggcattgcccttactgccaccagtttgacccggtactgaagcagctggcacagcagtacggcttttccgtttttccctacaccctggatggtcagggggataccgcctttccggaagcattaccggtgccaccggacgtgatgcagaccttcttcccgaatatcccggtggccacaccgaccaccttcctggtcaacgtcaacacgcttgaggcattaccgcttttacagggggcaacggatgccgccggttttatggcgcggatggataccgttctgcagatgtacggaggaaaaaaaggtgcgaaataagcaggtggtgttactcattgccggaatatccggcatcgcgacgggaataatcgtcagcctgaatatcccctttatccgtcaggggcttttttatcccgccagccctgtagaaattgtcgtttcgctgtgccttaccttttctgtttctgttgtgttttttgtgggggcaattgtgggatggattttggtgtctgaaatatattacagccgcatgaccggtctgaatgaatcatcagtaatatcagaggaaacttataatgacagcaaacaaaaagaatcaggaattcaaaatcagaaaaattagacggaatattgagtatagtttcagggattctgacagatattttgatttgtttattgttttccttgttgccggaattgttttatgggcagttatgcacgttattttcgatgtctgtattgattcatggatggccgacccgaaattacttaatttccagtatatgtggaatgttctgatgaaagtcattccgtttacgttatgggcgctggcagcagggtttcttgttacattttttctgtccccaatgtgcgaattaatattcggaaatatcatgatattcctgctgaaacgccgtatgcgccgggagaacacattaagggagggcagcaataatgcttcgcattaagcctctttttattctttgtgccgccttactgacggtgacgcctgcagcgtcagcggatgtgaaca

SEQ ID NO: 62 - DNA, 42233 bp, Escherichia coli
  source 1..42233: mol_type = genomic DNA
gaaggaatacggactgaattacgagaagcgccataccaaacaggggatacagaccaacctgacgctgaaagaggaaagctacggcgactggctgccaaaatgtgacgaccctgcaacaacctgaccctcatgactcatctgaccggcatctgccggtctttttttatccctgaattccccgaaggtgaacaatccactgttcacccttcaccgtgtattcacccgttatcacactgaaattaaaagagaaaaatgaaaggtgaacagtgtgaacaatcaaatcaaaaaaaaacttttttctccctgtgtgatttcagtacgggggattaatcaccggtatgagtcacaccggcagaatgccggaggtgaagaatcgaatgttcacccttcacccattattcaccacctatcatactgaaataaaaggataaaaaagaaaggtgaacagtgtgaacagttctttcgaaaaaaaatttttttcctgagttaacatgcgtgaagatacgtgtaaaaattaatcgatagatattatatgtataaggatgtgtataaatgaattataatagaagaatataaacgatttgaatcaaatggttatatggcaattttgactcctgtgatcttccgccaaaatgcctctcctgacgttctccaaccccttgtaatactgtcaatccagatattttctactgctcaatattcaatcggcttcaggaatacctggtctaaggttttgtgatggacgatgagcggctgaagaatccgcctgtcggttcttctgtcctcgaacgcatccgcgatatgcgcgccagcatgtgccgtgtttatttgcaggtgatttgccccctgctggctctcagccaactgtatcgccattaaggtgaagatgttgttttactcgccccagaacacccttttttatacgactattctatttctttaaccgctggcgaaaaaaactgactataaacttcaccaataatcagactgccatcaagattaatttgttcatttaatatatcaaatcaacttgttttatttttactatcaaaaatagctcattgccttactataattaatatataaattcggtaattaattcttaacatgcttttactaataatctcaattgctggccctataatattgcgctagcattgctttctggttgtatcagcgatactcaaaaattcttaatacaatactcattcgactggtacttatttgtaactcagttatattttttcgcccggtgattcagaagaatgcaaaaaacggctaccactccatcaaaaatacttgatctcactgccgcggcatttttacttgtcgcctttctgacgggtattgcgggcgctcttcagactcctaccctaagtatattcctcgcagatgaactgaaagcccgtcctataatggtaggttttttcttcaccggtagcgctattatgggaattctggtcagtcaatttctggcaaggcactccgataaacaaggcgaccgtaaattactgattctgctatgttgcttatttggagtgctggcctgcacgctttttgcgtggaatcgcaactacttcattctcctctcaacgggcgtacttctgagtagttttgcttccaccgcaaacccgcaaatgttcgccctcgcccgtgaacacgccgacagaacaggccgtgagacggtcatgttcagtacatttttacgtgctcagatctcgcttgcctgggttatcgggccaccgctcgcttatgaactggcaatgggatttagttttaaagtgatgtatctcaccgcagccatcgcatttgttgtttgcggactgatagtctggttgtttttgccatcaatacaaagaaatattcctgtcgttacccaacccgtagaaattttaccctccacccacaggaagcgggatacgcggctactttttgtggtctgttcaatgatgtgggcggcgaataatctctacatgataaatatgccgctatttattattgatgaactgcatctaaccgataaactggctggagaaatgattggtatcgctgccggtctggaaattccgatgatgttaatcgcaggctattacatgaaacgtattggcaagcgactattaatgctcattgctatcgtgagtggaatgtgtttttacgccagcgtactcatggcgacgactccggcggttgagctggaattgcaaattcttaatgccatcttccttggtattctctgtggtatcggcatgctttattttcaggacttgatgcctgaaaaaataggctctgcgacaacgttatatgcaaatacttcacgcgtcggctggattatcgccggctctgttgacggaattatggttgaaatctggagctaccatgcgttgttctggctggcgatagggatgttgggtattgcgatgatttgcctgctgtttattaaagatatttagctcaccagtctgggctaagaaaaatcggcgtggcgcaaacagagccatcctcgccatttttgctatcatgcctgcatacataaacgacaaaacagtatgcagagggaaaaatgggttccaccagaaaggggatgctgaacgttctgattgccgccgtgttgtggggaagttcaggggtctgcgcgcaatacatcatggagcaaagccagatgtcgtcgcagtttttgactatgacgcgtttgatattcgccggtttgattctactgacgctgtcatttgttcatggcgataaaatcttttctattattaacaatcataaagatgccattagcctgctgattttttccgtggttggcgcgctaactgtacagctcacttttttgctaaccatcgaaaaatcgaacgcagccacggcaacggtgctgcaattcctctcaccgacgattatcgtcgcctggttctcactggtgcgtaaatcgcgcccgggcattctggttttctgcgctattttgacatcgctggtcgggacttttttattggtgacacacggtaatccgacgtcattatcgatctctcctgccgcgttgttctggggcattgcctcggcatttgctgctgcattctataccacctatccctcaacgctaattgcccgctatggcacgttaccagtcgtcggctggagtatgctgattggcggtctgattctgttgcctttttatgccagacaaggaacaaactttgtcgttaacggcagtttgattctggcgtttttttatttggtggtcattggtacgtccctgacatttagtctgtacctgaaaggagcacaattaattggcggtccaaaagccagcattttgagctgtgcagaaccattaagtagcgcgctactctctttgctgttgctggggatcacgttcacattaccggactggctgggaacgctgctgattctgtcatcggtgattttgatttcaatggattcccgtcgccgcgccagaaaaataaatcgtccggcgcggcatgagtgagaattaccagccaggcaccgcgccaccgttaaaaatggtttctgccgctttagcgacttcgggtgattgataagattgcagaaattccttcacgttttctgcattcttattatcttcccgtgccaccaaaatattcacatacggcgaattcttatcttcaataaatacgctgtcgtgcaccggagaaagccctgtctgctgaatgtaagtggtgctgataatcgctacatcaactttgggatcatccagtacgcgcgggagctgcgccccctcgagttccataatctgcaaatgacgaggattatcggttatatccagcgcggtaggtaataacccttttccctctttcagagtaattagcttctctttttgcaacagtaaaagtgcgcgaccaaggttggtcgggtcgttggggatcgccactgtcgcgccttcttttatttgcgccacggttttgatttttttggaataacccgccatagggaagacaaacgtatttcccaccgctaccagtttataaccatgcgcctgattatcttgttcaagaaagggtcgatgctggaagacattcgcatcaagttcgccatgatttgtcgcatcgttcggtagcaacgaaccgctaaatcctaccagttcaacatcgaggccatatttctcttttgccacctttttagcgacttccgcgacatcttgttctgcgccatttataacgccaactttaatgtgttttgcatcgctgctactctggtcgcaacctgccagcagaattccggccagcaataatgcggcccctgtccgtagatgatgtgttgtcagtttcatttttttatccttttattaatgattacctgactatagcggtaaggtcgctgcggtttaaaaaacgaaacgctatcgataagaataaaaaggaataaaagtggaatataaagtctggcacttcttactgaccacgcaagcgcgtttcgtacagcatgatgagagcgatgaaagcaaactacacttatgcttcattcgatacacatttgtaaaaggttgaatccatgaaaccaacgacactactgcttattttcacttttttcgctatgccaggcatcgtatacgccgagtcgccttttagctcactgcagtccgcaaaagagaaaaccacggtattacaagatttacgtaaaatttgcacgccacaggcgtcattatcagatgaagcgtgggaaaagttaatgttgtcagatgaaaacaataaacaacatatacgcgaggccatcgtggcgatggaacgtaataatcagagcaattattgggaagcgttgggtaaggtagaatgcccggatatgtaagaacagcaacaactactgaccaacgcttctttacctgatatcaggatttcttcattttcacctttgcagtaaccaacaatgcagtcagcaacatcaatgtgccggacaacatcaacggcgaagtcagaccaatattatccagcgcataaccgccgattgccgcgccacaggtattagcaagctgaataaccgccacctgaatagacccggctttttctgcctgatcggccagcgagcgggtgatccacgttgaccagccgacgggaaccaatgcaaaagttagcccccagataatcgccacgccggtagcaacgattttatcgcttccccacaacgtcagcaccaacgcactcacagccagtattaacggcgcgcctgctaaggccagttttaccgaacgtttaagaatgaatgacgaaagcgacgtaccgataaagctggcaatgccaaaactcaacagcaccagcgttaagccatccacgccgaatcccgccaggttcatatacaccgggcgaatatatgtgaagaaagcaaactgcccggcgaaagacatgaagatggcgatcatccctgccatcacacccggacgttgtaataagcggaaagtattttgtttctgatgcgagggttcgcctggcagtgaaggcaatgatttgataatccagaaaatacacagcacgcccatcaccgccgccgcattaaagacattgcgccaaccgataagctcgcctaaaaaactgcccaacggcgcggcaatcaccagcgcaatagaaaccgcgccgaagatcaccgacagcgccttcggcaccgtacgcggcggcaccagacgcatggtcagcgacgccgacatcgcccagaacccgcccagcgccagccccagacaggcacgaccgattaaaagcaaactgaatgagttagcaaaggaaaccagcaagcaggagagcgtcagcaaaacggcaaacaaaataacaacgtagcggcggtcagtagcctgaattgtctgggtaataaacaaactggcaaacattgccacaaaggcggtcacggtcaccgattgcccggcaaccccttccgaaatgcctaaatcctgggccataggcgtcaacaaactgacgggcaaaaactcaacgataatcagacaggcgacacaaaacgccaccgagaaaacggctgaccagttcggtcgggtgatggcatccgcgccgcggttttcggcaataaattcactcatggtgttacccgtggcatgtttcaggggaaaagccgaccactttaacattgaaatgtgtgacgcatttaacgtttttgcaacttttacggtgttgcttgagctggagttaagatcgaaacggaacagggcaaagattaccggatgcggcgtgaacgtcttatccacccgacaggtcaggcgcggtctgtaggctgataagacgaaacggtttcaatgcaaccagtgaacgccctcggcaggctgaaagaacgcgttatagcgcatctgaaaagcattaatatcctgcatttcaggttcggtttcgcgcagaaaacctagcgccagcctgacctgagcgtcggtaatcggcgcggcgaggcgagctttttgtaaaatccgatgccattgcagcaggttctgttcgctaccatcgacaatgacaatttgccagatgagcaacacctgcgcggcgttttgcaggtgcgactcatccggacgatgcaaataacgtaaaaattcgtcaccagctgactttcccatttgatcgaccatcgactccacgggtacgacatcgatgttcagccgatcgctgagacggcgaatcgcttttctggccccggatgtcagcacccgaaaaccaaccacaaacactaccgccagcgtggcgagcattatccagatcatgagttctcctgcgtaatcagaactcatgatatctggaaaccctcgccagttactaatccaccagaataatcttcagtgcaaacagagctgcgaccaccaccacacacaggttcagatcgcgccagcgcccggtgcatactttcatgatgcagtacgacataaagccgagtgcaatcccttcggtgatcgagaaagtaaagggcatcatcaccgtggtaataaacgcaggcaccgattcggtaaaatcatcccagttaacgcgcgccaggctcgaagtcatcagcacgccaacaaagattaacgctccggcggttgcgtaaggaggaaccatcgccaccagcggtgagaagaacataactaacaggaacataacgccaaccacaaccgcagtcagccccgtgcgaccaccgactgccacaccagaagtactttcaatataggcagtaacagacgaggtgccgataaacgcccccgccaccgaactgacgctatcaacatacagcgccttattcatattggggaatttaccgttactatctattaagcccgctttatcagttacaccaattaatgttcctgatgaatcaaataggttgatcagcataaaggagaaaatgataccggcgagttcaagtgttaacgcgccgctcaaatctacttcaccaatgacgccgctaatatcaggcggaatggaatagacgccgctaaaatgaacatcaccgaaaaataatccacagcaagacgtcaccacaatagaaaccagcaccgcggcatgaaaatgacgtgatgacaacacggttataataaaaaaccctaaaatacctaacaacacgccgtgagaacttaaatcgccaatcatcaccagcgtgtctttattggcgacaataacgccagtattttttaatcccattaaggcgataaataatccaattccgctggtgataccaatacgtaaacttaagggaatgttggagatcatccagtaccggatacgaaacagcgtgagcaaaaatagtccaactgcgccccagaatattgcgcccatcccggtctgccaggagatgcccatcgcccccacgaccacgaaggcaaagaaggcgttcagccccattgccggagccagtgccacgggtaagttagcaaatatccccatcgcaatactgccgataccggcaatcaaacaggtggtaacaaacaccactttcgggtccatttgtgccgcgccgaggatttgcgggttcacaaaaacgatgtacaccatggttaaaaaagtggtcatccccgcaatcaattctgtgcggacggtggtcccatgctgaggtagtttaaataatcgcgaaagcgtccctgattcattactcacgtaatcggtattgtcattattcatttttttgtccattggaggagatttaatcccttgcttttgtaaaacaaatgacaacaacggttcagtgataattatcacatttcaattgcacattaatggatattctttaataatctcgcgacgtttctttatgataaataataatcaaattgataaaatcaaaatgagaaaaatatgaataattctattaaccataaatttcatcacattagccgggctgaataccaggaattgttagccgtttcccgtggcgacgctgttgccgattatattattgataatgtctctattctcgacctgatcaatggcggagaaatttccggcccaattgtgattaaaggacgttacattgccggtgttggcgcagaatacgctgatgctccggctttgcagcggattgatgctcgcggcgcaacggcggtgccagggtttattgatgctcacctgcatattgaatccagcatgatgacgccggtcacttttgaaaccgctaccctgccgcgcggcctgacgaccgttatttgcgaccctcatgaaatcgtcaacgtgatgggagaagccggattcgcctggtttgcccgctgtgccgaacaggcaaggcaaaaccagtacttacaggtcagctcttgcgtacccgccctggaaggctgcgatgttaacggtgccagttttacccttgaacagatgctcgcctggcgggaccatccgcaggttaccggccttgcagaaatgatggactaccctggcgtaattagcgggcagaatgcgctgctcgataaactggatgcatttcgccacctgacgctggacggtcactgcccgggtttgggtggtaaagaacttaacgcctatattactgcgggtattgaaaactgccacgaaagttatcagctggaagaaggacgccggaaattacaactcggcatgtcgttgatgatccgcgaagggtccgctgcccgcaatctcaacgcgctggcaccgttgatcaacgaatttaacagcccgcaatgcatgctctgtaccgatgaccgtaacccgtgggagatcgcccatgaaggacacatcgatgccttaattcgccgcctgatcgaacaacacaatgtgccgctgcatgtggcatatcgcgtcgccagctggtcgacggcgcgccactttggtctgaatcacctcggcttactggcacccggcaagcaggccgatatcgtcctgttgagcgatgcgcgtaaggtcacggtgcagcaggtactggtgaaaggcgagccgattgatgcgcaaaccttacaggcggaagagtcggcgagactggcacaatccgctccgccatatggcaacaccattgcccgccagccagtttccgccagcgactttgccctgcaatttacgcccggaaaacgctatcgggtcattgacgtcatccataacgaattgattacgcactcccactccagcgtctacagcgaaaatggttttgatcgcgatgatgtgagctttattgccgtacttgagcgttacgggcaacggctggctccggcttgtggtttgcttggcggctttggactgaatgaaggtgcgctggctgcgacggtcagccatgacagccataatattgtggtgatcggtcgcagtgccgaagagatggcgctggcggtcaatcaggtgattcaggatggcggcgggctgtgcgtggtacgtaacggccaggtccaaagtcatctgccgttgcccattgccggcctgatgagcaccgacacggcgcagttgctggcggaacaaattgacgccttgaaagccgccgcccgtgaatgcggtccgttacccgatgagccgtttattcagatggcgtttctttctctgccagtgatccccgcgctaaaactaaccagtcaggggctatttgatggcgagaagtttgccttcactacgctggaagtcacggaataataaaaaagcccggcgtcatgccgggcaaaagtcaccagttacgtttatgccactgtcaactgctgaatttttttctcgcggcggattttgcgttcttccatcaccgccactatcgccatcaggcagatacaaccaatcgcggcgatatcaagtgcggcgaaggtgcctgcccagccggtaaggccgaataccggcgtcccatcggcaatcattcccagacctaacttggcaaagctgtcaccaatcaggtaagcaaaggtgcctttaataccatcggcagcgccaatcgcttttttaggtacaaagccaacagcagccacaccaatcaacaattgcgggccaaagaccaggaaacccaacgcaaagagagaagccagatagatatattcgttgctggcatgttgatacacaccgagcgtggcgataatcagcgccagcgcgatgcaggccaccaggccacggcgaccgttcgccaggtcagagagccagccccacagcagcgtaccgaccagcgcaccagcttcaaacagcgtaaagccctgaatcgccaccgctttagagagtttcagttcctggaacgcgtatacggttgaccactggtcgataccaatacgtaccacatagaggaaaatgttggcgaagcacagcagccagatcactttgtttttcagcacatactcaacaaagatctgccacttggtcatatcggtagattctgtctctttgtcctcttcgctgatctcctcgccgaacagttcttcagctttgccgaggccataagattccggggagtcgctgccgtaacgcaggccgataaaaccgacaatcagcgcgataatcgacgggaagataaacatgccgatgacatggccatcgaacaggtaatttgccccgaacagcgccacacctgctgcgcctgcaccgccaaggttgtgagaaatattccagaaaccgaggaatgtcccgcgtttacgacgcggcgtccatttggtgatggtggagtaactgcacgaaccgccggtactctggaaaaagccgcttaaggcgtagaaggcaatcatcaggaacaggctaaccgagccgctgcccatactggcactgaagcccagcatacaaatggcagacaggatcagcatgaacggcaggaattgtttggtgtttttgccgtcggcgtagtaggaaaccagcgttttacccacgccataagtgatggagaaacccaggccgatcatccccagctgcgtcatgctcaacccgtaggtcgagatcatgtcgttctgcgcgatgttaaagttcttgcgaatcaggtacatcgtcaggtagccgataaagaccaccaggtaggattgcatgaacggtttgaaccacattttgcgccgcacttcgagcggaaggtccagggtcggcttgcgaacctggtttaagaaagccagcatgggttactcctgaaatgaatacctgcgtgaggcatgcattgtaaaaatcagcagcaaatcaggcctgagatagcgtccaggcaaaacctggaaaatttcttagttttgccggatatgaagtgaaaaggtgagatgcatcacgcttcgcgcggtgcctgggcgttcaaaaagggcagtaacagcagtgcggaaatcccggcggcgatagagataaccacaaaaaatccgctccagtgccaggtatcgagtactttcgccagcggccaaccagcaagcgacgcccccagataagcaaacaagccgacaaaccccgtcgccgcccctgccgcctctttgtgggaacactctgccgccgccatgccgattaacatctgcgggccaaagacaaaaaaaccaatggtgaagaagcaggttgcctgcatcacgtagctggcaaatggcatcagccacagcgagccgactgaaagcaaaattccggcggcgaaaatcaaattcatcggcccacggttgccgttaaacaatttgtccgagccccaaccggctaccagcgcaccgataaatccgcccagttcaaacatcgtcactgccgtattcgccgtgaccagatcgacgcccagtgtctcggacatatacaaattgccccagtcgttgatcgccgcccggaccacatagaccagcacatagcaaaacgaaagcagccagatatacggattcagcaacacatatttggtgaggatctctttacgcgtcaaccctgccccttcttgttgttgagcaatttccagcgcgtcgtgtcgccattcaccgaccgccggtaaacctaacgcctgcgggcgatcgcgtagccgccagcagagaaaaatccccacgactatcgccatacaaccagcaatcatcatcccggcacgccagccgtaatgcagcgcagccgctgccatcacaatgggaatgagtgcgccgccgacgttatgcgccgtgttccataatgcccaccaaccgccgcgctcggtacgtgaataccaggccgttaacagacgcgcacacaccggtgaaccccagccctggaaaaaggcgttcagcacccagagcacggcaaacgcccatagcgacgtcgagaagccaaacagaatgttgataatgcccgtggcgataagccctatccccataaaataacgggcatttgagcgatcgctgacaatgccggagacaaacttcgacacgccataggtaatgtaaaacagggtcgctaacaggccgatatcgctacggctgagcacgccgttagcaaggatttctggtacggcggcgttaaaacttttccgcgtgaagtaaaacagcgcataacccagccagatggtcagcagaatatgccgacgccagtagcgatagcgggcatcaatttcatatttatcagtcattaatggcgcatcggcaggcgctttcagaaacggcaacatcatcaaaccttagacatagcgttgaggtagagaaacgctgacacgcgtgccgtgcagacaggaaatgtgtaatgtgccacccagcgccgttacgcgctcgcgcattccggtgaggccaaaaccttgttgcccggaacccggcggcaaaccgctgccatcgtcttcaataaccagcatcaaccgttcatcctgctgccagccttgcagcgtgaccgcgctggcatcagcatgtttcacaatgttgttcagcccttcctggcagacacgaaacagcgtcacgcgctggttttcacttaatgctgattcatcgattcgccattcgagatggctgacaataccgcgcccttccagctccatttcccgcatcagtgagcggatggcctgctccagggtgagatcatccaactggcgcggacgtaaccgacccaacaaacggcgcaccgcgtcgtaaacgcccagcgatagttgttcgatgagctgcccgctctgcttcacgctggcgttatctgccgccagccgctgaacaatgcccgcctgagtacgaatagcagtgatggtctgaccgatatcatcatgcagctcacgcgccacatcacgacgcacgctctcttcggtttccagcaaccgttcagccagatgctgattgcgcgccagttccttttgcagcgactggttaagttcacgcaaccgctggatgccagcgcccagtaacaaccctgtcagactttgcaccagcaacgagagcaataaatccaccggatgatcgcgccaggtttgactggcgatcagcgcgatggcgttcatcaacgtcgcgatcagcgccccttgccaaccgtagtgccaggccagcgcgataatcggcagcgccagacaaaatggcgtaaagcgcgacagttcgtccggcaatcccaactggagccagagactgataacaaacagcagcaagtaccagaccagatgtcgcccgcgccagttgatcggctgagaaaccagtgacgggccgagcggcagccaggtgttattggcgagatagtgccagaacaccagacatatcggggccagcgtcaggccgccagttaaagtcagcaacagcgcattccacgactctttgccgtgccaaagccagggcagcgactgcaacaacgccgccgccgttaacgccgcaccctgtaacagcaaggtgcgccagtcacgctgatggcgatagcgcgagatcagcgccacgggcagtaacgtcagtaaactaccgatcatcaataacggaaaatgggttaaaccgaccgcctgcgttagccagtaaatcagcagccactccgcgcccagcagcaccggccagtatccgcgcgggcattgcagcattagccccagacgcagaccaaacggaaataacagcaccgccatatcagggcgctcaaccaggtgcaggctgatactccacaggcaaaaccatgcggcagagaagataaaaaagcaggcaataacggtaattaagcgggagaacaacgtcttcatcaccagccatcaaacatgcggcgcgccagctctacgtcgttactgacacccagtttttccatcaggttggcgcgatggacgtgcaccgttttcggcgacaagcccagttcggcagcaatctctttcaccgccattccttgcgccagtttttccgccaccagccgttcgcgtttggttagcgggtcctgacgaccggatgccagtttaatggcaatatccggcgtcagataacagccgcccgtggcaaccgtatgcaccgccgcaatcagttcgtcagggctacagcgtttggagagaaagccgcgtgcccccgcgttaagcgcctgctcaaccagcgccggactgtcatgaacagagagcattattgtcgccatacctttcggcagctggcttagcagttccagaccggagatatcgggcatggagatatcgcaaatacacacctgcacaccgcgccccggcagccccgccagcgcctcgcgccccgaaccaaactcggcaactacctgcaaatcaggttccagccccagcagctgcgcaaagccggagcggacgatgaggtgatcgtctataagggcaacggtgatcatggtcttgtcctggcgggtaaaaaaaacgcgcttaccttaacgataagcgcgatgttgttcaagccttgagcggttactgaaaaaacaccgcaatcttgttaaacatagtcggatcggactgattacgctgcactttcaccacatcttccagcttatcgatttggcttatcatctgctccagacgctggtcgtcattgaccagtagccagatatggcttttgtcgctgtcctgaatcggcagacaaagaatgccttcaacgttaaaagcgcggcgggcaaaaaggccacaaacgtgggtcattacgcccggatggttgcgaacggtgagctccagaatcacgttgtcatgagttgtgttttgcatggcttattcccccaccatttcagtattcgccgcacctggcggcaccatcgggtaaactttttcttcggcatcaatgcgcacatggatcagcgccgggccagggcgattgatgatttcctgcaatgcagcctgcggatcggcttcgttattcaaatcacaggtttcgaggccgaatccggcggcaatctgcataaagttgatttttcccggataggtggcggcaaaaacgccttgctcgtagaacagactctgttgctgatgcaccagccccagcgcttcgttgttcatcagaatgattttgacatccagctgattttcactggcggtcgccatctcctgaatattcatcatcaggctgccgtcgccggagaaacacaacactttgcgatccgggttcgccagcgccgcgccaatcgccgcaggcaggccaaaacccatcgtgcccagcccaccggaggtcagccactggcgtgggcgattgagcggataagcttgcgcggtccacatctgatgctgacccacatcggtggtgataatcgcattgtcatcgacacaggcggcaacggcgttgatcaggccgtaatggcttaatggatcgcacgctttcgggattggacacgggaattcgcgctgcaaatccgctaccaactggtgccactctgcacgcggttgcgcttccacctgcgggatcaattgcgccagcacgtcatcaacatccgcctgaatcgccacatgcggctgcttgattttacccagctctgcgcgatcgatatcgacatgaataattttggcattcggacagaactgctcggttttgccaatcgcccggtcatcaaaacgcgcaccgagcactatcaacaaatccgcctcctgcaaaatatagttggtgctgcgcacgccgtgcatccccagcatacccagcgacaacggatgcgcttttggcaacatgcccagcgccattaaagtcatggtggtaggcagttgcgctttctccgccagttcacgcacccgtgcgggcgcattgatcacaccgccgcccagataaagcaccgggcgtttggcagcgttaatcatcgccgctgcgtcacgaatgctttcttcgctaaaggcgggggcggcggctttttctgccatagcgggctgtgtttcaatctcaaaaactgccgtttgcacatccttaggaatgtctatccacaccgggcctgggcggcctgattgcgcaatgcggaaggcatcgctcatgacctgcgggagttcttcgatatgtctgaccagatagttgtgtttggtgatggggatagagatgccgtaggtgtccacttcctggaaggcgtcggtgccgatcatcgaggcgggaacctgaccggtgatgcaaatcagcgggatggagtccagccgcgcatcggcaatggcggtcaccaggttagtcgcacccggtccgctacaggccatacagaccgccggtttaccgtcggtgcgcgccatcccctgagcgataaatcccgcgccctgttcatgacgggccagaatatggcggatttgcgtgctttggcttaaggcatcgtaaacaggcaggatagaaccgcccggaatgcccgtcacaatcttaatgccctgctgttccaggaaatgaacgataaattctgcgccggtaaagcgcttacgcgtcgatgttgtgcccgaacttgccatgctccagtccttttcttctgggccgactttccgggaggtgcttaaacgaaaaaccccgcccggtttgcgccggcggggttttggaatcgtgtgttgttccagtccctacggcgcattgccgacgaccaccaccacacgcacgacgaccactgcggcggatagcgcagttggtagtagttttgcgttgaacatggaagtagtcattggggaccttgttggttttgtgtttaacaatatttatacaagcacagctttacaggggagacaatggaaaatttttcagcaagggaaaattgaggggctgatcacgttttgtactgaattgcagataacaaaaaaccccgccggagcgaggtttcatcagccgcctgcggctggtaaccgcaaagcacactgtattatgtcaacactgaaagtatacgtgttccgcgcagaacgcgcaatttcggcacgaattttgacgtatttagggcatagttgagtatcgatcacagtttgcgttttgtccaaatattactgtttatttatacagtaaacttctataatatcactgtacgcaatgtgttatgcgggggccgcatcgttacccggcgcactaagtcctggctggaacgggtggtgccgtcagcgccttaaccccgcgtgagcacactgtgttatgtcaacaagcacaacgtttctccttaagataccgcgtgcacaacagctggcaacaggcagcggaaaggtacgtcagctggcagtgctcctgaaccacaggagacgcgtatgagcctggtggatatcgccattcttatcctcaaactcattgttgcagcactgcaactgcttgatgctgttctgaaatacctgaagtaattcagattcaagtcgcaccaaaggggagcgggtaaccgctccccttttatatttagcgtgcgggttggagttgggggcttcttctaccagcagaatgtttgcacctgcgctgcctgtgcccctcaccctagccctctccccaaaggggcgaggggaccgtcccgtgcaatgtttagctcattttctgaaagggaacggtggtttccccctcgcccctttggggagagggttacagttcgcacgtaatccctcccggcaacatttattgccgcttttgtttacatattctgccgctaaacaattctccattcctggcgtatatctggctaacattcatcaatgtgatagattcctctcccgcatttatgggaatgcgtagtgacttattctaattatttttataaaagcatccgtgataatgaaaaggcaaagaaacgtcaatttgttattgatgttggtattactcgtggccgtcggtcagatggcgcaaaccatttatattccagctattgccgatatggcgcgcgatctcaacgtccgtgaaggggcggtgcagagcgtaatgggcgcttatctgctgacttacggtgtctcacagctgttttatggcccgatttccgaccgcgtgggccgccgaccggtgatcctcgtcggaatgtccatttttatgctggcaacgctggtcgcggtcacgacctccagtttgacggtgttgattgccgccagcgcgatgcaggggatgggcaccggcgttggcggcgtaatggcgcgtactttgccgcgagatttatatgaacggacacagttgcgccatgctaacagcctgttaaacatggggattctcgtcagtccgttgctcgcaccgctaatcggcggtctgctggatacgatgtggaactggcgcgcctgttatctctttttgttggttctttgtgctggtgtgaccttcagtatggcccgctggatgccggaaacgcgtccggtcgatgcaccgcgcacgcgcctgcttaccagttataaaacgcttttcggtaacagcggttttaactgttatttgctgatgctgattggcggtctggccgggattgccgcctttgaagcctgctccggcgtgctgatgggcgcggtgttagggctgagcagtatgacggtcagtattttgtttattctgccgattccggcagcgttttttggcgcatggtttgccggacgtcccaataaacgcttctccacgttaatgtggcagtcggttatctgctgcctgctggctggcttgctgatgtggatccccgactggtttggcgtgatgaatgtctggacgctgctcgttcccgccgcgctgttctttttcggtgccgggatgctgtttccgctggcgaccagcggcgcgatggagccgttccccttcctggcgggcacggctggcgcgctggtcggcggtctgcaaaacattggttccggcgtgctggcgtcgctctctgcgatgttgccgcaaaccggtcagggcagcctggggttgttgatgaccttaatgggattgttgatcgtgctgtgctggctgccgctggcgacgcggatgtcgcatcaggggcagcccgtttaagcgcacgtcaccgcagcatcgtcatcagctccatgggagaacgatgctgctttatcagatcacgcatcacccgcatatgcggtgcggagtaagaataaaacgcctgatagcccgcacaaagcacgctgtctggcgtctcctggcgagcgtgcgggcacaggcgatgccagtcgcacgcctggcagtcacggcgcggttgcgggttttcgctgccacaccatttttgtaaggtggcgtcaaaaagctcaatcgagatacgactgatatctgcccgcacccaacactcgaacagggcaattaaaaatttcccccacagctctgctgtcaccgaagcggccgtcagatcgccccggtcatcaaattcaagatagggaatgagctgtacggagcggatgccccgctgtttgaaattgtgataaaaatcggcaggttgcagagcatccttgtactctacaaccagtttatgcctgtcctcttcagcatcaatgacctgacttcctgtcatgcgactctctcaataaatacgataagttgatgtatatgcgttacagcaaacagtattgcgagagataacaccgcgagggagatcaaaaatttgtcacggactacgtgaaattgggaaaaatcgctattcgtgacatccattaaattgcgattacgggtgtagtgccagaggatcagcgccacgatggcgagaatgccaatcgaaatccagaataacatgcccgcctggtgccagttgtgtttgatagccaacgccatcaacgcgccgtagcccagcatggtacgaaaccacgccagtgatgtgcgctccggctgcagtcctgggtcggcaatgcgtctggctttgcggctatccggcatacaacaccagtcccataacgatcaccgccacgaccatcaatattaagctaatgattaataagctgttggtgtagggcaggtcctctttcagacgcatcgctttttcattgcgtaaccagcgcaggtagccatacatcgctaacccgccggaaaacagacacaacaacaacgccagcagttcacgaatgacgggcgtggcgaaatctggcgcaagttgatcaagcccaacccccgccgccagaaatcctagtgcggtacggatccacgccagaaaagtacgctcattagccagcgagaagcggtaatcgggcgcttctccaaggcgggaaattttcattgttgctcctttgcaatttcactaacgctctacctttagcggtttttttttaagaatttcgtccgcccgtttcctgatatgctttcgccatccgctacaaggaggtcagatgggtatcatagctcaaaataaaatcagttcattgggcatgctgttcggtgccatcgctttaatgatggggattatccacttttcattcggccctttttccgcaccaccgccaacgtttgaaagcatcgtggcggacaaaacggctgaaattaaaagaggtcttctcgccggaataaaaggcgaaaaaattaccaccgtggagaaaaaagaggacgtagatgtcgataaaatcctcgatcaaagcggtatcgcactggccattgctgcgctactttgcgcatttattggcggtatgcgtaaggaaaatcgctggggcattcgcggcgcgctggtttttggcggcgggacgctggctttccataccttgctttttggtatcggcatcgtgtgcagcattttgctgatattcctgattttttccttcctgaccggcggttcactggtttaagcagcctgaataatgcccgccgggtgttcatcagcgggcattatcgtcagaacttctgttttttctcttccactttcactccttgcgtcggtaggccggtgtcatagtcacgtaccaccggcgaatagccatcttgtgggcgtggacgaaatgcccccatccagcgcggcagtgcatctttacgccacggacgcaggctccattggtaactgcggaacggatcgcgaattttgtccatgtaatccaataaggcgtcatgcattttgctgcgaacgtctgcaaaacggatatcatcgatcaggttatgcatttcatttgggtcattacggcgatcgtaaagttcatcactggtgaagaggttgagtaccagtttaaagtcatccgtcacccagcaacgcaccggaataaaaccgccaaagctgtcatgctcaatctcgtagcggttaaattccaccattacaccgcgtggctctttcacggcaaggatattttcccccggcagaatctctggtttttcaatatctgccagcgccatcattgtcggcagtaaatcgatatgactgactggcgtatcgacctgtcgccgctccccttgcggcgaacggatgatcagcggaatacgggtgatgtcgtcatacatcgccgctcctttactgatcagcttatgtgcgcccatcatttcgccgtgatcggaagtataaatgacccacgtattttcacgttgctctggcgttaaggcattgatgacccgtccgatttggtcatcaacaaagtcattacaggcaaaatagagcggatggtgataaagcccgtcatcaccgactggcgatggcatcgcctgcgcccataagcggtgatgttccggtttgttcgccaggtcatcctgagctttctcgcccagatcgtagtaaaaatcagcgtatttctctaaatactccaccggacaggtgaacgggtgatgcggctcatcatacgaaaccaccatcaggaagggttcctcggcgcgcgcgggctgttgcagaaaatctaccgcccgattgctgatgcggtgcgcccaggtgaaggtttcgtcgatatggttcgcctgtaaatcctcaacgctgtttaggccattgcgccacaggctgatctctttttccgtcagttcgctaaggtagttcgccccatcgaaccagtaatcagcgtcccactccggcggacactcgccagtgccgaaatagtcatgaccgtcgagatgccatttgccgatgtaacaggtgtgatagccggcatccttaaagtagcgccccatagtggagatgtttttgcctggcgcgacgttgttggtccacgggccggactggttagcgtagataccggtaaatagtccggcgcgtgcaggcgtacaaaccggtgaacaggtgtaggcggaattaaagcgaataccttccgccgccagactatcaatattttgcgtattcagcggtttaccgctatagcaaccgaccatattggtggcctgggtatcggtcatgatgaacagaaaattggggcgtttcataggctatccttcgcgtcgggagtaaaggttacggctgggtcgtgacgatgccgccagctgtcaaaaatcaggtagacaatcactacggcggcaatgaaataactgatcatcgctaaccagcgcgtaccgtagccgccgaattcagccagcccggcatagacgccaatcatcgcgaacaggatgccaattgacgcgatcttgacgtttctccacggtttcatgtccaccgcaaacgcatctttgaaggtgaacggcgtggcgcgcggtttgataaaaccgatcaccagcatcacgaccacgttgatgcagaacgtacaggccagcacatagaggaaatggaagtcgaacttcaccagatagttgatggtgatgtagctgattatgccaatccccatcgccacttttgccgccagcgccgggatgcgcgggaagaaaaagcccataatgatgatggtaaccagcggcacgttgtaaatgccgttgagctgtttcatccagctatacagcccctgcggcgcgttggcgatccacggcgcgaccagcaccgaaacgatagcgataaagaaaccaaatttgcgcccgacggtgaccagctgctgcggctcggcattctggttaatgatgcgacggtaaatacccatactgaataacgtactggcgctattcagaaagccgttgaaggtactgatcaccgcaccaaataacaccgcgccgaagaaacccaccattggcactggcagaacgttattgaccagcgtcgggtaggccatgtcggctttcggtaaatcctgatacagatgaaacgcaatcaaccctggcagcaccagtaccagcgggtcgagcattttcagcaccgccgttaacagcgcccccttttgcccttccgccaggctttttgacgccagcgtgcgttgcacgatgccctgatttgtacaccagtaaaaggtgttcaccagaatcaaaccggtaaatgccgcgccaatcggcaagggatcggtcgggccaccgattgagtttaatttctcggcgtgaacggtggtgagttgctcaatgccctgcataaagctgcccttgcccatcgcgatcaggccaaataccggcaccatcaacccgccgataaccagcccaataccgttgatggagtccgccactgccattgcgcgcagtccgccgatcaccgcatacaaaattcccgccagaccaagcaaaattaccagtagccagatagccgcaccgtgagaaatctgtagcgattccccgacgtgaaacaggctgttgagcgccaacgcgccggagtagagaacaatcggcagaaagcagacgccggtggcaatgaggaagcagaagtcgatgataatacgcgtcgttttatcataacgttcctccagaaaatcggggatggtggcaatgccgcgcttcagatagcgcggtaaaaagattagcgcgaggaagatcagcgtcaccgctgaagtcacttcccagcccatcaccgacatgccgcttttgtaggcctgcccggaaaggccgaccagttgttccgtggaaaggttggttagcattaacgaagcggcaataaccggcgcttttagtgaacgtccggcaagaaaatagccttgttgcgatccggtatctgttttgcggaccttccaccaggtgatcaccgccaccagcagcgtaaaaccgacaaaactcaagatttgtaacgaattcatctcatagcccttatttatgtttatgtcccggacgcatgaatatagggagaggtaaaatgcgtcgggtcaggcagtcagattcttaaaatacaaacgtcgtatccctgaacggattgttttctgttaagttcaggttgtgagcataattcgccggagggatattaaaatgaatggaaaattgcaaagttcagatgtaaaaaacgaaactccgtacaatattcccttattgattaacgaaaatgtgatctccagcggaatttctctgatctcgctctggcatacctacgccgacgagcattaccgggtgatctggccgcgggacaagaagaaaccgcttatcgccaactcatgggttgcggtgtataccgtacaaggatgtgggaaaattcttttaaagaatggcgaacaaataacactgcatggcaactgtattatattcttaaagccaatggatattcactcttatcactgtgaaggtttagtctgggaacagtactggatggaatttacccccaccagcatgatggatattcccgttggtcagcaaagcgttatttataatggcgaaatttataatcaggaactcaccgaagttgctgagttaataacttcaccagaagcaataaaaaataatctggcagtcgcttttctgacgaaaattatttatcagtggatttgtcttatgtacgcagatggtaaaaaagatccacaacggcggcaaattgaaaaattaattgccactttacatgccagtctgcaacaacgctggagcgtagctgatatggctgccacgatcccctgtagcgaagcctggttgcgtcgtctgtttttacgctataccggcaagacgccgaaagaatattacctcgatgcgcgtctggatctggcgctatcgctattaaagcaacaaggaaactcggttggcgaagtcgctgatacgctcaacttcttcgactcctttcatttcagcaaagcctttaaacataaatttggttatgcgccgtcagccgtgctaaagaatacggaccagcacccaacggatgccagtccacacaattaacgtaactctggccagtacgctttgttggcctccagcaactcatccagaatagctttggcgaccgaggcgctcggtaccgttttcgacaacgtaatcgcctaccacaggtgctgatatgaacgctgttcccaggcgtccacgaccagtttttccaccgccacttgctgactcattaaccctttctgaaactgcgggatatcgccgaccaccagtggttcaggccgtagtagcgcacgcgcatctgtttgcgatcttgcagcccaacaatttgcgccatccggctttcaataccgattggcatgtcacagatgttgaggattttcgcattcgggcgcagacgacgcgtggcttctgcgacaattgctgccgggttggagtagttgagcatccaggcgtttggtgaatatttttccatataatccaccagttccaggacgccgccaatggaacgcatgccgtacgctattccgccgggtccgcaagtttcctgaccaacaacaccgtggcgcagtgggattttttcatccagttcgcgcatcgggtacttgccgacgcggatgtgcgccatgacaaaatcaacgtcgctgaatgccacttcaggatcggtggtgtaactaaacgcaatgtccggcgctttctctttaaggatgactttacaggcttcggcaatcacttcctgccgcgcaccatcgttatcataaaatttcagtgcacgaagcgggaaacggtcctgattcgccaggagcatcaacacgatgcctggcgtaaaggtgcttccaccgcctgcgacaaccactgagaatttggtcattatactgcctccgtaatggcaacattttctgctgattgatgagaattaattaagctatcgagctgttcacgcagctgggatacatgcagaccaatgatcacctgaatggcatcgccactacggaagacgccgtgcgctcccagctttttaaagacttcgtcatccagcgtttgtgacatgtcatgcagtgcaatacgtaaacgcgtcgcgcaattgttaatgctggagatattgccgaccccgcccagggcttgcaggataccggcagcctgatccagctctttttttggctctgccgcggtggtttggcctcgcgaggctttgtattcggcttttgagtagagtttcacttccgcatcttcacgtcccggcgtgcacatgttgaactgcagaatcagtgtgcggaaaaccacgaagtacagcagggtaaagcacaacccaatggcgatttgggtcagcatcatatccgcgtggttgctgaacatcgggatccagttttgcggtaaaacctggtcaatcagacctccgcccatgttgcccaccacaccaaagagatacatcacggtcgacattgaggccgcaagcacagcgtgtaccgcaaacagcaacggtgaaatgaacaggaaggtaaattccagcggttcggtaattcccaccagcatggcggttaaggttgcgggaatcagcaagcccgccacttttacccgattttccggtgcggcagtgaagtacatcgctaaagaaatgcccacggcaccaaagatttttgagttaccgtgcagggcaaaaccgccttccgggaacaacgatttcagcggctcggcgctcagactgaactcttgcagatgctgcgcccagtacatctgaatgccgccttcaacagctgccggaccaaagataaacggtccgtagatgaagtggtgtaaaccggttgggatcagaatacgttcgaggaaggtgtaaacccacaccccaagcgcacccgccgaacgcaggaacgcttgcagagattcaatccccatttgtacttttggccagccgagcaacgtcagccaggcacaggggatcatcaccaggaaggcgataatcaccacataagacgtcccctggaaaatgccgagaaaaaccggcagttttttatcgaacagacggttatgcagcgccgtcacaatgccggaaatgataattgcgccgataatgctggtatcgagggttttaatcccagccatcattgtcagaccgctacctgccaccgcgtcctgagtgaaatcgacgccgaagtagcttccccaggtcattcccatcgcattgatgaaatagttccaggtcaggaaactcaccatcaccgccagacaagcacgtccctgcgcttgcttagcaaggccaatgggtaaaccgacagcaaaaatcagcggcatattacggaataccgtccaaccgccctcttcaataatgtgtacgatttgcgcgaataaactgttcggatcggtcagtgattccccgacaaacatcgggttttgcagcaagatggcaagacccaccacaatcccggcgaagggaaacagcagcactggcgtgaacatcgcgccgccaaagcgttgaatttgactgagcatttccacatcctcttttctcaattctgtaagtaggaagcctgattggttatgcggcaggcctggagcgaggataggaagatgcgatcggcagaacatgacgacccaatgggattcgtgatcgctttcatgcttttcgttgggcggtagagatctacgttttcgcgaaaaagtagacatctgtgagcacaggtacacagcatcgaacacatctttaaaaaaaagatgttttttcaatcgattaagcagaacttgtgggcgcattacccgggcttgcaggcaaaaaagagatctagagatgatctacaaaagcattgcggagcggttaagaattcgacttaattccgcagatttcacgctaaatagccttcttcccggtgaaaaaaagttggcggaagaatttgcggtatcgcggatgaccatccgtaaagccattgacctgctggtagcgtggggattggtggtccgccgccacggcagcggcacttacctggtgcgcaaagatgtactgcatcaaaccgccagcctgaccgggctggtggaggtgttaaaacggcagggaaaaacggtcaccagccaggtgctgatttttgaaatcatgcctgcgcctccggtcattgccagccagttacggattcaaatcaacgagcagatctacttctcccgtcgcgttcgttttgtggaagggaaaccgctgatgctggaagacagctatatgccggtaaaactgttccgtaacctttcgctgcaacatctggaagggtcgaagtttgaatatattgaacaagagtgcgggattttgattggcggtaattatgaaagcctgacgccggtgctcgccgatagactgctggcgcggcaaatgaaggtagcggaacacacgccactgctgcggatcacctcgttgtcatatagcgagagcggggagtttttgaattattcagtgatgttcagaaatgccagcgaataccaggtggagtaccatttacggcgactccacccggaaaagagttaaccgatactccagaagagcaccgccagtaattggggggtgataattcgcagaaacatcactaacggatagacagtggcgtaagagagcgccgccgcaccactggttggatgaagattattagcaaacgccagcgccggaggatcggtcatggaacctgccagcatcccgcacatggtcaggtaattcattttggctaacatccgcgccagaatgccaacagtaatcagcggaacggcggtgatcagggcaccataaccaatccagcttagcccttcgccattgaccagggtattcacaaaatccccaccagatttcagaccaacgaccgagaggaacagcacgatccccagctcccgcagcgcgaggttggcacttggcggcataaaccagtacagcttgccgatactgccgatacgcccgaggatcaacgccataatcagcggaccgcccgccagccccagtttcaacgcggccgggaatcctggcacaaagacgggaatagaacctaacaatacgccaagcccgatgccaataaacactggcagcatctgaacctgttgcagtttttgctgcgcattccccagcacattggcaacggcatcaattgcggacggacgccccaccaggttgaggatatcgccgaactgcaggctgatatcgccactggcgaccagttcgaccccggcacggttcaggcgcgagataacaacgtcatagcgttctttaaagtgcaggtcgcgaatacgttttccgagcacgttttcattggtgaccaccacacgctcgacgcgcaaatcagtgcctttcgtggacagcgaagtatcgacctcctgaccaatcaccagttgcgcattatgtaaatccgctggctgacccaccagatgcagcaaatcgcccagttgaataatggtatctggcgaaggaacttttagggtttcttcgcgtttcagacgcgagcagataattttgtcgccgttgagaatcggtacatctttaatggctaaatcatgcaggttagggttctcaacgcgaatattgatagtcttgatcagcgcgccgccattggtgcgtgaagactcgtgctgctgagcttctgtctcgacattgacgcggaaaataacccgcaacatccacatggtgaacaaaatcccgcaaatgccgaatggatacgccatcgcgtaactcatccccatctgatcgaccatttccattggtgtacccaggtcgcgcaaaatctgctgccctgcccccagcgctggcgtattggtaaccgcaccggagaaaatccccagcactaccggcagtggaatatcaaacagtttatgcaggatggcggtaaccagaccaccgatgatgacgatcagaacagcaaacaggttgaggcgtaatccggagacgcgcaatgaggcaaagaagcccggccctacctgaatcccgatagtataaacgaacaggatcaggccaaattcctgaataacatgcagcatatcgctacttaatgtcatccccgcctgagaaacaaaatggccgacgatgatcccaccaaacagcacgccgccaatacctaatcctatgccgcgaaatttgacattgccgataaacaaaccgacgactgccaccaaagccagaatactgaccgttaatgctatatcactcatcgtccatttctcttgagataacatttttaattgctacggattatggctgaatcggtgaagcagatttgccttatagcgcacattatcacgggaaagaacgtgccgaaatatcttaaacagtcgaaatttaacgcattgttgagtaagtaagacaaaaaaagccccaccagaatggcggggcaaagagaatagctagttagctatttaacgcgggacgttcgctgatagcgatacgctgcgctgcgatgggttcaggctcattacgaattaaatcaatatgcagtaaaccgtttacgaaggttgcgccagagacttccatattttcagccagcgtaaagctcaggctaaatggctgattcataagcccttgatgcagccattttttctcttcttttggctgctccggcgtgccttttacgctcaggcgcgtaccttccagttgaatctctaaatcttcctgacggaaacctgccagcgcaagggtaatgcggtagtggttatcgtcgcttttctcaatgttgtacggcgggaagctctggctttcaccggcgttttgcagtgcgttggccagtttgtcaaaaccgatccattgacgcatcagtggggataaatcgaagttacgcatagtcatttctccttctaagaagcgagtaagtacctgcaaatccgaagattcgcatatgctccctgacggcgagcatggagatgtcaggccgcgccaggcggccttagggaattagttgatttcgatacggcgcggttttttcgcttccggaatcacgcgttcgagatcgatatacagcaaaccatttaccaggttagcaccacgaacatgaatgttctcagctaactggaatttgcgttcaaagttgcgttcagcgatgccctggtacagataggtgcgctctttttgttcgtcggcgtgagcacctttcaccaccagcagattatcctgggcggtaatttccagttcgctctcagcaaaaccagccacagcgatagcaatgcggtaatggttttcgtctaccagttcaacgttatacggagggtagccgccattactctggctctggttgttttctaagtggttaaacaaacggtcaaatccaatagcagaacggtaaagcggggataaatcaaagttacgcataatcaatagctcctgaaatcagcgagaatgtaagaccttccacaatggacaggtcaggtagccagaacacccatcaggcgcgtcctcatcggctacgatgtaaaaatgggtctggaaatgaacttttcaagccttatcagcggacttttttttgcagtttatggtctattgcatagactgagggggcagcacgaaacgttaaagtgcgatagccgccacagtgcgacgtaatgatgatgttattttcagcaagggatcgctataactcatcaggccaacacccacgatcaacagatgaatttattatgataagaaatgtgttgttagcgttcatgatatgcagcggaatgacattactcggaggatgctccagcgtgatgtcccataccggagggaaagaaggaacgtatcccggcacccgcgccagcgcaaccatgattggcgacgatgaaaccaactggggcactaagtcgctggcgattctcgatatgccgtttaccgctgtgatggacacgcttttactgccgtgggatgtgttccgcaaagacagttcggtgcgctcacgcgttgaaaaaagcgaagccaacgcgcaagccaccaatgcggttattccaccggccagaatgcctgataactgatttagcgatcagtttcggtgatccacagctggccaccttccatccacgccagccattgaccatccggcgagaagaccacggcgtccgcagaaggtggattggcgtggttttcggttaaatactcaacctcgccgctttgcgcatgggcacaagcaattcgattatccagcacaaagcccaaccattctcctgacggatgccagttaaatgcagactgaatatccgttttgttatgggttaactggcgcggctcgccgccctgtggcgagataagccacagttgcacaatgccgttatcatcacgcattaaaaacgcgatttgcgtaccctgcggattacagcgcacccagtggcgcgggacgttgactaaccccggataagcccgatggtgggtaaaggttaaacgtcgctgcacgacgccgcgcggtggcgcgggcagggtggtttccgttccacttaacggcgcatcacctgccgctttccagccagcttcatcttgcggtaactcaacgataaacagctccggcactttctcgccctttggcgaaagtgtgtcgccaataaacgccagcgcgtgatttcctacccatccttcttcataagcacgattgatttcatcgctgccaggctgcggcgtgggcgtggttttactcaccagcacgcaccagtggctaccgctgtattcacgcggatgctgcttttgtacgttgaccgggccaaacggcgcagcaacaccgacgtttcgcaaatccagcgccggatcgagttcatgcattacatggtcgttataggtaaagctcaccatttcaccgttcgggctaaagacatgcacatggctgccgccgcgcagcgctccaggcgtatacggcgcggtaatatccatcgcatcaaggttactcatcttgccgccttcagcaatgactccgcgtcgatgatggaagtcgtaatgccatgtttcatcaggattttccgggccgtggatgaaaacatatttctctgacttcggatgaacggtcaccacgccgacgtgtgcgccttgtgacgcgcgatagataacctcgacctcgccggtatggatattcacacgctcaatggtctcgccggtaaacgacgccccagaaggacgcacgtcaaataccagccactggctgtcgggcgtccaggtattggtattggtgagcaggtgattacggggagcaaaggttatctgtttcatggcgcggtcctgatacaaaacggttcccgccatcatacttcacaaggacttcactttcagacaatagtcttttgccatcgtgatgaatgtgagtgaaaagatggaacatttcgacgtggcgattattggcctcggcccggcaggatcggcgttggcgcgaaaattagcaggcaaaatgcaggtgatcgcgctggataaaaagcaccagtgtggtactgaaggtttcagcaaaccttgcggcggtctgctggcaccggacgcgcagcgatcttttattcgcgatggactgacgcttcctgtcgatgtgatcgccaatccacagattttcagcgtcaaaactgtcgacgtcgccgcatcgctcacgcgtaactaccagcgaagctatatcaatattaatcgccatgctttcgacttgtggatgaaatcgctgatccccgccagcgttgaggtttatcacgatagcctgtgccgaaaaatctggcgtgaggatgataaatggcatgtcatttttcgtgcagacggttgggagcagcatattactgcccgctatctggtcggtgccgatggcgcaaactcgatggtgcggcgacatctctacccggatcatcaaattcgtaaatatgtcgctatccagcagtggttcgcagagaaacatccggtgccgttctactcctgcatctttgataatgcgataactaactgttattcatggagtatcagcaaagacggttattttatctttggcggtgcttattcaatgaaagatggtcagacgcgtttcacgacgctgaaagagaaaatgagcgcctttcagttccagtttggtaaggcggtgaaaagcgaaaaatgcacggtgctgtttccctcgcgctggcaggattttgtctgcggtaaggacaacgcctttctgattggcgaagcggcgggatttatcagcgccagctcgctggaggggattagctatgcgctggatagcgcagagattctgcgttcggtgttactgaagcagccggagaagagcaacgccgcttactggcgcgccacccgcaaactgcgtttaaaactcttcggcaagatagtaaaaagccgatgcctgaccgcaccggctttaagaaagtggattatgcgcagtggtgtggcgcatattccacagttgaaagattagccaacacgcttcacatcgcccaccagcaggatgtaagagagcgcgccaatcaacgcgacggcggagatataaaccagtgcaggtgcgaaaccgtaaccctgcgccaggtaccccaccaccagcggaacggtgatgccgcccagaccaccggcgaagttaaacacgccgccggttaaaccaatcaggcgcatcggtgccagagaagaaaccagcgaccaggtaatcgaagcaaaaccgttaccgaagaatgccagcgccatcaggcacataatcatcatcggatcgttagtgtagttagcgcccataatgcaggtggagatcagcaagccgcagataatcggcgttttacgcgcaaagcccagtgaaaagcccttacgtaccagcagatccgcgacccagccagagagcaggacgccgacaaacgccgcgaggaacggcaccgtggtcataaagcctgctttcagcgccgttattcctttttcctgggttaaatagttcgggaaccaggttaagaaaaaccacagtgtagaagccaccgcaaattgcccaagataaacgccgatcagtttacgatggaacaccagcttccagtctttggctgttaacggctgacgtgcctcttttttcaccggcgcatcaccatccaccagaccgccgccatcacgaatgtaatccagttcagctttgctgatacctttggtcaggcgcggcggctgataaaccttaaaccaaatcagcgaccagataatgccgataccaccagtgacaatgaacacccagtgccagctcaacatctcctgaatccagatcagcagcggagtcaaaaacgccagaccgacaaactgaccagacgtataaaaacccacggcggaagcgcgttcatgttccgggaaccagctggtcaccatccggttattggtcgggaaagcgggcgcttcgaaaataccggttattgcgcgcagaccaattaatgacattaatcccgtggcaaagccctggaataaagtcgccactgaccaaccaaatatcgcaataaaataagtcacgcgagaacctacgcgatctaaaaaccaaccgccggggatctgacatagcgtataaagccaggcgaaggccgaaaatacatagcccatttgcgctttggtaataccgaactcttcctgaatatgggcggaagccacggccaggttagcgcggtcaacataacaaatgaccaccgtaataaagatcatcaccagcgtcagataacgccgacgccccggctttgctgcattaacgggaatatccatagcgagctttctccagattttgggcatagcgaagccgctcaccatgccctgtaatttacagagggttatatttttgtattgctgttttagtgcccgatgaggggcttacgtggcaggaattaccactctgctacgctgttatcttcatgacgccagagcggattacgccagtccggggcatttttactgaactcaataactttagcttcgtcgatttccacgcctaagcccggtttcgttagcggtttaaagaagccaccaaccatgctgaagtcttctttgtttttcacaaagtcgagtaactccgcgcctttgttgtaatgaatgcccatactttgttcctgaagtaccgcgttataggaaacaaagtcgatatgcaggcaagccgccagtgcaatcggtccgagcggacagtgcggcgcaagggtcacatcataggcttctgccattccagcaattttgtagcattcggtaataccgcctgcatgggagagatccggttgcagaatcgaaataccgcctgcctccagcacgcgtttaaaatcgaaacgtgagaacatgcgctcacccgccgccagtggaatatgcgtttgtgccgccagtttcgggtagtattcggcttgttccgccagcaccggctcttcaataaacagcgggcgatacggctccagttctttaatcagcactttcgccattggcgcgctgacgcgaccgtggaaatcaagaccaaactcaatctgattgccaaaagcttcacgaatttgtgccacggtgttgactgccgcatctaccgcgcgggagttatcaattagccccagttcttcacaaccgttcagtttgaaggtatcgaagccgatttcgcgcagggttttaatgccgtcgataacatccgccggacgatcgccgccgacccaactgtaggctttaattttgtcgcgaaccaggccgcccatcagttgccagaccggcgcattcagcactttgcctttgatatcccataacgcctggtcgatcccggcaatggcgctcatcaggattggaccgccacgataaaatccggcgcgatacatcacttgccataagtcattgatgcgcgaaggatcctgaccaatcaaatagtcacccagctcgtgaactgccgcttccaccgtacgggcgcggccttcaatcacgggctcgccccaaccgaccacgccttcatcggtttcaattttcaggaacatccagcggggaggtaaacgatacgtggtaattttggtgattttcattgcactgcctctcgatacgccttaacaaatgctgctgcctgctgcgcggtgcgttctacggactgcccggcgcgatagagatcgctgcctaagcccgccccagcacaacctgcgtctatccactgcgccaggttttctggcgtcacgccgccaacggcaaagactgcgatgtccgatggcaataccgcttttaacgctttgatgtattgcggaccaaaagccgatgacggaaatattttcagcgcctgcgcgcccgcttcgagcgcggtaaaggcttcggtcgccgtcgcgcagccggggcagacggtcatgccgtagcccaccgcacggcggatcacttcactatggatattgggcgtaacgatgagctgacagcccatcctggcgagcgcatcgacctgttcaggtttcagtaccgtacctgcgccaatcaacgccttgtcgccatacgcatcaacgatggcgggaatgctttgctcccattgtggggaattcagcgggatttcaaccgcgtcgaacccggcgtcaatcaccgcgccaacatgcgccagcgcctcgtcgggcttaatgccgcgcaaaatggcgatcagcggaagtttagtttgccactgcatgagcgatgctccttataccagcctgaaatgccgtgtcgcccgccaccgccgtcacgtcgcaacccatcgcctgaaaggcttgctggtagcgcgcggtcagcgatgttccggcgacaagggtgatggcgtgttgatgggtcacatagtcgcgcatactggcaacctctgcgccaatcaacaaaccagagagaaattcgctgacctgttcgcggggaagtgttcccagcacatgcgaggcgcgaacttcaaaaagctgcggcaatatggcgggcgcattaaggccgcgctcaaggccagccgcgaaggcatcggcagagttttcctgcggcggcaaacctgcgccaatcaatgagtgatttaacagtaaatgatgtaattcaccggtcatcacggtgcgaaaatcgttgatttgctggctatcggcctgcacccatttgcaatgcgtaccgggcataacataaagagaggaaggagccagagctcgcgcgccgatcaattgtgtttcttcgccgcgcatcacattgtggttatcgtcatgagagacgcataatccgggaataatccagatattgtcgccaacagacgttaattgttcgccaatagacgaaaaacgggcaggaacagataaatacggagcaactttccagccgacattgctgccgaccattcctgccatcaccactggcgtattttcttcacgccagtcggtcgtgacttctgctaacaccgcagccggagattttccgttcaggcgcgtgacgcctgcttctgattgcctgctctccaggcagtggtcgccctgataaagccaggcgcgcagattggtcgatccccagtcaattgcgatgtagcgagctgtcatgtgatttcctttaaccttcgtgtcgagctggcgatcatggtaagcgccgcctgctctgccgcatcgccgtcctgatgccgtattgcatcgaacagcgccttatgttcctggagcgtttgcggcatgttggcctcatcgcccatccaggttcgttcaaaaaccgcccgctgcaacgaactgatcgcaatgctaagttgctgtaacaccgggttatgtaccgactgcagcaccgcctcgtggtagcgaatatccgcttcgttaaacgcttcgcggtcctgattgttggcaatcatctcgttcagcgccgattcaatctgcgccagatcgctggaagtcgcgcgctctgctgcccaacgggcaatcgccggttccaccagatttcgcacttcgctcatggcactgataagccgtggatcgtagtcgttttccagcacccattgcagtacgtcagtgtcgaggtaattccactggttacgcggtgccacaaacgccccgcgataacgtttcatttcaatcagccgcttcgccatcagcgaacggaacacctcacggatgatgttgcgcgaggttgcaaactcctcacagagttccgcctcagccggaagcggcgagcctggcacgtatttgccgtgaacgatctgtttacccagcgtaatgacaatgcgatcggttttattgagagtcatggagagtccttgtgctctgtatgttcttctctactttaccccgatcgatgcataacgcggcaactttgtagtaccagcgtgatgacgttcgcgtttgccgtgcgcgtaatgtagtacaaacctatattgttgtactacaatttagatcacaaaaagaacaatgcataaaaaaatgacatgcgtcgggcagaaatctgaaaagggatatcaggcgctaaatgggagggaaagaagagtatgctttcaacggcttagctactcgtttaaaggattaatcatgaagttgaatcttaagggattttttaaggctgccggtttattcccactggcgctgatgctttcaggctgtatctcgtatgctctggtttcccataccgcaaagggtagttcaggaaagtatcaatcgcagtcagacaccatcactgggctatcgcaggcaaaagatagtaatggaacaaaaggctatgtttttgtaggggaatcgctggattaccttatcactgatggtgccgatgacatcgttaagatgctcaatgatccagcacttaaccggcacaatattcaggttgccgatgacgcaagatttgttttaaatgcggggaaaaagaaatttaccggcacaatatcgctttactactactggaataacgaagaagaaaaggcactggcaacgcattatggttttgcctgtggtgttcaacactgtaccaggtcactggaaaacctaaaaggcacaatccatgagaaaaataaaaacatggattactcaaaggtgatggcgttctaccatccatttaaagtgcgattttatgaatactattcacccagaggcattccggatggtgtttccgcagcattactgccagtgactgttacgctggacatcattactgcaccgctgcaatttctggttgtatatgcagtaaaccaataatcagtaagcgggcaaacgcgtttatgctgtttgcccgtccactgattaattcagcacatacttctcaatagcaaacgccacgccatcttcaaggttggatttggtgacaaagttcgccacttctttcaccgaaggaatagcgttatccatcgccacaccgacgcctgcatattcaatcattgcgatgtcgttttcctgatcgccaatcgccatgatttcttccggtttaatacctaacacgtcggccagtgatttcacacccgtacccttgttaacgcgtttatcgaggatttcgaggaagtacggcgcacttttcagcacggtatatttctctttcacttcctgcggaatacgcgcaatagcctggtcgaggatggcgggttcatcaatcatcatcactttcaggaactgggtattggggtccattttctccgcttcgcagaacaccagcggaatggtggcaacgaaggattcatgcaccgtgtagtagctgatatcgcgatttgctgtatacagcgtggtgcggtccagggcgtggaaatgagaaccgacttcgcgagagagtttttccaggaaacggtagtcgtcatagctgagagcggtttgcgccacggtgctaccatcggcggccttctgtaccaacgcgccgttataagtaatgcagtagtcgcccggctgttccatatgcagctctttcaggtagttgtgcacacctgcatacgggcgacccgtcgttagcacgacattcacgccacgggcgcgagctgcggcaatcgcatttttaacggcgggtgaaatggtgtgatcgggcagcagaagggtgccatccatatcgatagcaatgagtttgatagccatgagttccccaggtagattagttcctgacccatgctaacgcgattccgctcaaaaatcagtacaacacccgagggaaaagggggatgcaacgcgggttgcatgctccccatttgcttagcggaagagtttccctttcagcagttccatgcctgcggaaagcagatcgttattggcttgtggagacacttcaccttgcggtgagagcgcatcaataatcttcggcaattgttctgccagtaaactggaagctgtactggtatccacgccaagtttttgtccaagatcggacaccgcatttgtgccgagcgccgattccagttgctcgccactaaccgattgattgccctgttgattactcagccaggttgagagaatggcccctaagccgccactttgcagtttttccagcagcacctgaatgccgccctgctcctcaacccaacttaaaatagcctgatatttccccgcatcgcctttcagaaaggcaccgacaacttcatcaaaaagccccatgataatcacctgtaaagcgttacgtgttgacccaaaaagtatagatttgcgggatgataattgcggattgcagaaataaaaagggcggagatgatctccgcccttttcttatagcttcttgccggatgcggcgtgaacgccttatccggcctacaaaatcatgaaaattcaatacattgcaagattttcgtagatactgttatggcctgcaagttttttcctggtccggtttcccggattgcaggcatgccagacacagcgccgtcaggcgctgtttttttcatcccttccgcgatttttacgccgctaccggatt

SEQ ID NO: 63 - DNA, 41611 bp, Escherichia coli
  source 1..41611: mol_type = genomic DNA
aatccggtagcggcgtaaaaatcgcggaagggatgaaaaaaacagcgcctgacggcgctgtgtctggcatgcctgcaatccgggaaaccggaccaggaaaaaacttgcaggccataacagtatctacagcaggcattgcaactgattgaatgcttgagaatttgtaggccggataaggcgtttacgccgcatccggcatgaccaacgatcacgttatcagtcatttcaggctggatggctccagcctcgcattagcaaagatgagattatttcgcctgtggtgcagttttgctggtggattgaacacgtaagtgatgcagcgcgcgtaagcattgatcctgggttagcggttgggcgttattcgccgctacggtgcgaacatagacctgacatggcacacccgcgagttttttcagtcgttggctgaaatcaagcattcggcgagtgatcgcctctatttctttacccggcgttgcttcacgcgttttcaccactgcgccgctaaattgttctttgccactttcatctttaaagcggtaaagcaccgccagataatggttgaacaggttatgtttccattccggttgggaataggtgtcatattccagattgccattttcctggcagtcaacgtcatataacggcaggaaatctaacagtgaggtaatacgtaatgccagttcacgcatttccgcattattaattgcatgaatgattgctcgcgccagcatttcaatctgcaactcattgacgactaactcacatttgctaccgtcatgtagcgttaatacgaaggtaagattttcgccttgattatcggtaagttccagcgtgttaacccgacgattaatatcggcatttttaagctcatcaaccagaatttctgggatgttttctgccattttcttaatgactttatcgcgagcttgctcatactgaaggcgtgcagcagcatccagtttatgcttttgatgcatacgactttccagcgcaatcagcaggtcgcgcagttccatgacagacataaagaacaacgattctttattgcgaggttctttaattttcagcgccagtgcaatgaaattattactcttgcgaataacaccggtattaacacccttgatgcttatggccatgtaggttctccctaaccatttctcaattaaataattaattttaatttataagccagataaatgggcttggtagtaatagttgttaaaataacataaatagccgtactcactctatataaacagaaaagaaaggttaattattggtgttggctatataaagagtaacaacagcaatgtatatgaataattaaaggttatgcaacgggcaaagattaaatttcccagtttaatgacaggttgctgtacttgcgtttgttgctcttgccggatgcggcgtaaacgccttatccggcctacagttcattgcaaatccattcaatttcaatgcacaatgtaggcctgataagcgtagcgcatcaggctaatgtttaacttccctgtttaatcagttactgctggcgtagctggagatccagcggcgttttgctgggttcgccgccgatttctcgcgccagtttcggcaccagataacccgacaccagtgtcagcaactcacgcataatctgccgtgcttcgtcatcactcaccataaaatgcgccgcgccctgtactttatcgagcacatgcaggtaatacggcattacgccggcatcgaacaacgcattactcaggtttgccagcgtttgtgcgttatcgttcacaccacgtaacagaacgctctggttaagcagggtgacaccgacacggcgcaatttagccatcgcctgacggaacgtttcatctacctcattggcatgattgatgtgattcaccagcaagatttgcagcgtagaacgggcaaagcgttcaaccagcgcctcggtgatacgtgccgggatcacaatcggcagacggctgtgaatccgcagacgtttgatatgcgggatggcttccagttgtgtgagcaaccagtccagctcgtgatctttcgccatcagcggatcgccgccggagaaaatcatctcgtccagttccggatgcgcagcaacatactcaagagcagtctgccagttacgcttgttgccctgattttcggcataggggaagtggcgacggaagcaatagcggcaatttaccgcgcagccgcctttgaccagcaaaagcgcccggttgtggtatttatgcaacaaaccaggcactacgctgtgctgttcttccagcgggtcggtggagaatccggacgcgacgacaaactcatcttgcgaggtaagtacctgacgcaaaagaggatcgtccggattgcctttctccatgcgatcgataaatgagcggggcacacgcagggcaaacagctttttggcgctgcgtccggccaacagtttttcgtccgcgtctatattcaaaagacgcagaagttcatcaggatcggtcacaacatcggcaagttgcgttaaccaatcttctctggatggggtatttagggttacaatatgcgccattttgtggcttagctaccaattaacaaatttcagagggccttatggcaacgtactatagcaacgattttcgtgctggtcttaaaatcatgttagacggcgaaccttacgcggttgaagcgagtgaattcgtaaaaccgggtaaaggccaggcatttgctcgcgttaaactgcgtcgtctgctgaccggtactcgcgtagaaaaaaccttcaaatctactgattccgctgaaggcgctgatgttgtcgatatgaacctgacttacctgtacaacgacggtgagttctggcacttcatgaacaacgaaactttcgagcagctgtctgctgatgcaaaagcaattggcgacaacgctaaatggctgctggatcaggcagagtgtatcgtaactctgtggaatggtcagccgatctccgttactccgccgaacttcgttgaactggaaatcgttgataccgatccgggcctgaaaggtgataccgcaggtactggcggcaaaccggctaccctgtctactggcgctgtggttaaagttccgctgttcgtacaaatcggcgaagtcatcaaagtggatacccgctctggtgaatacgtctctcgcgtgaagtaatgcggttgtggtgcggcctgcaggctgcaccatcacttattcaggtcagagatgatgaaacgccttatcgttcttgttttgcttgccagcacgctgctcacgggctgtaacaccgctcgcggtttcggcgaagacatcaaacatctcggcaactccatctcccgcgctgccagctaatttttcttctcttccgaaaaatcatcagatttccatcatttttggcgatgttgtctattattaatttgctataggcaaacataaataacattacctaaaaggaagacgttatggtgaagaagacaattgcagcgatcttttctgttctggtgctttcaacagtattaactgcctgcaacaccacgcgtggcgttggtgaagacatttctgatggcggtaacgcgatttctggtgcagcaacgaaagcgcagcaataagcaataacggtacgacagttatgtcgtgccgtttgtttttttgcgatagtcacaaaggtaatagttgaaattcccctgccacctggcaaaatatccgttcaaccatcagctttgcaggacgacctgcaaacgcctcttttcaccggggacggccccaattctccggagcctgatatgtcctggattatcttagttattgctggtctgctggaagtggtatgggccgttggcctgaaatatacccacggctttagccgtttgacgccgagtgttattaccgtgacggcgatgatagtcagtatggcgctacttgcctgggcgatgaaatcgttaccggtagggacggcttatgccgtgtggacgggtattggcgcagtcggcgctgccatcaccggcattgtgctgctcggtgagtccgctaacccgatgcgcctggcgagtctggcgttaatcgtattggggattattggtctgaaactcagcactcactaactaccgggctgctgtacccaaataaacttactgacatcaaacccttcccgggtcgcgactgccagcatctcctgtttcacttcgtcagaaatggttggcgtgcgggagagtatccacaggtagtcgcggtccgggccgcaaaccagcgcatggcggtattcccgatcaagtgcaatgacgttataaccgccatagaaaggaccaaagaatgacactttcagcgcagcgcgtgttggtgcgccggtaaagtacgctttcccttcactctgctgccacatttctctgtcagggttatagcctttattgatgacattcaggccgccgtcatcacgcagactgtatgttgcggtgactttttccagtccacgttcaaaacggtgatcaaaacgggcaatctcataccaggtaccgagataacgttttgcgtcgaaattattcactactgttacgccacgcggcggcgtaggagaactgcaggcaacgaccagaaatgcagctgtcgctgcggcaacgagagggagcaggcgcataaatgtttccttactggtttttttctaagtgtagatgacagcaaggaaaagcgcagaaaaggtccgaaaattcggacccgatgaaattttactgtagagcgttgagaatctgccaggcggcggcgactctcgctggattgggatagtttttgttagccagcatcactatacccagctctttttctggaataaacgcgacatagctaccaaatccgccggttgcccctgttttatgtacccatgatgcgcgtactgcaggagttgggggcgtaatcgcttttacagggtgtgctgccagtgcaattttattgccactgccgttaatgatgctgtcaggatttaccggccagtccagcatttcccagcccaggccctgatacatatcgccggtttgccagtagcgagattgtgccagttgtatcccttgctgaagtgttttgtcgttgatatcacggggattcatattgcttcgtacccagcgggccatatcttcaatggtcgacttcacaccataagcttcagcatctaacgcccctggcgaaacatgcactgccttaccttcgcgatatccccaggcgtaattcttttcttctgggggaggtacattaatccacgtatggttgagtttgagtggctggaagacacgagtttgcatcgcctgctcaaaactcaaaccagacggcttcacagccagtgcgccgaacaaaccgatactggagttggcatacagacgttgtgttcctggagcccatgcaggctgccagttttgatagaagcgcagcaagtcgcttgaggatttcacttcatccggcacctgcaatggcaggccgccagcggtgtaggtcgcaagatgtaatagtgtgatcccattccactgtttagcggtaagttcaggccagtattttgttgcgggatcgcttaacttgatttcccctcgagcaatagcgtcgccaccaagcacgcccgtaaatgttttgctgaccgaacctaactcaaacaacgtttgctgtgtgacgggctgctttttggcgatgtccgcatagccccaggtaaagtaataaggtttaccctgataaattaccgccaccgccataccggggatcttttgttgctctataagcggggtaattgtgcgatgcacaatatcgttgatttgttgaggggcagcaaatgtggagcaagaggcggtaattaataaggcgcagagcgtcgttttgaacataaggtctggtttccatacaaaacggcccgccataggcgggccggatttacattggcgatacgttagattgtaacgataccaatcagcgtgacaactgtcaggatagcagccagaccgtagaaaacccatttgcccgcaggcacgtgaattttcagatcgtgcatcgcgtggtgcatacggtgtaaaccacaccacagcggcagaacgatcatcaggaacaggaatacgcgaccaatgaagctctgcgcgaacgccagaacgcgctcgtagctcagcgcatcacccggaaacagccccagtggcagcagaatacccaccagcaggatcatcaccggcgcaataattgcgctccacataccaccggccccgaagaggccccagaataccggttcgtcagaacgctttggatttggattaatcatctcaggctccttaccagtacagggcaacaaacaggattacgatggtggcaaccacagttaccgcccagagacttttgataattggctctggtcccattttttcgtcttttacaatgatattggccgctttcggtgccagttcaaaccaggttttggtgtgcagcagagctgccgccagagtgatcaggttaatgatcacgataaccgggttttgtaaaaagtcgacgaatcccgcccaggcttccgggccatttttcagggcaaacagcccgaaaatcagttcaatgctgaaccacacagccggaaccgccgtgccttcgcgcagcatgtaaaagcgataaaacggcaattttttccaccaggtggacgtcattggccgtacatacggtttacgtttagtcgtcatgttgcactccttagcgtggtttcagggtcgcgataagaaagtctttcgaactttctactttgccctgctgaatggccgcagccggatcgacgtgtttcgggcagacttcggagcaatagcccacgaaagtacagctccatacgccgttctggctgttcaactgcgccatacgctccttcttaccgtggtcgcggctatcttcgttataacgatgcgccagcgtaatggcagccggaccgatgaactctgggttcaggccaaactgcgggcacgcggcgtagcacagaccacagttgatgcaaccggagaactggtgatactttgccatctgcgccggggtctggatgttagtaccctgatccgcggtgcgggagttgccgatgatgtacggtttgatcgcttccagactttcgatgaagtgggtcatatcgaccaccagatcgcgttcaatcgggaagttagctaacgcttcaaccttcataccgtcggtgtaatcacgcaggaaggttttacatgccagttttggcacgttgttaaccatcatgccgcaggaaccacaaatcgccatacggcaggaccagcggtaactcaggtccggtgccaggttgtctttgatgtagcccagcgcatccagtaatgaggtagttgcgtcataaggcacttcatagaatgcgctatgcggtgcggtatcgacttccgggttatagcgcaccacctcaattttcaggtttttcatctcagccattcgccttctccttcttattggctgcttccgccttatcggctgcatccgcttcgccaccgtaaacgcgtttagctggcggcagcgtagtaatcttcacgtcgctgtactccaggcgagtcgtgccatcagcatcgcggaaggcgagggtgtgtttgaggaagttgacgtcgtcacgctcggtgcaaccttcgtccagacgctggtgtgcgccgcgggactctttacgtgccattgcggagtgcgccatacattcagcaacgttcagaccgtggcccagttcaatggtgtagagcaggtcggtgttgaacacgctggaggtgtcggtgatgcgcacgcgcttgaagcgttcctgcagctctgccagcttgtcgatggttttctgcatcagttccggcgtacggtagataccgcaaccttcttccattgccaggcccatttcgtcgcggatcttcgcccagttttcgccgccatcctggttaaccagatctttcagacgttgttcaacgccagctgcctgcgcttcaattgccgcttcgttgccattaccggcagttgctgcacgctctgtcgcttgttcaccggccagacggccgaagaccaccagttccgccagggagttagaacccagacggtttgcaccgtgcagaccaacagaggaacattcacccacggcgaacagacctttaatgcgggtttcacagttctgatcggtttcgataccgcccatggtgtagtgtgcggtcggacgtaccggaatcggttctttaaccggatcgacgccaacgtacgctttcgccagttcgcagatgaacggcagacgttcatgcagttttttctcgccgaggtgacgcaggtcgagataaaccacatcgccacgcggcgtggagatggtgttgcctttacgccattcgtgccagaaggcctgagaaactttgtcgcgtggacccagttccatatatttgtttttcggctcgcccagcggagtttccgggcccatgccgtaatcttgcagataacggtagccatttttgttgaccagaataccgccttcaccgcggcagccttcggtcatcaggataccggaacctggcagaccggttgggtgatactgaacgaattccatgtcacgcagcggaacgccgtggcttagcgccatacccataccgtcaccggtaacgatgccgccgttggtgttgtaacgataaacgcgacccgcaccgccagtagccataacgaccgcgttagcacggatctgcaccagcgtgccttccatcatgttcattgctaccaggccgcgaacatgaccatcatcaaccagaatatccagcacgaaatgttcgtcaaaacgctggatctgcgggaattgcagagaggtctggaacagcgtgtgcagcatatggaagccggtcttatcggcggcgaaccaggtgcgctcgattttcatgccgccgaagcgacgtacgttgacgctaccatccgggcgacggctccatgggcacccccacagttccagttgggtcatttcggttgggcagtggtggacgaaataatccacgacatcctgctcacacaaccagtcgccacccgctactgtatcgtgaaagtgatattcgaagctgtcatgatcctgcgcgacagcggcggagcccccttctgcagcaacggtatggctacgcatcgggtatacttttgagattagtgcgatttttgcatttggatttgcctgcgcggcagcaattgcagcacgtaatcccgcgccaccggcgcctacaatggcaagatcggcttgaaaggtttgcacgacattcctccagattgtttttatcccacagccccgtacttcagggtaagtgcctgaaagttacggtctgcgaacgctattccactgctcctttataggtacaacagtatagtctgatggataagtctgaaatttgacgagatcgatttttttagtgcgcaagagggctaaattatcactgaagatgattaatttaattactaaaccatcagatcgtgctttttttagtcactgcccaccgctgtttgattcctgcgtaaaatttgtctcgccgtcgcgttgcgagtagacttcgtgcccttgtcaaaaactggagatttaactatgagcgaaacggcatcctggcagccgagcgcatccattcctaacttattaaaacgcgcggcgattatggcggagatccgtcgtttctttgccgatcgtggagtgctggaggtggagacgccttgtatgagccaggcgacggtaaccgatattcatttggtcccgtttgagacacgtttcgttggccccgggcattcgcaggggatgaatctctggttaatgaccagcccggaataccatatgaaacgcctgctggttgccggttgtgggccggtattccagctgtgccgcagcttccgtaatgaagagatggggcgttatcacaaccctgagttcactatgctggagtggtatcgaccgcactatgatatgtaccggttgatgaacgaggtggacgatctcttacaacaggtgctggactgcccggcagcagaaagcctttcttatcaacaagctttcttgcgttatctggaaattgacccgctctctgccgacaaaacgcaactgcgggaagtcgcagcgaaactggatttgagcaatgttgctgataccgaagaagaccgcgacacgctgctacaattgctgtttacctttggcgtagagccaaatattggcaaagaaaaaccgacctttgtgtaccactttccagccagccaggcatcactggcgcaaatcagtaccgaagatcatcgggtcgctgaacgctttgaggtttattataaaggtattgagctggcgaatggtttccatgaattgacggatgcccgtgagcagcaacaacgctttgaacaagataaccgtaagcgcgcggcgcgcggtttgccgcagcaccccattgaccagaatctgattgaagccttgaaagtcggtatgcctgactgttccggcgtggcattaggtgttgatcgtctggtgatgttggcgctgggcgcggagacactggctgaagtcatcgcctttagcgttgaccgggcataattctgaaaaattactgaattaacagcgaagaatggcgtgataagcgccattctgtagcatatgttttcatttttccgttaaaggccacaatttaagactggatatttgatatcatccaggtatcaattctgtattggtttttacgctgcctgctcaatgttgcgcagtgcagttcagtgggcacgtgttatacacgcgctgaaatgaaggatggtttcatgcctcacacgataaaaaagatgagtctgataggactcatattgatgatctttacttccgtatttggatttgccaatagcccatcggcttattacttaatgggttatagtgcgattcccttttatatattttctgcattgttattctttattccattcgccttaatgatggctgaaatgggagctgcttatcgcaaagaagaaggtggtatctattcctggatgaataatagtgtcggaccacgttttgccttcattggtacgtttatgtggttttcctcttatatcatctggatggtgagtacctccgcgaaagtttgggtaccgttctcaacattcctctatggtagcgacatgacccagcactggcgtattgctggactggagcctacgcaggtggttggtctgctggcagcggcatggatgattctggtcaccgtcgttgcttcaaaggggattaataaaattgcccgcattactgcggtgggcggtattgcagtaatgtgtctgaatttagtattgctgttagtaagcattactattttgttattaaatggtgggcatttcgcgcaggatattaatttccttgcatcaccgaacccaggttatcagtccggtctggcaatgctatcgtttgtggtatttgctatttttgcctatggcggaattgaagcggttggtggtctggtcgataaaacggaaaatccagaaaagaactttgccaaaggtattgtttttgccgctattgttatttcaatcggttattcgctggcaatatttttatggggtgtcagcacaaactggcagcaggtattaagtaatggttccgttaaccttggcaatattacctatgtgctgatgaagagcctcggggtgacgctgggtaacgcactgcatttgtcacctgaagcgtcattgtcgctgggcgtatggtttgcgcgtattaccggactttcgatgttcctcgcttataccggtgcgttctttacgctttgctattcaccgctgaaagccatcatccaggggacgccgaaagcgttgtggccggaaccgatgacgcgcctgaatgcgatggggatgccgtctatcgccatgtggatgcagtgcgggttggttactgtcttcatcctgctggtttcgtttggtggcggtaccgcatccgcgttctttaacaagctgacgctgatggcgaacgtgtctatgacgcttccttacctgttcctcgcgctggctttcccattctttaaagcacgtcaggatctcgacagaccatttgtgattttcaaaacgcgtatgtcggcaatgattgcgacggtggttgtcgtactggtggtgacatttgcgaacgtcttcaccatcattcaacctgtggttgaagccggagactgggacagcacattgtggatgattggcggccctgtcttcttctcgctgttagcgatggcgatttaccagaactattgcagtcgcatggcgaataaacctgagttagctctcgactgatcatatgaaatcctgcaactcatcgtctctccggcgatgagttgtcaggaagtaatgcgtatggatgatactctccagggccggtgataactgaagatgatgttaagctgctaaatgagccacgttgacatcatttggcagcttcatgcattacaaacttcccgcctgacgacctttgcccgcagaagttaatgttctccccgtttgcttaccgttgaggctttccagacgcatctggaagggcgggaatggcatatcgataccgtgggcgtggaagcctgccagaatcagctggtggatctcatggcgtagcggcatacggtgacccatctcagcggcgtaaatacgcagctcgaaaatctgaatcccctgttgcagatccaccaggaagacttccggtgccgggttgtcgatcaccagcgagcagcgacgcgctgcggtgagcaggatttccgtcacttcttcgctattggcatcagcaggggccggtatcgtcaacaccacgcgcgtgaccgagtcagagagcgaccagttgataaactgctcggtaataaacgccttgttcggcacgattatctctttacggtcccagtcgctgatggtggtggcgcgggtgttaattttcgtcacgctaccggtaagatcgcggatcgttaccgtatcgccaatgcgaatcggtttttcgaacaggataatcaggccagagataaagttggcgaaaatctcctgcaaaccaaaaccgagaccaacaccgagcgcggcaaccagccactgcaatttcgaccactcaataccaatcatcgagaagccgaccagcccgccaatcagcatcagcagatatttggtgatggtggtgatggcgtagcccgtacccggcgttaaatccaggtgctgcaaaatcgccagttccagcagcgcgggcaggttgcgcaccagctgcgtggtgatgataaacaccagaatggcaatcagcaccgcaccgagggtaattggctccagactttctacgccctgtaccgtggaggtgacatcccacagcgaaatattttcgaggaagccgaaagcggaatggatttctgaccacagcacaatgacagaaagcagggcgatcaacatcaaaattgagcgcaccagccgcaaggattgcgcactgatggcatcgagatcgacttcgctttcatcgacttcaattgccccttccgggctactgtgatgatgcgcttcctcttcgccacgcgcgcgttgcgctaacatctctgcccggcgatgcttcgcccggtcaaacgccagcctgcgacgctggatcagcatccagcggcggataacgtgataaaccaccagtagcaggaaccagatggcaaccgaggtttcaagcctcgctaacagtgcctgcgccgttgccagataacccaccgctgacgccagaatggcaaccagtggtgcgccaatcatcatgttccacagcatatggttggtaatgttgtcgccgctgccctctttgttgaggtacagcgggatcccggcctttttcaggctgagggtgaccaccgccagcgcaccgcaaatgaggataaagcaaagccgtcccagcgaaccggagaattcacggtcgtcgaggttatcgaacatcatcagcgccataatcagcggcacaataagcccgatgctcatcaggtagtagcgcatcccacgggaaacacgttcgcgcggccagccaaaatgagcgataaacaagccgttcgggcgggcaaaggtggcgcaaatcatcactacccacagcagcggcacggtggccgttacgccatcgccaatcgcgaccgccagcggataaggccacgcctcgcgcaagccgtaacccagcgtcatccacagcaccggcagcggtgacgcgacgagaatcgaccagaaaagagtgcgcaacgtcagccagaagtgatcctgagtcactttgccgactttcgccgccgaacgttcaagaaaacgggtgaaatagcggcgcgagtaaatactgcaaccgaccagaatcaacgcgccaaacagcggcaaaattgtctctttgctggtcagcatcatcacactggctttgcccaactgactgaaggtgtccagcgaaatgagacgacgcagatcctgggcgatttccagcggccaggcgatggtcatcgggcgcacgtcagaggtccagaacagatagcggtgcgttgcttcgttcacctctttcagcgcatcctccagttgcccgttggagactttcagcttggtcagttccaatagtagcgtgtcgccaccctgcaacaatgagttcagcaactcacgctgagtgcgtagttgtgcttccagaatacggttttgctcggcggtcagcggctgaccgtcggcctgatgaatttgccgtagcagcggctgtttattaagcagatcctcataacgtaaccgttgcacacgcaactgcgccatttcggtatcaagctgttgtggtttcggcatttccggcagccgtgccacctgcgcccgcaacgcttcgccgagcaggttggacgatcccagccattgcgactgttcacgcagcgtattcagcgcctgccgaacctgtaacgtctggctggtggcctggcgctgttgcgaggcaacgagatccatccgctgcgcctgttgattcagtgccgccgatagttcgcggttaattttgaattgcgcgacgatgtctttcggcaaatcggcgctgttttctgccagcaattcggtactttccagcgcccgctccgcctcaagctgacgttggctgttcaactgattacgtaaggcctgcaaatacgcatccagttgctggctctctttttccgccagctctgagcgtaagcgcgctaattcctgacggttattggcagacagctgcgccagttccagttcatcaacgagcgctttcaggcgtgcggagtcagactgcaacgcgaaattttgtgcctgattgagcggggtattgccagtaagcgttcccaggcggcgctcgatctcatttaactgacggcgggcgtcggtttgctgttgcggcagttgattcagcgaatcggcaatctcgcgggcgcgctcctgctcttgctgggcctgacggcttttatccagcaactggctgctgacctggagaatttcctgattcagcgcgtcggtagacatccccggcgacacgctgcgcggttcgtcacgcatgttgtttaattgtgcgcgcagagtagcggaaagtttcgggtaattatcaatgacttcttgatattgcttgatgcgctcaagggaaccttttcgttcctcaagcgcatttaaggcggactggagcgcctctacgacttccggctgcgcgggtttcgccgcttttgcctgctccagttcttgtgagatttgtttgctatcgggggccgtcgcggcgtacgccccccaactgaggcaccaggccatcagaaaagtgataatcaggcgcacgtcagcgtttcctttgatggattagacctggtcttttttatcgtcaaccaatgggctggcgtcgtgttctgcttcgatctcttcagcaggaagcggggccggttcagcgtctggcgtaacaaaggtttcggtagatactgccagcggctggccaattttcgtgacagacaggctttccagttgctcaaccagattcactttacccggtgcaaacaggttgataacggtggaaccgagtttaaagcgacccatttcctggcctttcagcagtgccacagaaccgtcgttttccccggcaggccaggtccagcgcttgatgataccttcgcgcggcggcgtaatggtgcccgcccagaccgtctcaatgctgccaacaatcgtcgctccgaccagaatctgcgccattgggccaaattcggtatcgaaaaggcaaatcacgcgttcgttacgggcaaacagattcggcacgttctgagccgtgagatggttaacggagaagagatcgcccggtacgtagatcatctcacgcagaataccgttgcacggcatgtgtacgcgatggtagtcacgcggggagaggtaagtggtcacaaacgtaccgttgcggaacaggtccgccatcagatagttgcctgccagcagggcttcgaggctgtagttgtggcctttggcttgcaggattttatcttcttcgattttacccaactggctgataacgccatcggcaggcatgaccaggacattcggatcggtatcgattgggcgtacttcgtcacgcagcggacggacaaagaattcgttaaaggtgcggtagctggcggtgtccggcttttgcgcctctttcatgtcgaccttgtagtatttaacgaacagatcgataaccagttttgtcagccatcctgcccgcttgcttgcgccccaacccgccaggcgagtaagccatagtttcggcagaatgtactgtagcgaaagtttaaatgaatttaacaaggtagcctccaggccattgttttgtcgttcctgatccggcctacatgccggatcctgaaaaaaaggggacgattctaacgacggttagcttaattgtcagtcatccgtatcagaaaagtttttacgcgtttttacctgcgccatgctttccagaatacggtgatagttttcgaaacgggtttccgcgattttcccttcctcaaccgcttcccggatagcgcagcccggatcggtatcgtgtttgcaatcgcgatatttacacagacctaaatagtcatggaattcgacaaagccctgagtgatttgttccggctccaggtgccagaggccgaactcacgcacaccaggggaatcaatcacatcaccgccgtgcgggaagtgatacagccgagcggcggtcgtggtgtgctgaccgagccccgagttgtcagagacatcgttggtcaggatctctttttgcagccccagcaacgcattcagcaggctggatttgccgacgccagactgcccggcaaaaatgctgatgcgcccggtcaacgcctcttccagcggttttagcccatcctgagtatggctggaaaccatcaatacgcgataaccgatattgcggtagatatccatctgctcgttgacgaacgccatgccttcgtcgtccagcaggtctatcttgttgagcacaataatcggctcaatctgcaaggtttcgcaggccaccaggtaacggtcgataatattgagcgacagctccggcaaaatggcggagacaatgacaatctggtcgatgttggcggcaataggttttacgccgtcgtagaaatccggacgcgtcaacaccgaggtacgctcatgcaccgcttccacgatccctttgacatttacgccttccgccgccggtttacccggacgccagactacgcggtcgccggttaccagcgaacggatggtacggcgaatattgcagcggtgaacgtcgccatcggcggattccacatcagcgtgcataccaaagcggctgatgacgataccttcatcaggctcgccaaacagattgtcgtcgtagtcgggcttctccttagacgttttaagacgacgctggtgattggcgttcacgcggcgctgctggcctttggagagtttatttttactcaatcgtacagactcctggtcgcccctgatgggcaaaacatctatgatacacgcaattgtggatcaatatagtcactgtgaatgggtggaaaatagcatgagtgccaatgaaaacaacctgatttggatcgatcttgagatgaccggtctggatcccgagcgcgatcgcattattgagattgccacgctggtgaccgatgccaacctgaatattctggcagaagggccgaccattgcagtacaccagtctgatgaacagctggcgctgatggatgactggaacgtgcgcacccataccgccagcgggctggtagagcgcgtgaaagcgagcacgatgggcgatcgggaagctgaactggcaacgctcgaatttttaaaacagtgggtgcctgcgggaaaatcgccgatttgcggtaacagcatcggtcaggaccgtcgtttcctgtttaaatacatgccggagctggaagcctacttccactaccgttatctcgatgtcagcaccctgaaagagctggcgcgccgctggaagccggaaattctggatggttttaccaagcaggggacgcatcaggcgatggatgatatccgtgaatcggtggcggagctggcttactaccgcgagcattttatcaagctgtaaaatttttcctggtcacgtaagcgccggaatccacttgcggcggcgtgattttgacgctaaattgaacgtcttgctgataatttcagcacttgagataaaaacgcaaaaaaaacttttttggggggttgcagagggaaagatttctcgtataatgcgcctcccgtaacgacgcagaaatgcgaaaattacgaaagcaaaattaagtagtacgcgggaatagctcagttggtagagcacgaccttgccaaggtcggggtcgcgagttcgagtctcgtttcccgctccaaaatttgaaaagtgctgcaaagcacagaccacccaagcgggaatagctcagttggtagagcacgaccttgccaaggtcggggtcgcgagttcgagtctcgtttcccgctccaaaatttgaaagtgctgtaaggcacagaccacccaagcgggaatagctcagttggtagagcacgaccttgccaaggtcggggtcgcgagttcgagtctcgtttcccgctccaaattcttctctcaataaaatatccacagcgatgcgatgcgttattgctggttttcgttgtctctgacaaactcttgtaaacagagttatccacagcctcaggctgtaatcttaatttcaaagaaacttcgcacggtgaatagtatttttttaacctattgatagataagttaaaaattaagattccgttttgtcgagtcgatcacttgacgattttattcgtcttgaattgcaatgcgtttttatttttattcacaagctgtggatgaatcaggcgtcacgcggtaaccctttttcaatcacccgaaccagacgctgttttttcggcaattgcacttcgactatgcacgcatttcgtctctctatttgctgcgcaatcgcccacgctatgtgctcatcgaggagtgggtgctcacctttacgactttccagcgctgtcaaaatcgtttcatcccaaggggcattgcctaatgctacggcgatattacgcagccaacgcaggtgaccaatacgacgaatcgccgatccttccgtgacttttaaaaacttctcttcgctccaggcgaataactcaatgagttccggtgcgtgtagcggcttacgcgggctgaaatcctcttctgtggtgagttgtgaatagcgattccacgggcagataagctggcagtcatcgcaaccgtaaatacggtttcccattaacggtcgcaactcttccgggatcgccccttcaagttcgatggtgagataagagatacagcggcgagcatcgacggtatatggctcgacgatggcaccggtcgggcaaatcgtcatacaggccacgcatttaccgcatccttcctcgactggttgatccacgggcagcggaatatcgaccagcaattcgcctaaaaagaagaaagaaccggcctcgcgattgaggataagtgagtgcttacctgtccagccgagcccagctttttcagctaacgggcgctcgagaataggcgcagaatcgacaaacggtctaaaattcagcgaaacacaatgttgctgaatcatctcgcccagctttttgagtcggttgcgcagaagtttgtgatagtcacggcccagcgcataacggctaacatagccgagtttggggtttttcagcgtgctggcaaatgcggcgttagcaggaaggtaattcatccgcacgctgatcacgcgcagcgtaccgggcaataattcatgggggcgagcgcgcagcataccgtgacgtgccatccagtccatttcgccgtggtattgtttgtccagccatgcttgcagtttgggctcggactcgctgagatcggtatcggtaatacctacctgctgaaagcccagttccagcccccactgtttaattttttgcgctaactgattgagatcgaggggctctgacatgacggaccatacaatgaagaaaaaccccgtaagtataccacacaccgtctggcacgccgacgatatccgccgcggagaacgtgaggcggcagatgcgctggggcttacactctatgagctgatgcttcgcgctggcgaagccgcattccaggtgtgtcgttcggcgtatcctgacgcccgccattggctggtgctgtgcggtcatggtaataacggcggcgatggctacgtggtcgcgcggctggccacagcggtcggcattgaggtcacgctgctggcccaggagagcgacaaaccgttgccggaagaggccgcgctggcacgcgaagcatggttaaacgcgggaggcgagatccatgcttcgaatattgtctggcccgaatcggtagatctgattgttgatgcgctgctcggtaccggcttgcagcaagcgccccgcgaatccattagccagttaatcgaccacgctaattcccatcctgcgccgattgcggcggttgatatcccttccggcctgctggctgaaaccggcgctacgccaggcgcagtgatcaacgccgatcacaccatcacttttattgcgctgaaaccaggcttgctcactggaaaagcgcgggatgttaccggacaactgcattttgactcactggggctggatagttggctggcaggtcaggagacgaaaattcagcggttttcggcagaacaactttctcactggctaaaaccgcgtcgcccgacttcgcataaaggcgatcacgggcggctggtaattatcggtggcgatcacggcacggcgggggctattcgtatgacgggggaagcggcgctacgtgctggtgctggtttagtccgagtactgacccgcagtgaaaacattgcgccgctgctgactgcacgaccggaattgatggtgcatgaactgacgatggactctcttaccgaaagcctggaatgggccgatgtggtggtgattggtcccggtctgggccagcaagagtgggggaaaaaagcactgcaaaaagttgagaattttcgcaaaccgatgttgtgggatgccgatgcattgaacctgctggcaatcaatcccgataagcgtcacaatcgcgtgatcacgccgcatcctggcgaggccgcacggttgttaggctgttccgtcgctgaaattgaaagtgaccgcttacattgcgccaaacgtctggtacaacgttatggcggcgtagcggtgctgaaaggtgccggaaccgtggtcgccgcccatcctgacgctttaggcattattgatgccggaaatgcaggcatggcgagcggcggcatgggcgatgtgctctctggtattattggcgcattgcttgggcaaaaactgtcgccgtatgatgccgcctgtgcgggctgtgtcgcgcacggtgctgcagctgacgtactggcggcgcgttttggaacgcgcgggatgctggcaaccgatctcttttccacgctacagcgtattgttaacccggaagtgactgataaaaaccatgatgaatcgagtaattccgctccctgatgagcaggcaacattagacctgggcgagcgggtagcgaaagcctgcgatggcgcaaccgtaatctatctgtatggcgatttaggcgcaggtaaaaccacctttagccggggctttttacaagctctgggtcatcagggtaatgtcaaaagccccacttatacgctggtcgaaccctatacgctcgacaatttaatggtttatcactttgatttgtaccgccttgccgatcccgaggagctggagtttatggggattcgcgattattttgccaacgatgccatctgcctggtggagtggccacaacaaggtactggtgttcttcctgacccggatgtcgaaatacacattgattatcaggcacaaggccgtgaggcgcgcgtgagtgcggtttcctctgcgggtgaattgttgctggcgcgtttagccggttaacctttgaaaggtggcgggatgatgtatcgcatcagaaattggttggtagcgacgctgctgctgctgtgcacgccggtgggtgccgcgacgctctctgatattcaggtttctaacggtaatcaacaggcgcggataacgttgagttttattggcgatcctgattatgcgtttagccatcaaagcaaacgcaccgtggcgctcgatatcaaacaaacgggcgtgattcagggactgccgttgttgttcagcggcaataatctggtgaaggcgattcgctctggaacgcctaaagatgcacaaacgctacggctggtggtcgatcttaccgaaaacggtaaaaccgaagcggtgaagcggcagaatggcagcaattacactgtcgtctttacgattaacgccgatgcgccgccacctcctcctccgccgcccgtggttgcgaaacgcgttgaaacgcctgcggttgtcgcaccgcgcgtcagcgaaccggcgcgcaatccgtttaaaacggaaagtaaccgcactacgggtgttatcagcagtaatacggtaacgcgtccggcagcgcgcgcgacggctaacactggcgataaaattatcatcgctattgatgccggacacggcggtcaggaccctggcgctatcggccccggtggtacgcgggagaaaaatgtcaccatcgccatcgcgcgtaaattgcgtactttgctcaatgacgatccgatgtttaagggcgttttaacccgtgacggggattactttatctcggtgatggggcgcagtgatgtggcacgtaagcaaaacgccaatttcctcgtgtcgattcacgctgatgccgcaccgaaccgcagtgcgactggcgcttccgtatgggtgctctctaaccgtcgcgccaacagcgaaatggccagctggctggagcagcacgagaaacagtcggagctgctgggtggggcgggtgatgtgctggcgaacagtcagtctgacccctatttaagccaggcggtgctggatttacagttcggtcattcccaacgggtagggtatgatgtagcgaccagtatgatcagtcagttgcaacgcattggcgaaatacataaacgccgaccagaacacgcgagtctcggcgttctgcgttcgccggatatcccgtcagtactggtcgaaaccggttttatcagcaacaacagcgaagaacgtttgctggcgagcgacgattaccaacaacagctggcagaagccatttacaaaggcctgcgcaattatttccttgcgcatccgatgcaatctgcgccgcagggggcaacggcacaaactgccagtacggtgacgacgccagatcgcacgctgccaaactaaggacgattgatgccaattcaggtcttaccgccacaactggcgaaccagattgccgcaggtgaggtggtcgagcgacctgcgtcggtagtcaaagaactggtggaaaacagcctcgatgcaggtgcgacgcgtatcgatattgatatcgaacgcggtggggcgaaacttatccgcattcgtgataacggctgcggtatcaaaaaagatgagctggcgctggcgctggctcgtcatgccaccagtaaaatcgcctctctggacgatctcgaagccattatcagcctgggctttcgcggtgaggcgctggcgagtatcagttcggtttcccgcctgacgctcacttcacgcaccgcagaacagcaggaagcctggcaggcctatgccgaagggcgcgatatgaacgtgacggtaaaaccggcggcgcatcctgtggggacgacgctggaggtgctggatctgttctacaacaccccggcgcggcgcaaattcctgcgcaccgagaaaaccgaatttaaccacattgatgagatcatccgccgcattgcgctggcgcgtttcgacgtcacgatcaacctgtcgcataacggtaaaattgtgcgtcagtaccgcgcagtgccggaaggcgggcaaaaagaacggcgcttaggcgcgatttgcggcaccgcttttcttgaacaagcgctggcgattgaatggcaacacggcgatctcacgctacgcggctgggtggccgatccaaatcacaccacgcccgcactggcagaaattcagtattgctacgtgaacggtcgcatgatgcgcgatcgcctgatcaatcacgcgatccgccaggcctgcgaagacaaactgggggccgatcagcaaccggcatttgtgctgtatctggagatcgatccgcatcaggtggacgtcaacgtgcaccccgccaaacacgaagtgcgtttccatcagtcgcgtctggtgcatgattttatctatcagggcgtgctgagcgtgctacaacagcaactggaaacgccgctaccgctggacgatgaaccccaacctgcaccgcgttccattccggaaaaccgcgtggcggcggggcgcaatcactttgcagaaccggcagctcgtgagccggtagctccgcgctacactcctgcgccagcatcaggcagtcgtccggctgccccctggccgaatgcgcagccaggctaccagaaacagcaaggtgaagtgtatcgccagcttttgcaaacgcccgcgccgatgcaaaaaccaaaagcgccggaaccgcaggaacctgcacttgcggcgaacagtcagagttttggtcgggtactgactatcgtccattccgactgtgcgttgctggagcgcgatggcaacatttcacttttatccttgccagtggcagaacgttggctacgtcaggcacaattgacgccgggtgaagcgcccgtttgcgcccagccgctgctgattccgttgcggctaaaagtttctgccgaagaaaaatcggcattagaaaaagcgcagtctgccctggcggaattgggtattgatttccagtcagatgcacagcatgtgaccatcagggccgtgcctttacccttacgccaacaaaatttacaaatcttgattcctgaactgataggctacctggcgaagcagtccgtattcgaacctggcaatattgcgcagtggattgcacgaaatctgatgagcgaacatgcgcagtggtcaatggcacaggccataaccctgctggcggacgtggaacggttatgtccgcaacttgtgaaaacgccgccgggtggtctgttacaatctgttgatttacatccggcgataaaagccctgaaagatgagtgatatcagtaaggcgagcctgcctaaggcgatttttttgatggggccgacggcctccggtaaaacggcgttagccattgagctgcgtaaaattttaccagtagagttgataagcgttgattctgcccttatttacaaagggatggatatcgggacggcgaagccgaacgctgaagagttactcgccgcgccgcaccgattgctggatattcgcgatccgtcgcaggcttactcggctgctgattttcgccgcgatgcgctggcggaaatggccgatatcaccgcggcggggcggatcccactgttagtgggcggtacgatgttgtatttcaaggcattgctggaagggttgtcgccgctaccgtcggcagacccggaagtgcgggccagaattgagcaacaggcggcagagcaaggttgggagtcattgcatcgtcaacttcaggaggtagatccggttgcggcagcaaggattcatccaaatgatccacaaaggctttcccgggcactggaagtttttttcatttcgggtaaaactttaacggaactgacgcaaacgtcaggagacgctctaccgtatcaggtgcatcagttcgccatcgccccggcgagccgtgaactgctccatcaacgcattgagcagcgttttcatcagatgttggcttcaggttttgaagcagaagtccgggcgctttttgcccgaggagatttgcatacggacttgccttccattcgttgcgtgggttatcgccagatgtggtcttaccttgaaggcgaaatctcatacgatgaaatggtttatcgaggtgtttgcgccacgagacagttggcgaagcggcagataacctggctgcgtggttgggaaggggttcactggcttgacagtgaaaaaccagaacaggcgcgtgacgaagtattacaggttgttggtgctatcgcaggctgaatgtgtacaattgagacgtatcgtgcgcaattttttcagaatcgaaaggttcaaagtacaaataagcatataaggaaaagagagaatggctaaggggcaatctttacaagatccgttcctgaacgcactgcgtcgggaacgtgttccagtttctatttatttggtgaatggtattaagctgcaagggcaaatcgagtcttttgatcagttcgtgatcctgttgaaaaacacggtcagccagatggtttacaagcacgcgatttctactgttgtcccgtctcgcccggtttctcatcacagtaacaacgccggtggcggtaccagcagtaactaccatcatggtagcagcgcgcagaatacttccgcgcaacaggacagcgaagaaaccgaataaggtttcgggctgttttttttacacggggagccagcgatcctgcgttccccgctgatctatttagagggttatacgcttgtttgaccgttatgatgctggtgagcaggcggtactggtacacatctattttacgcaagacaaagatatggaagacctccaggagtttgaatctctggtctcttccgccggtgtcgaagcattgcaggtgattaccggtagccgtaaagcgccgcacccaaagtattttgtaggtgaaggtaaagcagttgaaattgcggaagctgtcaaagcgacgggtgcttcggtcgttctttttgaccatgccctgagcccggcgcaagagcgtaacctggagcgtttgtgcgagtgtcgtgttatcgaccgcaccggccttattttagatattttcgcccaacgtgcgcgtacccatgagggtaagttgcaggttgagctggcgcagctgcgccatctggctacgcgcctggtgcgtggctggacccaccttgaaagacagaaaggcgggataggtttgcgtggtccgggtgaaacccagctcgaaaccgaccgtcgtttgttgcgtaatcgcatcgtgcagatacagtcacgcctggaaagagttgaaaagcagcgtgagcaggggcggcaatcgcgtatcaaagccgacgttcctactgtttcgctggtgggatataccaacgccggtaaatctacccttttcaatcgcatcaccgaagcgcgggtctacgcggcagaccagttgtttgccaccctcgacccgacgttgcggcgtattgacgttgcagatgtcggtgaaaccgtacttgcagataccgtagggtttattcgccacctgccgcacgatctggtggcggcatttaaagccacgttacaagagacgcggcaagccacattactgctgcacgtcattgatgcggcggatgtgcgtgtacaagaaaacatcgaagcggtgaatacggttcttgaagagatcgacgctcacgagatcccaaccctgctggtgatgaacaagatcgatatgctggaagatttcgaaccgcgtattgatcgggacgaagagaacaaaccgatccgtgtctggctttccgcacagaccggagcggggataccacagctttttcaggctttgacggagcggctttccggcgaggtggcgcagcatacattgcgtttgccgccgcaggaagggcgtctgagaagtcgtttttatcagcttcaggcaatagaaaaagagtggatggaggaggacggcagcgtaagtctgcaagttcgtatgccgatcgttgactggcgtcgcctctgtaaacaagaaccggcgttgatcgattacctgatctaacggcgtagcgtctgaagcgtggagtcatatcctctggcgtcgaaagacaacagggatcaccgcataacaaatatggagcacaaacatggcgtggaatcagcccggtaataacggacaagaccgcgacccgtggggaagcagcaaacctggcggcaactctgagggaaatggaaacaaaggcggtcgcgatcaagggccacctgatttagatgatatcttccgcaaactgagcaaaaagctcggtggtctgggcggcggtaaaggcaccggatctggcggtggcagttcatcgcaaggcccgcgcccgcagcttggcggtcgtgtcgttaccatcgcagcggcagcgattgtcattatctgggcggccagtggtttctataccattaaagaagccgaacgcggcgtggtaacacgctttggtaaattcagccatctggttgagccgggtctgaactggaaaccgacgtttatcgacgaagtcaaaccggtgaacgtggaagccgtgcgtgaactggccgcttccggtgtgatgttgacgtcggacgagaacgtagtgcgcgttgagatgaacgtgcagtaccgcgttaccaatccggaaaaatatctgtatagcgtgaccagcccggatgacagtctgcgtcaggctaccgacagcgccctgcgcggggttatcggtaaatacaccatggaccgcattctgacggaaggtcgtaccgtgattcgtagcgatactcagcgcgaactggaagagactatccgtccgtatgacatgggtatcacgctgctggacgtcaacttccaggctgctcgtccgccggaagaagtaaaagcggcgtttgacgatgcgattgccgcgcgtgaaaacgaacagcaatacattcgtgaagcagaagcgtataccaacgaagttcagccgcgtgcgaacggtcaggcgcaacgtatcctcgaagaggcgcgtgcgtacaaggcccagaccatcctggaagctcagggtgaagtggcgcgctttgctaaacttctgccggaatataaagccgcgccggaaattactcgcgagcgtctgtatatcgagacgatggaaaaagtgttgggtaacacccgcaaagtgctggttaacgataaaggtggcaacctgatggttctgccgttagaccagatgctgaaaggtggtaacgcccctgcggcgaagagcgataacggtgccagcaatctgctgcgtctgccgccagcctcttcctccacaaccagtggagcaagcaacacgtcgtccaccagtcagggcgatattatggaccaacgccgcgccaacgcgcagcgtaacgactaccagcgtcagggggaataacgatgcgtaagtcagttatcgcgattatcatcatcgtgctggtagtgctttacatgtctgtctttgtcgtcaaagaaggtgagcgcggtattacgctgcgttttggtaaggtactgcgtgacgatgacaacaaacctttggtttatgagcctggtctgcatttcaagataccgttcattgaaacggtgaaaatgctcgacgcacgtattcagaccatggacaaccaggccgaccgctttgtgaccaaagagaagaaagacctgatcgtcgactcttacatcaaatggcgcatcagcgatttcagccgttactacctggcaacgggtggtggcgacatttcgcaagcggaagtgctgttgaaacgtaagttctctgaccgtctgcgttctgaaattggtcgcctggacgtgaaagacatcgtcaccgattcccgtggtcgtctgaccctcgaagtacgtgacgcgctgaactccggttctgcgggtacagaagatgaagttactaccccggcggcagataacgccattgccgaagcggcagagcgcgtaacggctgagacgaagggcaaagttccggtcatcaacccgaacagtatggcggcgctgggtattgaagttgtcgatgtgcgtatcaagcagatcaacctgccgaccgaagtgtctgaagcgatctacaaccgtatgcgcgccgagcgtgaagcggtagcgcgtcgtcaccgttcacaaggtcaggaagaagcggaaaaactgcgcgcgactgccgactatgaagtgaccagaacgctggcagaagctgagcgtcagggccgcatcatgcgtggtgaaggcgatgccgaagcagccaaactgtttgctgatgcattcagtaaagatccggacttctacgcattcatccgtagcctgcgtgcttatgagaacagcttctctggcaatcaggacgtgatggtcatgagcccggatagcgatttcttccgctacatgaagacgccgacttccgcaacgcgttaatataacgactgcggtacaggtcaataaagccaccgcatcctcagggatgtcggtggttttctttttctataaggataatgaatgaattcgacaatctggctggcgcttgccctggttttggtactggaaggtttagggccgatgctttacccgaaggcatggaagaagatgatctctgcgatgaccaatttgcccgataatattttacgtcgttttggcggtggacttgtggttgcgggcgttgtggtctactacatgttgaggaaaacgattggctgaacaaaaaacagactgatcgaggtcatttttgagtgcaaaaagtgctgtaactctgaaaaagcgatggtagaatccatttttaagcaaacggtgattttgaaaaatgggtaacaacgtcgtcgtactgggcacccaatggggtgacgaaggtaaaggtaagatcgtcgatcttctgactgaacgggctaaatatgttgtacgctaccagggcggtcacaacgcaggccatactctcgtaatcaacggtgaaaaaaccgttctccatcttattccatcaggtattctccgcgagaatgtaaccagcatcatcggtaacggtgttgtgctgtctccggccgcgctgatgaaagagatgaaagaactggaagaccgtggcatccccgttcgtgagcgtctgctgctgtctgaagcatgtccgctgatccttgattatcacgttgcgctggataacgcgcgtgagaaagcgcgtggcgcgaaagcgatcggcaccaccggtcgtggtatcgggcctgcttatgaagataaagtagcacgtcgcggtctgcgtgttggcgaccttttcgacaaagaatccttcgctgaaaaactgaaagaagtgatggaatatcacaacttccagttggttaactactacaaagctgaagcggttgattaccagaaagttctggatgatacgatggctgttgccgacatcctgacttctatggtggttgacgtttctgacctgctcgaccaggcgcgtcagcgtggcgatttcgtcatgtttgaaggtgcgcagggtacgctgctggatatcgaccacggtacttatccgtacgtaacttcttccaacaccactgctggtggcgtggcgaccggttccggcctgggcccgcgttatgttgattacgttctgggtatcctcaaagcttactccactcgtgtaggtgcaggtccgttcccgaccgaactgtttgatgaaactggcgagttcctctgcaagcagggtaacgaattcggcgcaactacggggcgtcgtcgtcgtaccggctggctggacaccgttgccgttcgtcgtgcggtacagctgaactctctgtctggcttctgcctgactaaactggacgttctggatggcctgaaagaggttaaactctgcgtggcttaccgtatgccggatggtcgcgaagtgactaccactccgctggcagctgacgactggaaaggtgtagagccgatttacgaaaccatgccgggctggtctgaatccaccttcggcgtgaaagatcgtagcggtctgccgcaggcggcgctgaactacatcaagcgtattgaagagctgactggtgtgccgatcgatatcatctctaccggtccggatcgtactgaaaccatgattctgcgcgatccgttcgacgcgtaattctggtacgcctggcagatattttgcctgccgggctaacagtgtgatacattgctgtgtcggttaagccattacgctatccgacacagtgttaaatcctcgcttttttccttccccgaactgaaataaattagcgacacagcttgtggctggtttatcatcaatataaatgtattttttcccgatttcccttttgaggttgatgtgcagttaacgagtttcactgattacggattacgtgcgctgatctacatggcgtcattgccagaagggcggatgaccagtatttctgaagtgactgacgtctacggcgtctcccgtaatcatatggtcaaaataatcaatcaacttagtcgtgccggctacgtgactgctgttcgtggaaaaaatggcggcattcgcctgggtaaatcggcgagtgcgatacgtattggtgatgtggtgcgcgagctggagcccttatcgctggtgaattgcagcagtgagttttgccacattacacctgcctgtcggttgaaacaggcgctttctaaggccgtgcaaagttttcttacggaactggataactacacgcttgccgatttggttgaagagaatcaaccgctttataaattattgctggtggagtgacgaaaatcttcatcagagatgacaacggaggaaccgagatgtcacaagatcctttccaggaacgcgaagctgaaaaatacgcgaatcccatccctagtcgggaatttatcctcgaacatttaaccaaacgtgaaaaaccggccagccgtgatgagctggcggtagaactgcacattgaaggcgaagagcagcttgaaggcctgcgtcgccgcctgcgtgcgatggagcgcgatggtcaactggtcttcactcgtcgtcagtgctatgcgctgccggaacgcctcgacctggtgaaaggtaccgttattggccaccgtgatggctacggctttctgcgggttgaagggcgtaaagatgatttgtatctctccagcgagcagatgaaaacctgcattcatggcgatcaggtgctggcgcagccgctgggcgctgaccgtaaaggtcgtcgtgaagcgcgtattgtccgcgtactggtgccaaaaaccagccagattgttggtcgctactttactgaagcgggcgtcggctttgtggttcctgacgatagccgtctgagcttcgatatcttaatcccgcccgatcagatcatgggcgcgcggatgggctttgtggtcgtagtcgaactgactcagcgtccgactcgccgcaccaaagcggtgggtaaaatcgtcgaagtgctgggcgacaatatgggcaccggcatggcggttgatatcgctctgcgtacccatgaaattccgtacatctggccgcaggctgttgagcaacaggttgccgggctgaaagaagaagtgccggaagaagcaaaagcgggccgtgttgatctgcgcgatttaccgctggtcaccattgatggcgaagacgcccgtgactttgacgatgcagtttactgcgagaaaaaacgcggcggcggctggcgtttatgggtcgcgattgccgacgtcagctactatgtgcgtccgccaacgccgctggacagagaagcgcgtaaccgtggcacgtcggtgtacttcccttcgcaggttatcccgatgctgccggaagtgctctctaacggcctgtgttcgctcaacccgcaggtagaccgcctgtgtatggtgtgcgagatgacggtttcgtcgaaaggccgcctgacgggctacaaattctacgaagcggtgatgagctctcacgcgcgtctgacctacaccaaagtctggcatattctgcagggcgatcaggatctgcgcgagcagtacgccccgctggttaagcatctcgaagagttgcataacctctataaagtgctggataaagcccgtgaagaacgcggtgggatctcatttgagagcgaagaagcgaagttcattttcaacgctgaacgccgtattgaacgtatcgaacagacccagcgtaacgacgcgcacaaattaattgaagagtgcatgattctggcgaatatctcggcggcgcgtttcgttgagaaagcgaaagaaccggcactgttccgtattcacgacaagccgagcaccgaagcgattacctctttccgttcagtgctggcggagctggggctggagctgccgggtggtaacaagccggaaccgcgtgactacgcggaactgctggagtcggttgccgaccgtcctgatgcagaaatgctgcaaaccatgctgctgcgctcgatgaaacaggcgatttacgatccagaaaaccgtggtcactttggcctggcattgcagtcctatgcgcactttacttcgccgattcgtcgttatcctgacctgacgctgcaccgcgccattaagtatctgctggcgaaagagcaggggcatcagggcaacaccactgaaaccggcggctaccattattcgatggaagagatgttgcaactgggtcagcactgttcgatggcggaacgtcgtgccgacgaagcaacgcgcgatgtcgctgactggctgaagtgtgacttcatgctcgaccaggtaggtaacgtctttaaaggcgtaatttccagcgtcactggctttggcttcttcgtccgtctggacgacttgttcattgatggtctggtccatgtctcttcgctggacaatgactactatcgctttgaccaggtagggcaacgcctgatgggggaatccagcggccagacttatcgcctgggcgatcgcgtggaagttcgagtcgaagcggttaatatggacgagcgcaaaatcgactttagtctgatctccagtgaacgcgcaccgcgcaacgtcggtaaaacggcgcgcgagaaagcgaaaaaaggcgatgcaggcaaaaaaggcggcaagcgtcgtcaggtcggtaaaaaggtaaactttgagccagacagcgccttccgcggtgagaaaaaaacgaagccgaaagcggcgaagaaagacgcgagaaaagcgaaaaagccatcggcgaaaacgcagaaaatagccgcagcgaccaaagcgaagcgtgcggcgaagaaaaaagtggcagagtgatcaataccctctttaaaagaagagggttagattgctgacaaaatgcgctttgttcatgccggatgcggcgtgaacgccttatccggcctacataatcacgcaaattcaatatattgcagagatcatgtaggccggataaacgtagtgcatcaggcaaaacgtaaacaacgagtacattaatgagcgaaatgatttacggcatccacgcagtgcaggccctgctggagcgcgcccctgaacgttttcaggaagtctttattttaaaaggccgtgaagataaacgtctgttaccgctgattcacgcccttgagtctcagggcgtggttatccagttggcaaaccgccaatatctcgacgagaaaagcgacggtgccgtgcatcagggcattatcgcccgcgtgaagccaggacgtcagtatcaggaaaacgatctgccggatctgatcgcttcgctcgatcaaccgttcctgctgatcctcgacggtgtaaccgatccgcacaacctcggcgcgtgcctgcgtagcgcggacgctgctggcgttcacgcggtgattgtgccgaaagatcgctccgcacagctcaacgctacggcgaaaaaagtagcctgcggcgcggcagaaagcgttccactgattcgggtgactaaccttgcgcgcaccatgcgtatgttgcaggaagagaatatctggatcgtcggtacggcaggcgaggcggatcatacactctatcagagcaaaatgaccggacgcctggcgctggtgatgggcgcggaaggtgaaggtatgcgtcgcctgacccgtgaacattgcgatgagttgatcagcatcccaatggcaggaagtgtttcttccctgaacgtttcggttgcaaccggaatttgcttatttgaagcggttcgtcagcgcagctagttcgtctgaattatgaaaagccatccagatttggatggtttttttttgtctatagctggtaagataattacgtactgcaaatattcattttattaatatttaaactaaatctatatggaataatatatgacatggaatccgttggcgctggcgacggcgctgcaaactgtacctgaacaaaatattgatgtgacaaatagcgagagcgcattaattattaaaatgaatgattatggcgatttgcaaatcaatattctttttacttcccgccaaatgattatcgaaacctttatttgtccggtaagtagtatcagcaatccagatgaatttaataccttcttattaagaaatcagaagatgatgccgttgtcatcggtaggaatctccagcgtgcaacaggaagagtattacattgttttcggggcgttatcgcttaaatcttctcttgaagatatcctgcttgagataacctcgctggtagataacgcattggatctggctgaaattacagaagaatattcacactaattacaaggacgggtatttatgggaattttaaaaagtttatttacgctggggaaatcgtttatctcccaggcggaagaatccattgaagaaacccagggcgtgcgcatgctggaacagcatattcgtgacgctaaagctgaactcgataaagccggaaaatctcgcgttgatctgctggcgcgggtgaaattaagtcacgataagctgaaagatttacgtgagcgcaaagccagtctggaagcccgtgcgctggaagcgttaagcaagaacgttaatccgtcgttgattaacgaagttgctgaagaaatcgcgcgccttgagaatctcattaccgctgaagagcaagtgttgtcgaatctggaagtctcccgtgatggcgtggaaaaagcagttacagcgacagcgcagcgtatcgctcagtttgagcagcaaatggaagtcgttaaagccactgaagccatgcagcgtgcacaacaggctgtaacaacctctaccgttggcgcatcttccagcgtttcgacagcggcagaatccttaaaacgcctgcaaacgcgtcaggccgaacgtcaggctcgcctggatgctgctgcacagttggaaaaagtcgcagacggtcgcgatcttgatgaaaagctggcggaagccggaattggcggtagcaataaaagtagcgcccaggatgtattagcaagactgcaacgccaacagggcgagtaatttttttgccagcctcgctaaaaggctggcaactattttaaggataaaatatgtctggttttttccagcgtctgtttggcaaggataataagcctgctatcgctcgcggtccgctgggacttcatctcaatagtggctttacgctcgacacgttagcgtttcgtttgctggaagatgaattgctgattgcgctgccgggtgaggaatttacggtagccgctgtcagccacatcgatctgggcggcggtagtcagattttccgctactacacttcaggcgatgaatttctgcaaatcaataccaccggcggcgaagatattgatgacattgatgatatcaagctctttgtctatgaagagagctacggtatcagtaaagagagtcactggcgcgaggcgatcaacgccaaagtgatgggggcaatgatcttaaactggcaggaaaaacgctggcagcgattttttaacagcgaagaaccgggaaatatcgaacccgtctacatgctggaaaaagtagaaaatcaaaaccatgccaaatgggaggtccataattttaccatgggctaccaacgccaagtaaccgaagatacttacgaatatttgctgttaaatggtgaggaatcttttaacgatctcggcgagccagagtggttattttcgcgcgcgttgggtgtcgatatcccgctgacatcacttcatattattggttaattacaaggacgtttacaatgcatatactggattcacttcttgcctttagtgcctatttttttattggcgtggctatggtgattatttttctgtttatctactccaaaattacaccgcacaacgaatggcaattaatcaaaaacaataataccgcggcgtcactggcattcagcggtacattgttcggttacgtgatccccttatccagtgcggcaatcaatgcggtgagtattccagactatttcgcctggggcgggattgcactggtgattcagttactcgtttttgctggtgtcagactttatatgcccgcattaagcgaaaaaattattaatcacaataccgcagcaggaatgtttatgggaaccgccgcactggctggtggtatttttaacgcagcttgtatgacatggtaatggacgatcatggccagaaaacgcaaatcaagaaataacagtaaaattggtcacggagcgatcagtcgcattggaagaccgcataatccttttgagccgcgccgcaatcgctacgcacaaaaatacttaacgttggtgctaatgggcggtgccgtttttttaatagtcaaaggatggagtgaaagtggcgatgtcgataacgacggcgacggaacgttttattcgacagtgcaggattgtattgatgacggtaataatgccgacatttgcgcgcgtggctggaacaacgccaaagcggcattttatgccgatgttccgaagaatatgactcagcagaactgtcagtctaagtacgaaaattgctactacgacaatgttgaacagagttggatcccggtcgtttctggatttttgttaagccgagttattcgtaaagatcgcgatgagccgttcgtctataacagcggcggatcctcatttgcttcccgccccgtctggcgcaacacttccggtgattactcctggcgctccggttctggcaaaaaagagtcttactcttcaggcggctttaccaccaaaaaagcgtcaaccgtttcgcgcggcggctatggtcgttcttccagcgcccgtgggcattggggaggctaatcatgctgagacacaacgttcctgtgcgacgggatctggaccagatcgccgctaacaacggtttcgactttcatatcatcgacaatgaaatctattgggatgagagtcgggcttaccgttttactctgcgccagattgaagagcagatcgaaaaaccgactgcggaactgcatcagatgtgccttgaggtggtggatcgcgcggttaaagacgaagagatcctgacgcaactggcgatcccgccgttgtactgggatgtgatcgccgaaagctggcgcgcacgcgatccttcgctgtatggccggatggattttgcctggtgtggcaatgcgccggtgaagctgctggagtacaacgccgatacgccgacctcgttgtatgagtcggcttatttccagtggttgtggctggaggatgcccggcgcagcggcattattccgcgtgatgccgatcagtacaatgccattcaggaacgcctgatttcacgctttagcgagctttatagccgggagccgttttatttctgctgctgtcaggacaccgatgaagacaggactaccgtgctgtacttgcaggactgcgctcagcaggcagggcaggagtcgcggtttatctacattgaagatctcggtttgggcgtcggcggtgtactgaccgatcttgatgataatgtcatccagcgtgcatttaagctgtatccgctggagtggatgatgcgtgacgataacggtccgctgctgtgcaagcgtcgcgagcaatgggtggagccgttatggaaaagtatcttgagtaataaagggctaatgccgctgctttggcgcttcttccctggtcatcctaaccttcttgcatcctggtttgagggtgaaaaatcgcagattgccgctggcgaaagctatgtgcgtaaaccgatctactcgcgcgaaggcggaaacgtcaccattttcgacggtcagaataacgtcgttgaccacgctgatggtgattacgccgatgaaccgatgatctaccaggcgtttcaacctctgccgcgatttggcgatagctacacactcatcggtagctggattgtcgatgatgaagcgtgcggaatggggatccgtgaagataacacactgatcaccaaagacacctcacgtttcgttccgcattacattgctggataagaatgttttagcaatctctttctgtcatgaatccatggcagtgaccatactaatggtgactgccattgatggagggagacacagtgcactggcaaactcacaccgtttttaatcaacctataccattaaataacagcaacttatacctgtctgatggcgcgctctgcgaagcggtaacgcgtgaaggtgctggctgggatagcgattttctagccagtattggtcagcagttaggaacggctgaatcccttgaactggggcggctggcgaatgtgaatccgcctgaattattgcgctacgatgcgcaaggacgccgtctggacgatgtgcgttttcaccccgcctggcacctgctgatgcaggcgctatgtaccaatcgggtgcacaatcttgcctgggaagaagacgctcgctccggcgcatttgtggcgcgcgcggcgcgttttatgttgcacgcacaggttgaggcagggtcgttatgtccgataaccatgacctttgccgccacgccattgctgttacagatgttacccgcgccgtttcaggactggaccacgccgctgctaagcgatcgctacgattctcacttattgccaggtgggcaaaaacgcggtttgttgattggcatgggaatgacggaaaagcagggcggttccgatgtcatgagcaacaccacccgcgcagagcgcctggaagatggctcttatcggctggtggggcataaatggtttttctcggtgccgcaaagcgatgcgcatctggtgctggcgcagactacgggcggtttgtcctgcttttttgtgccgcgctttttgcctgacgggcaacgcaacgcgattcgcctcgagcggctgaaagataagctgggtactgagagatcccctcataatttccccaaagcgtaaccatgtgtgaataaattttgagctagtagggttgcagccacgagtaagtcttcccttgttattgtgtagccagaatgccgcaaaacttccatgcctaagcgaactgttgagagtacgtttcgatttctgactgtgttagcctggaagtgcttgtcccaaccttgtttctgagc

SEQ ID NO: 64 - DNA, 41513 bp, Escherichia coli
  source 1..41513: mol_type = genomic DNA
gccatgatcaaactcttcaatttaaaagtttgatgctcaaagaattaaacttcgtaatgaattacgtgttcactcttgagacttggtattcatttttcgtcttgcgacgttaagaatccgtaccttcgagtgcccacacagattgtctgataaattgttaaagagcagtgccgcttcgctttttctcagcggcgcggggtgtgcataatacgctttcccgctacagagtcaagcatttatttttgctttctctgtcggaattctcaggagaaccccgctgacccggcggcgtgtttgccgttgttccgtgtcagtggtggcgcattatagggagttattccggcctgacaagaggaaatttaaaataattttctgaccgcgcaacattcaaccaaatcagcctaaaactgccagtttttcgagcgtttcgaagccgtaacgctgtaaaacgggcaataattgttcagcttctggcgtcattgccatacaaaaggcaatattcgcatcggcagattttgcatccggagcttcatgttctaacagccaggccgttctgcgagcaatcgctgcgccagaatccaccagccgggttccctctggcagcacctgtaagagttcttcttgtagtagagggaaatgggtgcaacccaatacaacggtatctggcggctctttcattcttaaccacgggcgtaggatacgttttagtgcatccagagaaacatcttcgccatgcagcttcgcttcagccaactcaaccatctctgccgagcccagcatttctatctggcattcattagcgaaacgcgcgatcagctcatgagtataagaacgtttaacagttccgcgggttgccagtaatccgacaatgccatttgccgtcagacgtgcagcaggtttaatcgccggcacgacaccaacaaccgggaagtcgaacttttcgcgtaatgcaggaagtgaaacggtactggcggtgttgcaagcgaccacagccagcgcaaggggataacgttcttgcactgcggtgacaattgccaccactcgctcaacaataaactcttcgcttttttcgccatacggaaaagcgacgttatcgaaagcataaatgtaatggagatccggtaagagatgccggatctcgtcatagaccgacaacccaccgacgccggagtcaaacaccagcacggtgggacgtggttcagaaggtgtagctgccagacaaggtgtattcccgtcctgcagtttggtagccatagactgtctcataatctttgtcgaacaggttggctattttaccacgaactgtcaggtgagaggtgaccggatacgcaaccgcaagatcccacaagctcacaccgcccattttaacggtttgataaggataagatgagtaatccttatcatagcgagtgcctaaatactgataagtaataccccagtcgaagtcatacaactgccagtcgagctggtatttcacctgctgtttagcacggcgtaacaacggcgtgtcggtaatcgcattgcgcgcatcgacataatcataactcacagtatgcgtcagtggtccggtatcaaaattggcggtcgcctcgacgcccttaatccgcgctttcccttcgttgtaatatttcagggtgtgatcatcataatcgatcaagtcactgacatcgttacgatatccggaaatacgccagttcaccccagcggttaagccttcaaacgcgccttcccactgtttgcttttctccgggtccagattcggatttccgtagaagccatacagttgccccagatttggtgccttataagatgtcccgtaggaagcaatgaagcgataaccttcgatgaattcccaaccggcgctggtttgccaggttccatgacgaccaaactgtgagttatcgtcactgcgtgctgcgccttcaaaggtaaaatcgccgacttgttgcagcccggtcagatagatgccggtattacgttgatcatatccattctcaacataacctgtacccggcgtcgtagtctgtttctgccagtcgacacccgcaccaatactaccgtgaccaacgatgacattgtttgcccactggacggtgtattgcttcatctcatcgagcgtcgccgacgaatcataacgaccataatggggatcgtagttgtaatctttgctatggctatagctggtaatgagttgtgatttaatcagttcgccgttatagcgcagcccggcgtcccaactttggctatagagtttacgggtatcgagcaacggtgaaccgggagaataatacgcgtcataattggtacggttatcatagccatagccgcgcacaaagccgctccaggcatcagtaaagttatgctccagcgcgccataaagcgttttacttaaaaaaccatcgttatctgtctgcgcttgcgttccggtattaccataggcaacaacatcataaccatgagtatgggcataatcgcccaacagcgttacccgtgtcttatcccccagttgttgctgcgtagagacatcatagttctgataactattgcttccccaccctgctgaaatttccgttccgggttcatcgcgcgtcgtgatgatattcaccaccccgcctattgcatcggaaccataaacggcggagcgtggcccacggatatattcaacacgctggacaagcgcaatagggaactggctaaggtcggcagaaccactcacccccgccagattcaggcgtacgccatcaattaacaccaacacatgactggcatttgtaccgcgaataaaaatagatgagagctgacctgaaccgccgttttgggtgatatcgacgcccggaagacggcgcagcacatcattgaccgaggtcgactgccagcggtcgatatcctgacgggtcacaacggtggttggtgcaagcacagtgctgcgcggctgttcaaaacggttagcagtaacgacgagagtatccgggctggtatcctgtgcccaagcggaaaaggctgtgacagaacacgccgtcagcagcgaagcttttttaatcattgtaaagcatccacaatagaagaaggatgccgcaggtttcatcaatattacgcgatgatgagaaccagatgcgacgttggccggcaggtcttcgggcttggaggggtatctaagatactaagagatgatgacttcccaccggatggcagtgtccgcataacgcaatcatcgcacctttccttaccgctgcgcgtcagctccagattcgcactggattccctattaactcacaggaccggcaagtggatgctacaggttgtaacaagttactgtccagacgtagctcacaaataggaattcatcaagatctggacatctgatgagcaatccctacaatcgccgcgtactttaatttttcaggatacatcatgacccccgaacaccttccaacagaacagtatgaagcgcagttagccgaaaaagtggtacgtttgcaaagtatgatggcaccgttttctgacctggttccggaagtgtttcgctcgccggtcagtcattaccggatgcgcgcggagttccgcatctggcacgatggcgatgacctgtatcacatcattttcgatcaacaaaccaaaagccgcatccgcgtggatagcttccccgccgccagtgaacttatcaaccagttgatgacggcgatgattgcgggtgtgcgtaataatcccgttctgcgccacaagttgttccagattgattacctcaccacgctgagtaatcaggcggtggtttccctgctataccataagaagctggatgatgagtggcgtcaggaagcggaggccctgcgcgatgcactgcgcgcgcagaatctgaatgtgcatctgattggtcgggcaacgaaaaccaaaatcgagctggatcaagattacatcgatgaacgtctgccggtcgcagggaaagagatgatctaccgtcaggtagaaaacagttttacccagccgaacgcggcgatgaatattcagatgctggaatgggcgctggacgtaaccaaaggctcaaaaggcgatttactggagctgtactgcggcaacggtaacttttcattagcgctggcgcgcaattttgatcgggtattagccaccgaaatcgctaagccgtcggttgctgctgcgcaatacaacatcgcagctaaccatattgataacgtacaaattattcgtatggcggcagaagaatttactcaggcgatgaatggtgtgcgcgagtttaaccgcctgcaagggatcgacttaaagagttatcagtgcgaaaccatttttgtcgacccaccgcgcagcggtctggacagtgaaaccgagaaaatggtgcaggcgtatccgcgtattttgtacatctcctgtaacccggaaacgttatgcaagaatctggaaacattaagccagacgcacaaggtcgaacgtctggctctgtttgatcagttcccctacacgcaccatatggagtgcggcgtattactgaccgcgaagtaaaacccatgccggatgcgccagcatccggcataataccgattactcagcaacttcctgcttacggttacgcatcttcgcgccaatccagaacaccataatgacggagagtactgccgggaagaagttagagccgatatccggatattccgcacgaactaccgtgctgtacagcagtacgccgagaataaaacaggcagctgccagacccggcaagcctaccggcatagtgcgattaagataacgttgatgcaggcagtaaaccgtcagcaccagggaaataatcgggaatacagaaaatggcacaatggagctaaacagcgctgcgaaagtaccattaatcgataagccagcaactaacgccagcagcagcgtacctctatcttgatttgcttgtttcattactcgtccttcacatttcccggaataattgcggttttctcttgttcacggcgataccagtaataagcccctttcgaaatcattcgcagttgcagtaccagtcgctcttctaattgccgacgttgttcgacgccgacgtccaacgcctcggcacccgcactgaagacaattgtcaccattgcttcggcttgcgcttcagtaaacgcacgcggcatatggttttcgagttccagatagtctgcaagttccgcaatgaagtgctgaatttcacgcgcaacggcggcacgaaacgcagcggaggtgccggagcgttcccgcaataataaccggaaggcgttaggattattaccgatgaactccataaatgtggagaccgaggtgcggatcacactcccgcctttggcgatacgctgacgcgcctggcgcatgagttggcgtagcattaaaccgctctcatcaaccatggtcagacccagttcgtctacgtcgcggaaatgccgataaaaagaggtgggagcaatgcccgcttcacgcgccacttcacgcaaactcaggctggcgaagctgcgttcagcacttaattggctaaatgcggcttccaccagcgaacggcgggttttttctttttgttgcgctcttacgcccatcacgatgtctgaatccttgccaaaagtactgctggcactataccagagaatgaacatactggattgctccagtattgtgaatgaacggtaacgcaataaaacatatttactgcaattctttggccggttcttttacgtacagcggaaacctgccgcttaaacggagagtatcgtcgataaaaatccaataaaacgtcagggcaaaagtaagaaacagacaaagcaaaggccgctcaggatatagccagataaatgacggggatcaattggcttacccgcgataaaatgttaccattctgttgcttttatgtataagaacaggtaagccctaccatgccacattcctacgattacgatgccatagtaataggttccggccccggcggcgaaggcgctgcaatgggcctggttaagcaaggtgcgcgcgtcgcagttatcgagcgttatcaaaatgttggcggcggttgcacccactggggcaccatcccgtcgaaagctctccgtcacgccgtcagccgcattatagaattcaatcaaaacccactttacagcgaccattcccgactgctccgctcttcttttgccgatatccttaaccatgccgataacgtgattaatcaacaaacgcgcatgcgtcagggattttacgaacgtaatcactgtgaaatattgcagggaaacgctcgctttgttgacgagcatacgttggcgctggattgcccggacggcagcgttgaaacactaaccgctgaaaaatttgttattgcctgcggctctcgtccatatcatccaacagatgttgatttcacccatccacgcatttacgacagcgactcaattcttagcatgcaccacgaaccgcgccatgtgctgatttacggtgctggagtgatcggctgtgaatatgcgtcgatcttccgcggtatggatgtaaaagtggatctgatcaacacccgcgatcgcctgctggcatttctcgatcaagagatgtcagattctctctcctatcacttctggaacagtggcgtagtgattcgtcacaacgaagagtacgagaagatcgaaggctgtgacgatggtgtgatcatgcatttgaagtcgggtaaaaaactgaaagctgactgcctgctctatgccaacggtcgcaccggtaataccgattcgctggcgttacagaacattgggctggaaactgacagccgcggacagctgaaggtcaacagcatgtatcagaccgcacagccgcacgtttacgcggtgggcgacgtgattggttatccgagcctggcatcagcggcctatgaccaggggcgcattgccgcgcaggcgctggtaaaaggcgaagccaccgcacatctgattgaagatatccctaccggcatttacaccatcccggaaatcagctctgtgggcaaaaccgaacagcagctgaccgcaatgaaagtgccatatgaagtgggccgcgcccagtttaaacatctggcacgcgcacaaatcgtcggcatgaacgtgggcacgctgaaaattttgttccatcgggaaacaaaagagattctgggtattcactgctttggcgagcgcgctgccgaaattattcatatcggtcaggcgattatggaacagaaaggtggcggcaacactattgagtacttcgtcaacaccacctttaactacccgacgatggcggaagcctatcgggtagctgcgttaaacggtttaaaccgcctgttttaaaactttatcgaaatggccatccattcgtgcgcggatggcctctgccagctgctcatagcggctgcgcagcggtgagccaggacgataaaccaggccaatagtgcggcgtggttccggcttaatgcacggcagataaacaaccccatcgcgtttgcgctccggcggcacagccagcgcaggcagtaaagtgatcccgctacctgccgccaccatgttgcgcagagtttccaggctggtcgcgcggaagtgtgtatcttcatccgccccggcttcaaagcagaaacccatcgcctgatcgcgcaaacagtgaccgtcttccagcatcagcagtttttcccctgccagatcggccatcggtacgcattcgcggttcgcccacgggtgatcttcatagatagccagcaacattggctcatcaaacaacggcacttcaatgaatgcttcgctctctttcaccagcgcgaggatcacgcaatcgagtttgccgctgtccagttgcgccagtaactggtgggtctgtgcttcatgcagatacatttccagctttggaaaggtctggtgcagcatcgggataatatgcggtagcaggtacggcccgaccgtgggaatcaaaccaatatgcagcggcccggacatggtctcaccctgctggcttgccatctctttaaggactttcacctcacgcagcacggtacgcgcctgatccaccagcagcattcccgcctgggtgaacaacactttacggctggtccgctccagcaacatcacgcccagctcatcttccagcttacgaatttgcccgctaagcgtcggctggctaacgtggcaggagtctgccgcacgccgaaaatggcggtgttcagccaatgccaccaggtactcaagatcacgaatattcattatccatcctccatcgccacgatagttcatggcgataggaagaatagcaatgaacgattatccctatcaagcattctgactgataattgctcacaggaacggagcggcacctcttttaacccttgaagtcactgcccgtttcgagagtttctcaactcgaataactaaagccaacgtgaacttttgcggatctccaggatccgcttttttttattctacaggcccacagcaagagagcctgatagtaacgattactcaatgcgatctttgacaataaagaagtaacacagcgccccggtgaacgtcacacaggccgcgataaccaacgccagattaaacgagtgtgtggtatccactacccaaccggttacgatcggagcaaaggaagcaaaaacaaaactgccaaagttttgaatcccggcgatggaagccacttttgtttctgacaccatcacctgcaccagcccccatgcagacgttccagcgaaatgcacgcagaatagcgccattgagataaacgctaccgcctgggctggcgaggaagattgcacgaccagcaacgtgcctaatgccgacatcatcaaaccgcagacaatagccgttttacgcgtcttcgccaggtcgtagccttttttcgctagtcgatcgacaacaataccgttaacccacatcccgactgccgccgcgaggaaaggaatcgccgccacccaaccggttttcgccagactgaaaccttgctcggcttgcaaataaccgggtaaccacgcgatgtagagccaaccggtataattgacgccagagaaacctaaaatcatcccccaggttgtccgatgcttaaacagcgccagccactcgctaaattgcagctgtggacgcggtttaaccggcgcggagagatacgtccgttcttcgtcagtcaggacaaactgcgcccggttgcgataccacgcgtaccaacagatcccaaccagaatccctgccacgccgatgataacgaacatcgtccgccagccccatgccagctgcatcaatacaagagcaggaggcgcgatagcctgaccgataacggtagatgagttaaaaatccccagcgccgtgccgcgttctttttgtgcataccagtcggtgatcgactttactcccgcaggcataaatggcgcttcgccaatacccagaccgatacgcattaaaataaagtggctaaaagaattaaccattcctgttaatgcctgcattaatgaccagaatattaagcctgcgcctaaaacaattcgtgggccaaagcggtctagcaaaataccggaaggtagttgtgaaaaaccataagacagagaaaatgcagaaagcaaaacaccaaactctgtcgccgataatcctaactcgccacgaatcgcttcacctgccacgctcaatgacgaacggtcgagaaaattaacgatccccgccataaataataaaaccagggtcactgtctgaatacgacgaatccgttgcggtttattacccgcaacactggttgacacatcaacgtccatttttagctccttgagcggaattaatcgatttgatgactattcagaaaataattaagcgaaccgttattaccagttccacaatgtgccatcttccagtcgtgcgacggggagatacgccgggtcatacggatatttcgccgccagtttctcatcgaaagaaatacccagccccggttcatcgcctgggtgcatataacctttctcgaagcgccagctgtgcgggaaaacttcaagcatttgttcggaatagcccatgtactcctgaacgccaaaatttggtacccataggtcaaaatgcagcgccgccgcatgacaaacaggcgataaatctgaagggccatgcgaaccggtacgtacctgataaagcgatgcaaaatcggcaatccgccgcatcccggtaatgccgcctgcatgggtgatcgtcgtgcgaatatagtcaatcagctgctcttcgattaactgcttgcagtcccagatactgttaaacacttcaccgaccgcaatcggcgtcacggtatgctggcgaatcagacgaaaacattcctggttctctgcaggcgtcggatcttccatccagaacaggcggtaatcctcaatgctcttcccaaagcgcgccgcttcgatgggggtcaggcgatggtgcatgtcatgcaacagatgttcgttaaaaccgaacttattacgcaccgcttcaaataacttcggcgtaaaatcgagatacttttctgaagaccacaactgctcttctggccacaggcctttggttgccggttcatacgccaggcctttgcccttcgccaggccataagtagtttgcatacccggtacaccgcactgcacacgaatcgccttaaagcccatctgctggtgctttgcatagtcttcaaggacttcatcaatcgtccgcccggtggtgtggcaataaaccatcacgccttcgcgagaagcaccaccaagcagttgatacaatggcatatttgccgctttagctttgatatcccacaacgccatatcaatggcagaaatggctgacatcgtgacggggccacgtcgccagtaagcacctttataaaagaattgccagatatcttcgatacggctggcatcgcggccaattagttgtggacaaagatgatctttcagataagaagcgaccgacaattcgcgaccatttaacgtggcatctcctaatccacaaagtccgctttcagtggttattttaagcgtaacgaaattacgccctgggcaagtaacaaaaacatctgcagcaataattttcattattgcaatctcctgtgttgtaaatagacgtttcaaacttaattttacgcctactaccatataagagagaaaaagagattattcaaccgtgatcacattaaaaacaaaaatttccaccgaggagaaaaaataccctcaaaaaccacctgaataattaaccattatcgttaaaacaacacgttaaataatcacataacaaactccattaatcattaaaaatgggcacagcaatagaaaataattatattcaattaattaaaatatgtattggttgatgtatttgaaaatatgattttcatggggagtgtgaaggtaaagaagacacaatgataaaaaggaatgtgacaaataatggttctggttgggcgttaaatttaagctcaccagaatgctgacaaatttctgcctgatgtggcgtaaacgccttatccgcctacgaagtgtcgcactttgtaggcgtggtaagctccccattttcaggggagcaatataaacaaattactctaaccgcgcctgcgcaaaagcaattgcctgcgccacctgctgcggtgagacgccgccttttgccgcacgcttgtcgaggcacgattgcagcgacagaatcggatagacatcttcgtcaatcaccgggctgaatttctgcaactcgtcgagcggcagatcttccagcggtttgccctgacgaatggcttccaccaccgcttcaccaacaatatggtgcgcctcgcggaacggtacgcctttcgccaccagataatccgccagttcggtggcgttggcgtaaccctgctgagccgcttcctggcaacgtggacgtttcacctgaatgccgtccagcaccagcgccgccatatgcaggcagtccagccaggtatcgagcgcgtcgaacagaccttctttgtcttcctgcatatctttgttgtaagccagcggcaaacctttcagcgtcatcatcatgccggttaacgccccctgcacccgaccgcatttaccgcgaatcagctccagcgcatccgggtttttcttctgcggcattaatgatgaaccggaagtcacgcggtcagaaagctccacaaaccccgcttcgccggtgttaaagaaaatcagatcttcagcaaaacgcgacagatgcaccatgccgatagcggcagcagaaagcagttccaacacatggtcacggtcagaaacgctgtcgagactgttacgggtcgccgaagcaaagcccagccagcctgctaactgttcacggtcgatttcataggccgttcccgccagcgcgccacagcctagcgggctgacatccagacgcttaagcgcatcctgcaaacggctttcatcacgcgccagcatctcaacataggccaggcaccagtgcgcgaacgtcaccggctgggcgcgttgcaggtgagtgtaacctggcattaccgcgtcctgattgttttgtgcggtttccaccagcgccgattgcagctgccggttagccgtcagtaactcgctaacggtatctttgcaccacagtttcaggtcagtcgctacctgatcattacggctacgcccggtatgcagctttttgcctaactggcccactttgtcgatcagtttgccttccacccagctatggatatcttcggcgtcgctttcaaggatttgttgtggcctggcgcgaacatcttccagcaacacgttcagcgcctcttccagttgcgcctgctcttctgcggttaacacgcctaccgtgaccagggctttggaccaggccacagagccaacaatatcctgctccgccagacggtaatcaaagcgcagtgagtcgttgaattgtttgaaccgttgatctgctgcctgggtaaaacgcccgccccaaagtgccataactctgtttccttattttgaaattcaatgccggaaagctgcgcctccggccaacaaaacttaagctaaaatccgcgtacccatcggcataccgttaaacagtgccggaagctgctccgcatgacgccaggaggcgatatctaccggacggcccagcgtgcgggccgcatccagcgccgcgttcactttcactatcatgccgtcagtaataatgccctgctcaatcagttgttctgctttcgcggcggtcatttcggcaatgcgttgccctttgccgtcgagaatgccgctgacgtcggagagcaaaatcagatccgcgcccagcgttgccgccagcgccgttgccgcctggtcggcattgacgttcatcagttgcccttcgtctgttacgccaatggagctgaccaccggcagataaccgttctccagcaaggagttgataagcttaggcgaacctggctgcgccagtccaacatgacctaactcttcatcaagctgggtcactttgacgctgtcgccgtcaccgagaaacaaacctacggccgcaatctgatgtttcttcgcccatgccaacagggttttatttgccgttcccgccagtgctccggtgataatgtctatctgatcagcaggcgtcacccgcaggccgtttttctttttcaccggcagattcagccctttcatcagctcatccaccacgcaaccgccgccgtgcacaatcaccagcggacgctgatgtgactcacgataattcaccagtgcactaaacagacgttccagcgcctcttcactatccagcagtacgccgcccagtttgataattaatggattcatcattgcacccttaaataagagactgcgtttccgcatagccgaaacgaatattggcgcactgtaccgcttgtgccgccgcgcctttcagtaagttgtcttcggtcgccacaataatcagatgctcgccctgaacggcaaacccgatatcgcaaaatggcagcccaacgacatttttcagcgccggaacgcctttgtcatacagccgcaccagcggtttatgggcatacgcctgctgtaacacttgcgcgacttgcgcctgggtcacacccgatttcaggcggcaggtaatggtttcgagaatgccgcgcgggaaattgcccagatgtggggtgaagataacgtcagcaccgaggtgtgtggcgatctctggttgatggcgatgagtaaagacgccatacggttgcaggctaacttcacaaaagctgtttgaaatggccgctttacgccctgcaccgctcacgccgctggtggcgttgatcaccggccactgattgaggtcaagaagatcggcatcaatcaacggtttcagcgccagctgtgccgccgtcggataacagcccggcaccgcaatcaaattcgcttcttttaatttattaccgcaccactccgccagaccgtaggctgcctgttccaacagttccgggtattgatgggtaaagccgtaatatttttcatagaaggtggcgtcgttaacacgaaacgcgccggaaaggtcgaacaccacgcagcccgcttcaagaaactgcggcgctaaatcgtggctaacttcatgggcggtggcgagaaacactacgtccacccctgggctaaactcgctgatatccgacatcggctgcaacggcagatcaacgatgccttttagctgcggatgcaaatcggagattaactttcccgcatcattgctttgcgctgaaacagtcaaagcggttatgttcatatgcggatggcgatttacataggtcactagctctgcgccagcgtagccgctggcacccacaatcagcgtattcaacatcggggctattcaccttcttatgtctggttgccaggttaaacgtaaaacattcaccttacggctggtgggttttattacgctcaacgttagtgtatttttattcataaatactgcatgaatattgatactatcatgaccagaggtgtgtcaacaatgaaaaacaaattaccgccatttatcgagatttaccgcgctctgattgccacaccttcaataagcgccacggaagaggcactcgatcaaagcaatgcagatttaatcactctgctggcggactggtttaaagatttgggcttcaatgtggaagtgcagcctgttccaggaactcgcaacaaatttaatatgctggccagttgcggacagggggctggcggcttgttgctggcggggcataccgatacggtgccatttgatgacggtcgctggacgcgcgatccgtttacactgacggagcatgacggcaagctttacggcttaggcaccgccgacatgaaaggcttttttgcgtttatccttgatgcgctacgcgatgtcgacgtcacgaaactgaaaaaatcgctctacattctggcgactgctgatgaagaaaccagtatggccggagcgcgttattttgccgaaactaccgccctgcgcccggattgcgccatcattggcgaaccgacgtcactacaaccggtacgcgcacataaaggtcatatctctaacgccatccgtattcagggccagtcggggcactccagcgatccagcacgcggagttaacgctatcgaactaatgcacgacgccatcgggcatattttgcaattgcgcgataacctgaaagaacgttatcactacgaagcgtttaccgtgccataccctacgctcaacctcgggcatattcacggtggcgacgcttctaaccgtatttgcgcttgctgtgagttgcatatggatattcgtccgctgcctggcatgacactcaatgaacttaatggtttgctcaacgatgcattggctccggtgagcgaacgctggccgggtcgtctgacggtcgacgagctgcatccgccgatccctggctatgaatgcccaccgaatcatcaactggttgaagtagttgagaaattgctcggagcaaagaccgaagtggtgaactactgtaccgaagcgccgtttattcaaacgttatgcccgacgctggtgttggggcctggctcaattaatcaggctcatcaacctgatgaatatctggaaacacggtttatcaagcccacccgcgaactgataacccaggtaattcaccatttttgctggcattaaaacgtaggccggataaggcgctcgcgccgcatccggcactgttgtcaaactccagtgccgcaataatgtcggatgcgatacttgcgcatcttatccgacctacacctttggtgttacttggggcgattttttaacatttccataagttacgcttatttaaagcgtcgtgaatttaatgacgtaaattcctgctatttattcgtttgctgaagcgatttcgcagcatttgacgtcaccgcttttacgtggctttataaaagacgacgaaaagcaaagcccgagcatattcgcgccaatgcgacgtgaaggatacagggctatcaaacgataagatggggtgtctggggtaatatgaacgaacaatattccgcattgcgtagtaatgtcagtatgctcggcaaagtgctgggagaaaccatcaaggatgcgttgggagaacacattcttgaacgcgtagaaactatccgtaagttgtcgaaatcttcacgcgctggcaatgatgctaaccgccaggagttgctcaccaccttacaaaatttgtcgaacgacgagctgctgcccgttgcgcgtgcgtttagtcagttcctgaacctggccaacaccgccgagcaataccacagcatttcgccgaaaggcgaagctgccagcaacccggaagtgatcgcccgcaccctgcgtaaactgaaaaaccagccggaactgagcgaagacaccatcaaaaaagcagtggaatcgctgtcgctggaactggtcctcacggctcaccctaccgaaattacccgtcgtacactgatccacaaaatggtggaagtgaacgcctgcttaaaacagctcgataacaaagatatcgctgactacgaacacaaccagctgatgcgtcgcctgcgccagttaatcgcccagtcatggcataccgatgaaatccgtaagctgcgtccaagcccggtagatgaagccaaatggggctttgccgtagtggaaaacagcctgtggcaaggcgtaccaaattacctgcgcgaactgaacgaacaactggaagagaacctcggctacaaactgcccgtcgaatttgttccggtccgttttacttcgtggatgggcggcgaccgcgacggcaacccgaacgtcactgccgatatcacccgccacgtcctgctactcagccgctggaaagccaccgatttgttcctgaaagatattcaggtgctggtttctgaactgtcgatggttgaagcgacccctgaactgctggcgctggttggcgaagaaggtgccgcagaaccgtatcgctatctgatgaaaaacctgcgttctcgcctgatggcgacacaggcatggctggaagcgcgcctgaaaggcgaagaactgccaaaaccagaagggctgctgacacaaaacgaagaactgtgggaaccgctctacgcttgctaccagtcacttcaggcgtgtggcatgggtattatcgccaacggcgatctgctcgacaccctgcgccgcgtgaaatgtttcggcgtaccgctggtccgtattgatatccgtcaggagagcacccgccataccgaagcactgggtgaactgacccgctacctcggtatcggcgactacgagagctggtcagaagctgacaaacaggcgttcctgatccgcgaactgaactccaaacgtccgctgctaccgcgcaactggcaaccaagcgccgaaacgcgcgaagtgctcgatacctgccaggtgattgccgaagcgccgcaaggctccattgccgcctacgtgatctcgatggcgaaaacgccgtccgacgtgctggctgtccacctgctgctgaaagaagcgggtatcgggtttgcgatgccggttgctccgctgtttgaaaccctcgatgacctgaacaacgccaacgatgtcatgacccagctgctgaatatcgactggtatcgcggcctgattcagggcaaacagatggtgatgattggctattccgactcagcaaaagatgcgggagtgatggcagcttcctgggcgcaatatcaggcacaggatgcattaatcaaaacctgcgaaaaagcgggtattgagctgacgttgttccacggtcgcggcggttccattggtcgcggcggcgcacctgctcatgcggcgctgctgtcacaaccgccaggaagcctgaaaggtggcctgcgcgtgactgaacagggcgagatgatccgctttaaatatggtctgccagaaatcaccgtcagcagcctgtcgctgtataccggggcgattctggaagccaacctgctgccaccgccggagccgaaagagagctggcgtcgcattatggatgaactgtcagtcatctcctgcgatctctaccgtggctacgtacgtgaaaacaaagattttgtgccttacttccgctccgctacgccggaacaagaattgggcaaactgccgttgggttcacgtccggcgaaacgtcgcccaaccggcggcgtcgagtcgctgcgcgccataccgtggatttttgcctggacgcaaaaccgcctgatgctccccgcctggctgggtgcaggtacggcgctgcaaaaagtggtcgaagatggcaaacagagcgagctggaagccatgtgccgcgattggccattcttctcgacgcgtctcggcatgctggagatggtcttcgccaaagcagacctgtggctggcggaatactatgaccaacgcctggtagacaaagcactgtggccgttaggtaaagagttacgcaacctgcaagaagaagacatcaaagtggtgctggcgattgccaacgattcccatctaatggccgatctgccgtggattgcagagtctattcagctacggaatatttacaccgacccgctgaacgtattgcaggccgagttactgcaccgctcccgccaggcagaaaaagaaggccaggaaccggatcctcgcgtcgaacaagcgttaatggtcactattgccgggattgcggcaggtatgcgtaataccggctaatcttcctcttctgcaaaccctcgtgcttttgcgcgagggttttctgaaatacttctgttctaacaccctcgttttcaatatatttctgtctgcattttattcaaattctgaatataccttcagatatccttaaggaattgtcgttacattcggcgatatttttttcaagacaggttcttactatgcattccacagaagtccaggctaaacccctttttagctggaaagccctgggttgggcactgctctacttttggtttttctctactctgctacaggccattatttacatcagtggttatagtggcaccaacggcattcgcgactcgctgttattcagctcgctgtggttgatcccggtattcctctttccgaagcggattaaaattattgccgcagtaatcggcgtggtgctatgggcggcctctctggcggcgctatgctactacgtcatctacgggcaggagttctcgcagagcgttctgtttgtgatgttcgaaaccaacaccaacgaagccagcgagtatttaagccagtatttcagcctgaaaattgtgcttatcgcgctggcctatacggcaatggcagttctgctgtggacacgtctgcgcccggtctatattccaaagccgtggcgttatattgtctcttttgccctgctttatggcttgattctgcatccgatcgccatgaatacgtttatcaaaaacaagccgtttgagaaaacgttggataacctggcctcgcgtatggagcctgccgcaccgtggcaattcctgaccggctattatcagtatcgtcagcaactaaactcgctaacaaagctactgaatgaaaataatgccttgccgccgctggctaatttcaaagatgaatcgggtaacgaaccgcgcactttagtgctggtgattggcgagtcgacccagcgcggacgcatgagtctgtacggttatccgcgtgaaaccacgccggagctggatgcgctgcataaaaccgatccgaatctgaccgtgtttaataacgtggttacgtctcgtccgtacaccattgaaatcctgcaacaggcgctgacctttgccaatgaaaagaacccggacctgtacctgacacaaccgtcgctgatgaacatgatgaaacaggcaggttataaaaccttctggatcaccaaccagcagacgatgaccgcccgcaataccatgctgacggtattttcgaagcagaccgacaaacagttctatatgaaccagcaacgtacgcagagtgcgcgtgaatacgacaccaacgtgctgaaaccattccaggaagtgctgaaggacccggcgccgaagaaactgatcatcgttcatctgctgggtacgcatatcaaatacaaataccgctacccggaaaatcagggcaagtttgatggcaataccgatcatgttccgccaggattaagcgcagaagagctggaatcatataacgattatgacaacgctaacctgtataacgatcatgtggttgccagcctgattaaagactttaaagcggcagacccgaacggattcctggtttacttctctgaccacggtgaagaggtttacgacacgccgccgcacaaaactcaggggcgtaacgaagacaacccgacgcgccacatgtacaccattccgttcctgctgtggacgtcggaaaaatggcaagcgactcatccccgtgatttctcacaggatgtcgatcgtaaatacagcctggcggaactgatccacacctggtcagatttggcgggcttatcttacgacggttacgatccaacccgttcagtggtgaatccgcagttcaaagaaactacccgctggattggtaacccgtacaagaaaaacgcgctgatcgattacgacactctgccgtatggcgatcaggtgggtaatcagtaaatgacctttgtatcgcgtctggcgctatttgccggatgcgatactgccgcaatgtttacatcgaactcccctcaggccacacttttcaggtggccttttttaataatgccagttactgttttcccgtctacatacctaagggaataacatgtatcacgacgtcagctatctgctctcccgcctgatcaacggcccgctgtccctgcgccagatttactttgccagcagtaacggcccggtgcccgatcttgcgtatcaggtcgattttccacggctggaaattgtgctggaaggtgagtttgttgataccggcgctggagcaacgttagttcccggcgatgtgctgtacgttgccgctggtggctggaatttcccacaatggaaaacacccgctaccacctttagcgtgctgtttggcaaacagcaactcggcttcagcgtcgtgcaatgggatggcaaacaatatcaaaatctggcgaagaaacacgtcgcccgacgcggcccacgtataggttcttttctgctacaaacgctcaatgaaatgcaaatgcagccgcaggagcagcaaacggcaaggcttatcgtagccagcctgcttagccactgccgcgatttgctcggcagccaaatccagaccgcctcacgcagccaggcactatttgaagctattcgcgattatatcgacgaacgctatgcctccgcgcttacccgcgaatctgtcgcacaggcattctatatttcaccaaactatctctcgcacctgtttcaaaaaacgggggccattggttttaacgaatacctgaatcacacgcgactggagcacgctaagacgttattgaaaggctatgacctgaaggtaaaagaagtggcgcacgcctgcggctttgtcgacagcaactacttctgccgtctgtttcgtaaaaacaccgaacgctcgccgtcggaatatcgtcggcagtaccacagccaactgacagaaaaaccgactactccagaataagatgggtttgctgcggcgcagaaagcactttgcgcaccgcgctcattacccgctgcggctcacgcaggaatgcgtagatgctgcattgcacatagcggcaatgttcaaatcgctcggcaccggcaagctcgatatccgtaatcaacagagcaacatccgcccgacggatatcctcgtccgctaaacgattctccgttcccaacgcgccctgagtttcaatgctgacgccccacttctctaactggcacaacttttccagccgttccgccgccatatatgtatgcgccacgccgcttacgcaggcggttactgccaccaggtatgccattttaacctcccacggtaacctgaaatccggcccgttctgccatttcgcgcatcgttgccacatcggctgacgacggcgcagaaacctctttcatcgaccatgttttccccagcagacggtatttcggttcgccgtactgatgaaacggtaacagatggatctgcctgatattcagcgggatcagcacgtccagcgcctgctgcatattctcccggctgagtgtgaaaccggggatcagcggcaaacgcgggatcacgttgacaccttcactcaccagcaaacgcagattctccagcacgcgtggcaggttcatcttcaccacatcccgcgcctgagtcgcgtccataatttttaaatcgaacaacacttcatcgcacaatttcgccagcggtaacagcttgctggctggcgcgtctccggcagtttcgatggcgcatgacacgccccacagccgcagtcgctgtaaaaaacgggtagcaaactcggcctgcattaacacttcgccgccagaaagcgtgacgccgccgccggacgtgcgaaagaaaatgtcatctttcatcacttcccgttccagagcgtcaaggctgatatcgcgaccaatccgttcaaacgcaccggaggggcattcatccgcatcacgcaaacatttcgcacagtgcagacatttcgcctctctgcgtaccgtctggattttgccggagatcgactccggattagcacaccacgggcaaagatgcggacagcctttaaaaaagaccaccgtacgaatgccctcgccgtcattcagtgaataacgctgaatgttgaaaatgcgcgccacatcatcgcggcgcgtttccacaacgttacagctgatgcgctgtccggcggatgatgtcatcctggatctccttcgacagttcgacaaagaaggcgctgtatccggcaacgcgcaccaccagcccggcataatcttgtgggcgctgttgcgcttcccgcaacgtgtcggcgttcaccacgttaaactgaatatgctgcaacttaagctgggtaaacgcccgtaagaagtcggccagtttgcgtaatcccgcttcaccttccagggtcgccggagtgaatttcacgttcagcaacgtaccgttagacagcagcgtgttatcgagcttactgactgacttcagtaccgctgttggcccttgtgcgtcctggcccagcataggtgacaagccgccgtctgccagttgttccccggcaaaacgaccgtctggcgtcgcgccaaccaccgatcccaacgggacgtgagcagaaacggtatacgatcccggcgtgaagtaaccgccgcgcgggttctggtatttttccacttctttgcagtagtggcgtaacagttcggcgctgatgttatccacctcgtcgatatcgttaccgtatttctcgaagcggttaattaagcgagcacggactttttcgccttctggcgttgcaaagttggcttttaataccgacagcaattcgtcaaaacttaaacgctgttgctcaaaaaccatccctttcaacgcatggagagaatcgctcaggttggcgataccgatcccctgtacgccggagaagttataacgcgcgccgccatcggtaatatcgcggcctttttccagacaatcgctgataaaagacgagagcagcggtacaggtgcccagtcgcgatggccgatatcacaaatattgctgccctcaaccatcagggtgatgtagtggctgatcttggcgcggatctgctccagtaaaccttcataagtcagcgcagcattgccttcattttcatacaggcagatttccatcactttcagcagattaaacatcgcgatgtcatgcaagccgtaggttctgccgggaatagataattccacacagcccactacggaatagtcgcgcgcatcttccagcgaaacgccacggttgaggaacgctggcaccaccacttcatcgttaaagatttgcggaataccggtgccgaggcgaatggtttcggcggttttcatcaggaacggcgtgtcgatcaaggcgttagtgcgcacgccgaggttcggttgcggtaattgcacgctttgataggcgtcaaggcaaaggaacgaaagcacgttcaccgcgctacgtccgttctcggttaacccgccgagcagtgcggtatagccggtcgggaaaccggcgaaataacgcgcgctactggtggagcgcaacagcacgatgtcgttgcatttcacccataaagattcgagcagttctttcaggaacgccgcatcttcgccctgggttaatgatgtctgatagaacggcaacatatactggtcgaagcgccccaacgatagcgaactggcgttggattcgtattgcagaatgatgttcatgtaccagaataactggcacgcctgccagaacgtctgcggcttatgttgcgcgttatggcgggagatctccgcaatagtcagcagttcttcgcgacgctgggcatctgtgcagtttgccgccattgtttccgccagttcagcgtaacgcagaatgtgtttctgcgaggcttccagcagtaacagcgcggcctgataaaagtgattctccggctgttgctgacaatgttgctgcatctgcgccaccagctcccccagcccgtgattcagcaggcgtgggtaatcaataataatgtgcccctggcctttatctgtctggttgatgctgaaaatctgcgtgctggtcgcggcttttacttcatctgtcatctgcccgttgatgaaatctttcatcgaacgtttttcccagtacgggaacaactcttcacggtagatacgtttatcttcttcactgatagcaaagcggtcctgcggacgcgtcgggaattgatccagctctttcagcagccagtaagggtccatttccggcgacataatcccagcgcgcggttttacggtgcggttaccggcaatcagttcttcatcacgaatcgaaatttcaacatgttcaaggatatacgctgttgctttcgcccggcgcaatatcaccggttcgccttcggtttgccgatggctggcggtataaagcagcgcccgctccagcgagatttcacgggtattggcaaacagtgcagttttgaggcgagagatacgattcgtcatgaggaactcctgtgggaaagcgaacccgcccttgcgagcgggagaagaacttaagcggtttgcgccaggtgagcttcaattttgctcataatggcgtcagcacgttttactgcatcgctgatgttgacgcgcacgatggtcttgccagcaaaacgctcttcaaacttgatgccgatatctttggtcagaatcaccatatcagcgctcgccacatcttccgcagtcagttcattttccagaccaattgacccctgggtttctactttcacttcccagcctttcgctttcgcggcactttccagcgcctctgctgccatataggtatgggcaacacctgaaggacatgcggttactgcaataattttcgtcatggctcgttcctcaattaattaatttcaaaatccaaatccaggtcgtcttctttttcatcagtcgaagacccatttttacgcgccagacttttcagcacgttcacacaaacagccgtcaccactgctccgacagccactgctgcgatataacccagcttgccttcaaccaccggcagcacaatcagaccaccccagcctgcatagcactgcgcaccgaccagcgccgcagttactgcaccacaaactgaaccgaccatgatggaaggaatgacacgcagcggatcggcagcggcgaaaggaatcgccccttcagtaacgccaacacagcccatcaccagtgccgctttgccggtttcgcgctcttctgcggagaaatttttacgaccaatcagcgtcgccagccccatccccagcggcgggatacaaatacccacggcagcgatggccaccacggtataaacaccctgagcaacgcaaatcagcatgaaggcataggccactttgttaaccggaccgcccatatcgaacgccagcatcagacccatgatcaccgccagcataacaatgctgccctgctgcatcccctgaagccactgagtcaggctgttggtcaacgcccctacaggctcgcccaagccccacatcatgatgcctgcggtaatcagtgtgccgacgataggaataatgaagataggcatcaccgagcgcagaactttatgcaccggaattttcttcaggtaatgcaccacgatgccgccgataatcccggcgatcagtgcaccaaagaagcccgcaccaaagctgttaccaacccaggcaccgatagcgcacggagccagcgcagaacgctctgcaatggagtaaccgatgtaagcggcgaggaaaggcaccatcagcgtcaaacctgcaacgccgatatcaaacagttttttcagattcggatcggctacggcatccggcactgcgcctttgccatacaacatgacggaaaccgccagcaaaataccgcccgataccacgaagggaatcatgtgtgaaacgcccgtcattaaatgctgacgggtatttttcaggatctgcaccaactcattcataagctgctcccgggcttgcgaaagcccatgtccatatttttgatggaggaaacaataggcaatcgcaggcggagcaaacagtggataaaaaggccatttactggacttttgtaatatcagtacaaaaatgcgatccgcctcataacttgcgataaaccggaagcatgccgcaaaacagcgtcttgtgagacgcgtcgcaaattgacggttacattacatttgtccagcttttggcagatttgtcacatggcaggccgttgccgtgcgctcttatcctgtaaacagaaaaccgtaccgggagagaggcaatggccctgattgtggaatttatttgtgagctacctaacggcgtacatgcacgtccggcaagccacgttgaaacgctgtgtaatactttttcatcacaaattgagtggcataacctgcgcactgaccgcaagggcaacgccaaaagcgcccttgcgctgattggcaccgatacgctggcgggcgataactgccagttactgatttccggggccgacgaacaggaagcgcaccagcgtttaagccaatggctgcgcgatgaattcccccactgcgatgcgccgctggcggaagttaaatctgacgaactggaaccactgccggtttcactgaccaatctgaatccgcaaattatccgcgcccgcaccgtgtgcagcggtagtgcaggcggcattctgacgccgatctcttctttagatctcaatgcgctgggtaatcttcccgcagccaaaggcgttgacgccgagcaatccgcactggaaaacggcctgacgctggtactgaaaaacattgagtttcgtctgctggatagcgacggtgccaccagcgcgattctggaagcgcaccgatccctggctggcgatacttccctgcgcgaacatttactggcaggcgtcagcgccggattaagctgcgccgaagcgattgtcaccagtgcgaatcacttttgcgaagagttcgcccgttccagcagcagctacctgcaagaacgtgccctggacgtacgcgacgtctgcttccagttactccagcaaatctacggtgagcaacgcttcccggcaccgggcaaactgacgcagcccgccatttgtatggctgatgaactgactcccagccagttcctcgaactggataaaaatcacctcaaaggtctgttactgaaaagtggcggcaccacctcacataccgtaattcttgcccgttcgttcaacattccgacactggttggtgtagatattgatgcccttactccgtggcagcatcaaacgatttatatcgacggcaacgctggggcgattgtggttgagccaggagaagccgtagctcgttattatcagcaagaagcccgcgtacaggacgccctgcgtgagcaacagcgtgtctggctgacccaacaagcccgtaccgctgacggtatccgcattgaaattgccgctaacatcgctcactccgtggaagcgcaggccgcattcggcaatggtgcggaaggcgttggtttgttccgcactgaaatgctctatatggatcgcaccagtgcaccgggcgaaagcgagctgtacaacattttttgtcaggcgctggagtctgccaacggacgcagcattattgtgcgcactatggacattggcggcgacaaacccgttgattatctgaacattccggcagaagctaacccgttcctcggttatcgcgctgtgcgtatttatgaagaatacgcctcgctgttcaccacacaactacggtcgatcctgcgcgcctccgctcacggcagcctgaaaatcatgatcccgatgatctcctcaatggaagagatcttatgggtgaaagaaaaactggcggaagccaaacagcaactgcgtaacgaacacattccgtttgatgagaagatccagcttggcattatgctggaagtaccgtcggtgatgttcatcatcgatcaatgctgcgaagagattgatttctttagtattggtagtaatgacctgacgcaatatctgctggcagtggatcgcgataacgctaaggttactcgtcactacaacagcctgaatccggcattcttgcgggcgctcgattacgccgtgcaggcggtgcatcgccagggcaaatggattggtctgtgcggtgagctgggagcgaaaggttccgtgctgccgttgctggtcggcttagggctggatgaactcagcatgagcgcaccatcaattccggcggcgaaagcgcggatggcgcaacttgatagccgtgagtgccgcaagttgctcaaccaggcaatggcctgccgtacttcgctggaagtggaacacctgctggcgcaattccgcatgacccaacaggacgcaccgctggtcaccgccgagtgcatcacgctggaaagtgactggcgcagcaaagaagaagtgctcaaaggcatgaccgataacctgctgctggcgggccgctgccgctatccgcgtaaactggaagccgacttatgggcgcgcgaggccgttttctctaccggtctgggctttagttttgccattccacacagcaaatcagaacacattgagcaatccaccatcagcgtggcgcgtctgcaagcgccggtgcgctggggcgatgatgaagcgcaattcatcattatgttaaccctgaacaaacacgctgcgggcgatcagcacatgcgcattttctcgcgcctcgctcgccgcatcatgcacgaagaattccgtaacgcgctggttaacgccgcctctgccgacgctatcgccagcctgctgcaacatgaactggaactgtaaaaggaaacatcatggaactgtatctggacaccgctaacgtcgcagaagtcgaacgtctggcacgcatattccccattgccggggtgacaactaacccgagcattatcgctgccagcaaggagtccatatgggaagttctgccgcgtctgcaaaaagcgattggtgatgagggcattctgtttgctcagactatgagtcgtgacgcgcagggtatggtggaagaagcgaagcgcctgcgcgacgccattccgggcattgtggtgaaaatcccggtgacttccgaaggtctggccgccattaagatgctgaaaaaagagggtattactacgcttggcaccgcagtgtacagtgctgcacaagggttactggccgcgctggcaggggcaaaatacgttgctccgtatgttaaccgcgtagatgcccagggcggggacggcattcgtacggttcaggagctgcaagcgctgttagaaatgcacgcaccagaaagcatggtgctggcggccagctttaaaacgccgcgtcaggcgctggactgtttactggcaggatgtgaatccatcaccctgcccttagatgtagcgcaacaaatgctcaacacccctgcggtagagtcagctatagagaagttcgaacacgactggaatgccgcatttggcactactcatctctaaaggagcaattatggaccgcattattcaatcaccgggtaaatacatccagggcgctgatgtgattaatcgtctgggcgaatacctgaagccgctggcagaacgctggttagtggtgggtgacaaatttgttttaggttttgctcaatccactgtcgagaaaagctttaaagatgctggactggtagtagaaattgcgccgtttggcggtgaatgttcgcaaaatgagatcgaccgtctgcgtggcatcgcggagactgcgcagtgtggcgcaattctcggtatcggtggcggaaaaaccctcgatactgccaaagcactggcacatttcatgggtgttccggtagcgatcgcaccgactatcgcctctaccgatgcaccgtgcagcgcattgtctgttatctacaccgatgagggtgagtttgaccgctatctgctgttgccaaataacccgaatatggtcattgtcgacaccaaaatcgtcgcgggcgcacctgcacgtctgttagcagcgggtatcggcgatgcgctggcaacctggtttgaagcgcgtgcttgctctcgtagcggcgcgaccaccatggcgggcggcaagtgcacccaggcggcgctggcactggctgaactgtgctacaacaccctgctggaagaaggcgaaaaagcgatgcttgccgccgaacagcatgtagtaaccccggcgctggagcgcgtgattgaagcgaacacctatttgagcggcgttggttttgaaagcggcgggctggcggcggctcacgcggtgcataacggcctgaccgctatcccggacgcgcatcactattatcacggtgaaaaagtggcatttggtacgctgacgcagctggttctggaaaacgcaccggttgaggaaatcgaaaccgtagctgcacttagccatgcggtaggtttgccaataactctcgctcaactggatattaaagaagatgtcccggcgaaaatgcgaattgtggcagaagcggcatgtgcagaaggtgaaaccattcacaacatgcctggcggcgcgacgccagatcaggtttacgccgctctgctggtagccgaccagtacggtcagcgtttcctgcaagagtgggaataacctactccaaactcccggcttgtccgggagtttgaacgcaaaattgcctgatgcgctacgtttatcaagcctacgaaatctctgcaatatattgaatatgcgtgcttttgtaggccggataaggcgttcactccgcatccggcactctgtgccagtaatctgaaactcccacgttgttcaggagttttttatccgcttctggacattttctccacagaacaatcgttagcccggaaggtcgaatctgtgactcttattttcacggacgaaccagatgaaagcttcactggcgctgctcagcctgctaacggcatttaccagccactccttaaaatctcccgccgttccaccaaccgtggtacaaatccaggccaataccaaccttgccatcgcagacggtgccagacagcaaatcggcagcacgctattttacgatccggcgtatatgcagcttacctatcctggcggtgatgtcccgcaagaacgcggggtatgttccgatgtggtgatccgtgcattgcgcagccagaaggtcgatttgcagaaactggtgcacgaagatatggcgaagaattttgccgagtacccgcaaaaatggcagttaaagcgcccggacagcaacatcgatcaccgtcgggtgcctaatctggaaacctggtttacccgccacgataaaacacgccccatcagcaagaaccccagtgactatcaagcgggcgatattgtctcctggcgactggataacggactggcacatattggggtggtgtcagatggcttcgcccgcgacggtacgccgctggtgatacataacattggcgcaggcgcgcaggaagaagatgtgctgtttagctggcggatggtggggcattatcgttattttgttaaataagcgatcgccccacatgaagaaaaaattcagatgctttttacactgacagcttcttttttcttacggctcaccagcgccagtgccagcacaatcagcacaataccgctaccttcaacggcccccggattctcaccgagcagccaccaggaaaagagtacgccgcaaacgggaacggccagcgtgcttaagctggcaatactggcaggcaagtttttcaatacaaacaaccataagctccacgccagcgccgtcgccagaatcgcactgtaggccagcgcccagaacacggtgggctgccagtcaatttcacgttgcggcaccagtaaagcgaccacactcatcaccagcgccgcatagagcatctgccaggatgttaacgacaataaatccacgcgcggatgacgggcatacagacgtttagcaacaatcgcgctcgccccccaactgacgccggagaggattgccagcatggcacttttcatcgaagagaaatcgagttgccacggctgcaacaccaaaaataagccgaaagcggcaatcagtatcgcgaaatattgcccacgtcgcaggcgttcaccgagaaacaacgcggcgaaaatcaccacccagaacggcatggtatagcttaggatcgccaccttccccgctccgccgctgaccagcgcccactgcgccaggccaaccatcccgcaggtttgtaacagggcaatggctaaggtgtatttaaacggtgtcgggcgcattccgcgaccacgtaataaaaggacgatgaataaaacgagagcgccgaaaatgcagcgtaaggcggtaaagtcgaaggcaccgatgtagctggtgacttgcttcatgaaaatccagctataactccagataagtgtgagcacaaccaggccactgattgccagtgggttgctctttcctgcgacagacatgagagatccagtgtgtagttttcctgtggacactatacgccggtaaagaaacttcagcgactgcctgaaaggcagtcgctgaagaaggtcagattacagcaggtcgaaacggtcgaggttcatcactttcacccatgccgccacgaagtctttaacaaacttctcgtgagcatcgctgctggcgtaaacttcagccaccgcacgcaggacagagttagaaccaaataccagatccgcacggctggcagtgtatttcacttcgccggtttcgcggtcacggccttcaaacagctctttcgattcgtcggtcgctttccactcgtaacgcatatccagcaagttcacgaagaagtcattgctcaatacgccaacgcggtcagtgaagacgccgtttttgctgccatcgaagttggcacccagtacacgcatcccgcccaccagcgcggtcatttccggcgcggtcagggtcagttgctgggctttgtcgatcagcagtgactcggtggtggaaacatccagacgagcgcgatagttacggaaaccgtcagcaattggctccagcagctcgaacatctcaatgtcagtctgatcctgacgcgcatcaacgcggcccggcgcaaacggtacatgaatgctcaaacctgcggcgcttgcggctttctcaacaccaaccacaccagccagcacgatgatatccgccagcgaggctttaccagactctttctggattttctccagaacaggcagagcacgaacggctgcggcgttcacatcccagtcgcgctgcggcattaatgccagacgcgcaccgttggcaccaccgcgtttgtcgccaccacggaaggtagaagcagaagcccaggccaccgataccagctcactaacagacagaccagaatccgcaatcgcgaatttcagatcgataatgtcctgctcggtcgggttgtagatcggctgcggcagcggatcttgccagatcagatcttctttcggcacttccggcccgatgtagcgagatttcggccccatatccctgtgcgtcagtttgaaccaggcacgggcaaaggcttcgttgaacgcctgcggatcgttgaggaaacgacgagagatcttctcgaactcaggatcaaaacgcagcgtcaggtcggtcaccagcatcgtcggtttacgtttcttcgacggatcaaacggatccgggataatttccggtgcgtctaccgcttcgaactggattgcgccagccgggctgcgggtctgtacccactcatacttgaacaggttctcgaagaaatagttgctccactgggtcggcgtctgggtccagactacttccagaccagaggtaatggcatctgcgccaacgccgctgccgtaagtgctcgcccaacctaaaccttgttcttcaatcggtgcagcttctggatcaggacctacatttgatgtcggaccggcaccgtgggttttacccagcgtatgaccacccgcaataagcgccacggtttcttcgtcgttcatgcccatgttgccgaaggtcgcgcggatagctgctgccgcagaaagcggttcgccgctgtggtccgggccttccgggttaacgtaaatcaggcccatctcggttgcacccagcggtgctttcgccagcgcttccggatgacggtgagtcagccaggctttttcatcaccccagttaacatccagatccggttcccagacgtcttcacgaccggcaccaaaaccgaaggtacggaagccggagttttccagcgccacgttacctgcgaggataaacaggtcggcccaggagattttctgaccatatttctgtttgattggccacaacaggcgacgcgctttatcgaggcttacgttatccggccaagagttcagcggtgcaaaacgttgctgaccacgacccgcgccgccgcgtccatcgattgaacggtaagtacctgcgccgtgccaggccatacgaataaacagaccggcgtagctgccccagtcggctggccaccacggctgagattctgtcagcagggctttcagatcttttttcaggccgtagtaatctaatttgctgaattctttgcggtagtcaaagtcctcacccagcgggttagaacgattagaatgttggtttaacaggtcaacacggagttgatttggccaccagtcgcgagtggttgtgcccgcccccgcgctctggtcgtgaccgccctgatggaacgggcatttgccagtggctgtcgtgttatggatatcgtctgacgtgctcatcaatgtgctcccctctacagtgttaccgttacgatacacagcgttagagagaagttataattgaattaatccacggatgcgatagttgagatcttacatattgttggttaaagagatgtaggtcaaattgatcgtaattaagcttttttgattatgtccgaattcggacaaatgctttataaaaaagggttttagcttcatatccttcaagtaatgagggagaaaacaaggctgacaaccttattttcccgccctcatttcgaggcagcattttgtgctctgtttaaaatttgtgatcactgtgtgattttcacaaaagccacactatttataaaccaggtcgaacacccagcgtatggcaaatcgcgtaactcatttcagcgcggttaagcgtatagaagtggaaatctttcactccttcacggcttaaaatcttcaccatatccatggcaatattcgctcccaccagtttgcgggtttcggcatcgtcgtccagcccgtcaaacatttgtgccatccacgccggaatacgcacgttggtcatatcggcaaatttcttcgcttgtttaaagttcgagaccggcaaaattcccggaataatttccacatcaatacccgccgatacgcagcggtcacgaaaacgcaggtagctttcgacatcaaagaagaactgagtaatcgcgcggttggctccggcatcgactttgcgtttcaggttgagcaaatccgcctgagcgctttttgcttccgggtgaacctccggatacgccgccacggagatatcgaaatctgccacttcttttaacagcgtcaccaggtcagaagcatacatttccggcttaccacttcccggcggcagatcgccacgcagcgccacgatatgacgaataccgttattccagtagtcgcgtgcaatggtgcgcagctcgtcgggcgtcgcatcaatgcaagtaagatgcggtgccgcttccagaccagtgcgatctttaatgcctttaataatgctgtgcgtacggtcgcgctcgccggagttcgcgccataggtcaccgatacaaacttcggtttcaggctgctaaggcgatcgatggagttccacagggtctgctccatttcactggtacgcggcgggaaaaactcgaacgaaacgttaatttgcccctggacttctgccaggctctgattcagggcatcccgctggctggcgtgaaaaaagctcataccttacctcatcaatcgcttgtagttatatgttgtgttgtgcacatctatccgtttagacgtccagatgtaaagatgaaggaaaagccgaagggcgtcaaccgaaaaatgaccaatgatggtgaggaaaaatcagggaagatgaaaaaacttcaggatggtaagaaaaagaaaatccggtatgcaaagcaaaccggactgcaaatataaactaaccatgtacttattgcttcttgccggattcgtcgtaaacgcttaatccggcctaatcctatgataattcaatatatttcattagaaaccataaacccgaaaacatgagtaccgggcattattaaatttctgaaattacaacaactgtgccagccggttgatatccgactgaatcgccccggcggtgacgtcgcgccccgcgccaggcccacggatcaccagcgggttgtcgcgataccagcggctttcgatggcaaagacgttatcgcacggcagcagtgatgccagcggatggtcttcacgcaccgcctccacgcccacacgcgctttgccgttggcatcgaaacgcgccacgtagcgcagcaccagccccatttcgcgggccgcttccagccgttgcaccatctgctcgttaagttcatcgccattttcaaagaaatggtcgatgctgccgccttcgcaatgggcaggcaccagcgactccacgcgtacctgatccggttcgatgttgtaacctgcttcacgcgccagaatcaccagcttgcgcattacgtctttgccggaaaggtcatcacgcgggtcaggctcggttaacccttgctgccacgcctgatccaccagctcggtaaacggcacgctaccgtcgaattgcaggaacagccaggagagcgtgccggagaagatcccactgatcgacaaaatagtatcgccgctgtcgatcagatcgcgcacggtatggttgatcggcaagcccgctccgacggtagcattgtacagccagtgacgcccggttttttcgaaggcgtcgtggatctggcgatatttattgctgtcgctggctcccgccagtttgttggcgctgatgacgtggaaaccgtggctggcgaaatcaagatactgatcagcaagctgctggctggcggtaacgtccagcaccactaaatcatcatacggatgggcgcgcatccacaggaacaacgactcttcatcctgctcaaccgcttcatcgttgaagaaggctaacgcgcggctggcgtccagcccgtcatagctcaacaggctgcggcggctgtccaccacacctgccagcacaaactcaaagccggtacgtgccgaaagcgtgctctgctcacgggcgaacagttccagccaacgggaaccgatattgcccttaccgaacaataccaggccgatgcgtttttctgcgcggaagacggactgatgcagcccctgaatcaggctttcggtcgggccggtgcgcagtactgccaccaggctgatgccgtcatcggactgccaggtaaattcgaccggctggcctttcagttgctgccagaagcggtggcaatgcagcgggttacgggtgacgcctgcaccgaccatcgccaccagcgccagcccctgacgcaggcgcagttcgccaggtaatcccgcttcgtcgaggattttcagcgcactgtcggccacttctgaggtgtagcaaaattgcagcaactggcgatcgttatgtacgccaaccgccagcgggcgtacctgcgcgcgtttcaggatttggtcgatctctttatgcgccagtttgaaatcctgactggcgggcacctgaaactcaatcaaacagacatcatcgtggctggtgacaatacgcgcaccagtaccggaggccagcacgcgttcaatgcgcgtggaaccttgatccggcgtgtagctacagcgcagttgcaggtcgatttcgctgccagaaaccggctgtaaagtacgggcgtgaagaacgggagccgccaggcgcgccagttcgctggcctcatccagacgcagcaacggcagcaggcaggcatctttcactttacgcgggtcggcactgtataccccggcgacgtcgctccagatggttacgcgagaaacacccgccagcgcaccgatttgtgtcgcggaatagtcggaaccgttacgccccagcagcaccgtttcaccggcgttgttgcggctgataaatccggtcaccaccagacgtttgcccggatgttgcaccagcagctgttgcagcaacgggtaagaaagcccttcatcaacctgcggttgtgcggcgcgttcagcgcgtaaaaactcgcgggcatcaagccaggccgctggcagcccttgttgattaagtaccgcagacatcaggcgtgccgaccacacttcaccgtgccccaccacttccgcatacactgcgtcgttaataccgctgtcgagcagcgccgccaggcgctcaaggtcgctgacaaaagcgctaatgaggctatcggcttcttcagcgggtagcagaccgctaatcagatcgcactgatagcgacgcagcgtttgttgaacctgatgcgcagagagacgatcggtctggcttagtttcaaccagttaatcaactggttagtggtgctaccggcggcggaaaccaccatcatatcgtcaggctgagagtactccgccataatgcccgcgacacgcaaataacacttcacatcagccagactactgccaccaaatttatgcagctgacgacctttcgcccctgcctgcgcaatcacactcatttttaccccttgtttgcagcccggaagccattttccaggtcggcaattaaatcttcgccatcttcaataccggtggagatacgcagcagcgtctcggagatcccggcggcagcacgcgcttctggtgccatgcctgcatgtgtcatggttgcggcgtgagagattaaactttccactccccctaatgattccgccagcgtaaacaacgacagcccgctcaggaaacgacgcagcgtctgctcatcgccatccagttcaaaactcaacattgcgccaaagcctttttgctgacgcgcggcaatttcatgcccctgattttccggcagcgacgggtgatacagttttttcaccaacggctgggtttgcagatatttcacaatcgcctgcgcgttacgctgggccaactccatgcgcggcaccagcgttcgcaacccgcgtagcagcagatagctgtcaaacgcgccgcccgtcacgccaatattgtttgcccaccaggcaagttcagtgacaacgtccgggtctttagcaatcaccacgccggccaccacgtctgagtgaccgttcagatatttcgtgcatgaatgcaacaccagatcggcacctaatgccagcggattttgtaatgccgggcttaagaaggtgttatccaccacgctcaccgccccgacttcccttgccagatggcagattttcgcaatatccacgacgcgtaacaatggattacttgggctttctaccagtaccagtttgggtttttctgccagcgctgcccgtaatgcctgttcatcgccttgatcaacaaacaacacgcgatagcaaccgcgtttcgccaggctgtcgaacaggcgatagctaccgccgtagcagtcgtgcggcgcaaccagcagatcgccaggtttcaaaaagacggtcgttaccaggtgaatcgcggacatgccggtattagtaagtactgcaccagcaccgccttccagttctgccagcgcacgctgaaccacatcgcgcgttgggttgccgcgacgcgagtaatcatgcgcgcgcggttcattaaatccggtaaagttatatgtgctggaaaggtggatcggtgggacaacgcaaccatactgttcgtcgtcatttaacccgctacgcactgcgatggtggcctgtttacgcgtcatgtgatgaagttccctgggctttgtcggtgaaatgtcaggcaccagagtaaacattgtgttaatggacgtcaatacatctggacatctaaacttctttgcgtatggattgagcaaatcccaaatagccgttaaaattatatgcattatcacgccgacaggtgcattacacgatgtcacggtaacgcctgtacggtaaactatgcgggtttacggtcagtacccacataaattgtgtggtctggtctcaatttattgacgaagaggattaagtatctcatggctgaatggagcggcgaatatatcagcccatacgctgagcacggcaagaagagtgaacaagtcaaaaagattacggtttccattcctcttaaggtgttaaaaatcctcaccgatgaacgcacgcgtcgtcaggtgaacaacctgcgtcacgctaccaacagcgagctgctgtgcgaagcgtttctgcatgcctttaccgggcaacctttgccggatgatgccgatctgcgtaaagagcgcagcgacgaaatcccggaagcggcaaaagagatcatgcgtgagatggggattaacccggagacgtgggaatactaaagcggaaaagagcggcgcggagtggaaccgcctgatgcgctacgcttatcaggccttgtattatccctccagtgcagagaaaatcggccagttttctctgcctgcagtccgcatgccgtatcgggccttgggttctaacctgttgcgtagatttatgcagcggactgcctt

SEQ ID NO: 65 - DNA, 40748 bp, Escherichia coli
  source 1..40748: mol_type = genomic DNA
gttttccggctgccggtggcatcttccgttgcgcagggtaagtcactgtgtggattatcataacggtagcgggtgatatcgccgtcaggggcagtttcctgaatcagacggccggattcatcatattcccggcgcaattccagcccgtcaggcccggtggctgacgttaactggttgtggtggttatagtaaaacgccgatgccctgccatccggcgtggtgatgcgcgtgatgaggcccgtcaccacatccgggctgtactctgttgtcctgcctgcggcatccgtctgtgccctgagcctgcccacggcgtcaaactgactctgcgtgacgctgccgtccgcgtgttcctttttcaccacccgcttcagcccggcttcgccctgcgtgtgcagcacttcacggcggtccaggctgtcggtgatggtgatgcggtctttctcatactgatacgtgtagcttaagcctgccgggtttagctgttctgtcacccgcccgtcgctgtcgtaacggtaacggatttccggtcggcccgtgtgacggtgcgccaccatccggccccggtatttatcatcgtaagtaaagctgcgcacctgtgtattgctgcggtcatacactgccgccagttcgccgcgcggcgtccagccatagcgcaccagcggcgcggcaggtaaattctccgggtattccgggtcgtgcgtcagccacacggcagacagacggatgccgttgtcccggccatattcggtgtaacccggcagggtatcaggaaaagcggacggttccgtcccgccggaaatggcctgctgccgggcttcttctgcccgctgcgcctgcgtggtcagtaccagccggaagtgacgcccggcaccatccgtcacgccggtgatttcgccgctgaattcaccggcggcttcgtggtggaacgtctgtgtgcgcccgaagcggtccaccagcccggtcagtacccggtacggcggcagcggcgcaggcagcacctcatccgcttccggcacccgctcacaccagccgagtacccaccacggcccctgcggactgtttgtcgccagataacgatgcggactcaggcgaagctcttccggcagcgcctgccagagtgcggccagccggtgaccttcatccagtttcgccacaccgccgcgcaccagccagagtgattcgctgcggctgtaaccgtcctcaccgggaaacaggtgctcaaaatacaggcttctgccgccgttatcactgagtatcagtgtgttatcgcgcagctgtaagcggatatccgcaggcattttccagccggggccgaggctccccaccggcgcgggcgtttttgtccggtaactgctgtaggtgcgggagagaatgaacggcagcgggccgggcagggcgatgtcggtttcaccgggaaggacctttgcacccagcagcggattgaccggatggccggacgtcaccccgccggggcacaccgaacaggccacgccggtgggggcaccgatgcgcaccccggctgaaccctggacaatgctaccgccatactgcgtcatgtcgccctgacgcgctgccggttttccgctcatcgtaaaatccttttgaaataaataagaaccagaagcctagcgccagtcaacaacaggaaatgataatgagttaacaccccggaatttttcagaatttataaaaggcaaattacaggcacaaaaaaagcgccgtgcggcgcttttttcggaaatccggtcttatttgctgcccgggatgttgaaacgcttgttgaagcggtcaacacggccaccggtagcaacatcacgctgtttgccagtgaagaacgggtggcacttgctgcacacgtcgaggttcaggtcatgaccaacggtggagcggattttcattacgttaccgcaagagcagctagcagtaatttcttcgtatttcgggtgaatatcttttttcatgggaaaacctcggtttaaggccgcgtcgctcttccagccctaacgccagacaccacgcgatgttaaaagtatagcttcaatacgatcatttcgtacgaaggcgcgaaatcatacagaaattaaccagcgtatgcaaactgatccgcactcttctacggcaatgtgtatactaacccaccgaatttcaagtcaggatgatgctatgcccgttgcccacgttgccttgcccgttccgcttcctcgtacctttgactatctgctgccagaaggcatgacggttaaagccgggtgtcgcgtgcgcgtgccgtttggcaaacagcaggagcgcatcggggttgtggtgtcagttagcgatgtcagtgagctgccgcttaacgagctgaaagcggtagttgaagtgctggacgttgagccggtatttactcactccgtctggcggttactgctctgggcggcagattactatcatcatccgattggcgatgtgctgtttcatgccttgccgattttactgcgccaggggcggcctgcggcgaacgcgccgatgtggtactggtttgccactgaacaaggtcaggcggtggatcttaacagcctgaaacgttcgccaaagcaacaacaggcgctggcggcgttacggcaaggcaaaatctggcgcgaccaggtcgcggaacttgaatttaatgatgccgcgttgcaggcgctgcgcaaaaaaggtctgtgtgatttagcaagtgaaacaccagagtttagcgactggcgaacgaactatgccgtttctggtgagcggttgcgattgaataccgaacaggccaccgccgttggcgcaattcatagcgcggcagatactttttctgcctggctgctggcgggcgttaccggttccggtaaaacggaggtttatctcagtgtactggaaaacgtgctcgctcagggcaaacaggcgctggtgatggtgccggaaatcggcctgacaccgcaaactatcgcccgttttcgtgaacggtttaatgcccccgtggaagttctgcattccggcctgaacgacagcgagcggctttcggcgtggttgaaagcgaaaaatggcgaggcggcgattgtgatcggcacccgctccgcgctgtttacgccgtttaaaaatctcggcgtgattgtcattgatgaagagcacgacagctcctacaagcagcaggaaggctggcgctatcatgcccgcgacctggcggtgtatcgtgcgcatagcgagcaaatcccgattattcttggctccgcaacgcccgcgctggaaacgttgtgcaacgtccagcagaaaaaataccgcctgctgcgcctgacgcgccgggcggggaatgcgcgtccggcaattcaacacgtgctggatttaaaaggtcagaaggtgcaggcaggtctggctccggcgttaatcacccgtatgcgccagcatttacaggccaacaatcaggttatcctctttcttaatcgtcggggttttgcgcctgcgctactgtgccacgactgcggctggattgccgaatgcccacgttgcgatcactactacacgctgcatcaggcgcaacagcatttgcgctgtcaccactgtgacagtcagcgtccggtgccgcgccagtgcccttcctgcggttccacgcacctggtacccgtggggctgggcaccgaacagcttgaacagacgcttgcgccgctgttccctgatgtgcccatttctcgtatcgaccgcgataccaccagccgcaaaggggcgctggaacagcaactggcggaagtacatcgcggcggtgcgaggattttgatcggcacacaaatgctggcgaaaggtcaccactttccggatgtgacgctggtggcgttactggatgtggacggcgcgctgttttctgccgattttcgctcggcagaacgtttcgcccagctttacacccaggtcgccggtcgtgccgggcgtgcgggtaaacagggcgaagtggtgctgcaaacgcaccatccggaacatcctctgttgcaaacgttgctctataaaggctacgacgcctttgccgaacaggcgctggctgagcgacgcatgatgcagctgccgccgtggaccagccatgtgattgtgcgtgcggaagatcataacaatcagcatgcgccgctgttcctgcaacaactgcgtaatctgatcctttccagcccgctggcagacgacaaactgtgggttctcggcccggttccggcactggcacctaagcgtggtggccgctggcgctggcagatcttgttgcagcacccttcccgcgtgcgcttgcaacacatcattagtggtacgctggcgcttattaatacaataccggattcccgcaaggtgaaatgggtgttggatgtcgatcccatcgaaggctaatgcgcaaacgttgcgaggcggatcgaaaaattcaatattcatcacacttttcatgaaaattctgtaaccgttttcacgcgctatctgctaaaaatgttgccgatgtgaagtaaacatggatgtagtacgcctgacgtgccaggcgaggagtgagtgtgaaagcgaagaagcaggaaactgccgcgaccatgaaagacgttgccctcaaggcaaaagtctctacagcgactgtctcccgagcattaatgaatcccgataaagtctcccaggccacccgtaatcgggttgaaaaagcggcccgggaagtgggttatttaccgcagcctatggggcgcaacgtcaagcgtaatgaatcccgcaccattctggtgattgtcccggatatctgcgatcccttctttagcgaaattattcgcggtatcgaagttacggcggcaaatcacggatatctggtgctgattggcgactgtgcgcatcaaaatcagcaggaaaaaacctttatcgatttgatcatcaccaagcaaattgatggcatgttgctgctgggttcaaggctgccgtttgatgccagcattgaggaacagcgtaatctgccgccgatggtgatggcgaacgaattcgcaccggaactggagctacctacagttcatatcgacaatctgaccgccgcatttgatgcagtaaattatctatatgagcaagggcataaacggattggctgtatagccggtcccgaagagatgccgctgtgtcactaccgcctgcaaggttacgttcaggcgctgcgtcgctgcggcattatggttgatccgcaatacatcgcccgtggcgacttcaccttcgaagccggaagcaaagcgatgcagcagctgcttgatcttccacaaccgcctactgctgtcttctgccatagcgatgtgatggcgctcggcgcactttctcaggcaaaacgccaggggctgaaagtcccggaagacctttccataatcggttttgataacatcgacctgacgcaattttgtgatccgccgctgacaaccatcgcgcagccgcgttacgaaatcggtcgggaagctatgctgttattgcttgatcaaatgcaggggcaacacgttggcagtggctctcgtttaatggactgcgaacttatcatccggggatcaacacgcgcgttaccttaaagtaaacctttaagactgccgtgactggtcaaaggcccgccgcttaagtaacatggcgggctgacgaacgaataaatacagcgaaacgatagtggcacaacgagattatgtacgccgcagccaaccggcaccttcgcggcgaaaaaagagcacctcacggaaaaagcaacgaaatctgcctgcggtttctcccgctatggtcgctattgctgccgccgttcttgtgacctttatcggtggtctgtacttcattacgcatcacaagaaagaagagtccgagacgctgcaaagccagaaagtgaccggtaacggactaccaccaaaaccagaagaacgctggcgctacattaaagagctggaaagtcgccagccgggtgtgcgtgcgcccacagaaccttctgccggtggtgaagtgaaaacgccggagcaactgacaccagaacaacgtcagcttcttgaacaaatgcaggctgatatgcgccagcagccaacgcagctggttgaagttccgtggaatgaacagacaccggaacagcgtcagcaaacgctacaacgccagcgtcaggcgcagcaattagcggagcagcaacgcctggctcagcagtcgcgtacgactgaacaaagctggcagcagcagacgcgtacgtcgcaagccgcgccggtacaggcgcaaccgcgccagtctaaaccagcttctactcagcagccgtaccaggatctgctgcaaacccctgcgcacacgaccgcgcagtcgaagccgcagcaagctgcgccggttgctcgtgccgctgacgcgccaaaaccgacggcggagaaaaaagacgaacgccgctggatggtgcagtgcggttcgttcagaggcgcggaacaggcagagacggtacgtgctcagctggcgttcgaaggatttgactcgaaaatcaccaccaacaatggctggaatcgtgtggtcattggcccggtgaaaggcaaagagaacgcagacagcaccctcaatcggttgaagatggcgggtcatacaaactgcattcggctcgccgccgggggttgaaaccctcaaaatcccccccatctataattgcattatgccccgtacttttgtacggggtttgtactctgtattcgtaaccaaggggtcagctcgtgacaactatagtaagcgtacgccgtaacggccatgtggtcatcgctggtgatggtcaggccacgttgggcaataccgtaatgaaaggcaacgtgaaaaaggtccgccgtctgtacaacgacaaagtcatcgcgggctttgcgggcggtactgcggatgcttttacgctgttcgaactgtttgaacgtaaactggaaatgcatcagggccatctggtcaaagccgccgttgagctggcgaaagactggcgtaccgatcgcatgctgcgcaaacttgaagcactgctggcagtcgcggatgaaactgcatcgcttatcatcaccggtaacggtgacgtggtgcagccagaaaacgatcttattgctatcggctccggcggcccttacgcccaggctgcggcgcgtgcactgttagaaaatactgaactgagtgctcgtgaaattgctgaaaaggcgttggatattgcaggcgacatttgcatctataccaaccatttccacaccatcgaagaattaagctacaaagcgtaaggatctcccatgtctgaaatgaccccacgcgaaatcgtcagcgaactggataagcacatcatcggccaggacaacgccaagcgttctgtggcgattgctctgcgtaaccgctggcgtcgcatgcagctcaacgaagagctgcgccatgaagtgaccccgaaaaatatcctgatgatcggcccgaccggtgtcggtaaaactgaaatcgcccgtcgtctggctaagctggcgaatgcgccgttcatcaaagttgaagcgaccaaattcaccgaagtgggctacgtcggtaaggaagtggattctattattcgcgatctgaccgatgccgccgtgaaaatggtacgcgtccaggctatcgagaaaaaccgttatcgcgctgaagaactggcagaagaacgtattctcgacgtgctgatcccacctgctaaaaacaactggggacagaccgaacagcagcaggaaccgtccgctgctcgtcaggcattccgcaaaaaactgcgtgaaggccagcttgatgacaaagaaatcgagatcgatcttgccgcagcaccgatgggcgttgaaattatggctcctccaggcatggaagagatgaccagccagctgcagtccatgttccagaacctgggcggccagaagcaaaaagcgcgtaagctgaaaatcaaagacgccatgaagctgctgattgaagaagaagcggcgaaactggtgaacccggaagagctgaagcaagacgctatcgacgctgttgagcagcacgggatcgtgtttatcgacgaaatcgacaaaatctgtaagcgcggcgagtcttccggtccggatgtttctcgtgaaggcgttcagcgtgacctgctgccgctggtagaaggttgcaccgtttccaccaaacacgggatggtcaaaactgaccacattctgtttatcgcttctggcgcgttccagattgcgaaaccgtctgacctgatcccggaactgcaaggtcgtctgccaatccgcgttgaactgcaggcgctgaccaccagcgacttcgagcgtattctgaccgagccgaatgcctctatcaccgtgcagtacaaagcactgatggcgactgaaggcgtaaatatcgagtttaccgactccggtattaagcgcatcgcggaagcggcatggcaggtgaacgaatctaccgaaaacatcggtgctcgtcgtttacacactgttctggagcgtttaatggaagagatttcctacgacgccagcgatttaagcggtcaaactatcatcattgacgcagattatgtgagcaaacatctggatgcgttggtggcagatgaagatctgagccgttttatcctataatcgcgttcaatcattttcatcattgtttgatggggctgaaaggccccatttttattggcgcgtattatgactgaacaacaaattagccgaactcaggcgtggctggaaagtttacgacctaaaaccctccccctcgcctttgctgcaattatcgtcgggacggcgctggcatggtggcaaggtcacttcgatccgctggtcgccctgctggcactgattaccgccgggctattacagatcctttctaacctcgccaatgattacggcgatgcggtaaaaggcagcgataaacctgaccgcattgggccgctacgcggcatgcaaaaaggggtcattacccagcaagagatgaaacgggcgctcattattaccgtcgtgctcatctgtctctccgggctggcactggttgcagtggcatgccatacgctggccgattttgtcggtttcctgattcttggcgggttgtcgatcattgccgctatcacctacaccgtgggcaatcgtccttatggttatatcggtctgggtgatatttccgtactggttttctttggctggttgagtgtcatggggagctggtatttacaggctcatacattgattccggcactgatccttccggcgaccgcatgcggcctgctggcaacggcagtactgaatattaataacctgcgtgatatcaatagcgaccgcgaaaatggcaaaaacacgctggtggtgcgcttaggtgaagtgaacgcgcgtcgttatcatgcctgcctgctgatgggctcgctggtgtgtctggcgctgtttaatctcttttcgctgcatagcctgtggggctggctgttcctgctggcggcaccattactggtgaagcaagcccgttatgtgatgcgggaaatggacccggtggcgatgcgaccaatgctggaacgtactgtcaagggagcgttactgactaacctgctgtttgttttagggatattcctaagccagtgggcagcataactgacaaatatcaattaacaattgatgattttgccaacagcctacatagcgcgatatactgaaaattctcgcagcaactgaatgttaagcctatgaaatacgatacttccgagctttgtgacatctctcaagaagatgttaacgtcgtggaaccgctgttctccaactttggcggacgggcgtcgtttggcggacaaataatcacggtaaaatgtttcgaggacaacgggttgctgtacgatctgctcgaacagaatggccgtggtcgtgttcttgtcgtcgatggcggtggttctgttcgtcgcgcactggtcgatgctgaactggcgcgtctggcagtacaaaatgaatgggaaggtctggtcatttacggcgcggtgcgtcaggtagatgacctggaagagttggatatcggcatccaggcgatggcggcaattccggttggtgccgctggcgaaggcattggcgaaagcgatgtccgcgtcaattttggcggtgtcaccttcttctccggcgaccatctttatgccgacaataccgggattattctttctgaagatccgctggatattgaatgatagaaaaggcaccgcaaggtgccttttttctgcgttacctgttggcctacacagtaaagaaattacgcggaagatgaagcgtaatcagacctcttccatgcgacccagcagggcctgcagacgttcctgccagccgttctgctgttctttcagatggttgttctcacgctccagctcttcgcgctgatgctgggcattttgaacttcctgcgacagtgagttgtttttttctttcagctcttcgatttccatctgcaacagagtgatggtatcaatcgcctgctgtacttttgcttccagtttctcaaacacttctaatgacattgtcatacctctcctgaattgcaaggcgttgatggataaaaatcctcgtcccgattaccggtgacgccttaataaatacgagcgcactttagttagctccgattgtatgaagccgcgccatcgctgtccagcggcacgccttgcagattacggtttgccacacttttcatccttctcctggtgacataatccacatcaatcgaaaatgttaataaatttgttgcgcgaatgatctaacaaacatgcatcatgtacaatcagatggaataaatggcgcgataacgctcattttatgacgaagcacacacattttaagttcgatatttctcgtttttgctcgttaacgataagtttacagcatgcctacaagcatcgtggaggtccgtgactttcacgcatacaacaaacattaactcttcaggatccgattatgagtcaaacatcaaccttgaaaggccagtgcattgctgaattcctcggtaccgggttgttgattttcttcggtgtgggttgcgttgcagcactaaaagtcgctggtgcgtcttttggtcagtgggaaatcagtgtcatttggggactgggggtggcaatggccatctacctgaccgcaggggtttccggcgcgcatcttaatcccgctgttaccattgcattgtggctgtttgcctgtttcgacaagcgcaaagttattccttttatcgtttcacaagttgccggcgctttctgtgctgcggctttagtttacgggctttactacaatttatttttcgacttcgagcagactcatcacattgttcgcggcagcgttgaaagtgttgatctggctggcactttctctacttaccctaatcctcatatcaattttgtgcaggctttcgcagttgagatggtgattaccgctattctgatggggctgatcctggcgttaacggacgatggcaacggtgtaccacgcggccctttggctcccttgctgattggtctactgattgcggtcattggcgcatctatgggcccattgacaggttttgccatgaacccagcgcgtgacttcggtccgaaagtctttgcctggctggcgggctggggcaatgtcgcctttaccggcggcagagacattccttacttcctggtgccgcttttcggccctatcgttggcgcgattgtaggtgcatttgcctaccgcaaactgattggtcgccatttgccttgcgatatctgtgttgtggaagaaaaggaaaccacaactccttcagaacaaaaagcttcgctgtaatatgactacgggacaattaaacatgactgaaaaaaaatatatcgttgcgctcgaccagggcaccaccagctcccgcgcggtcgtaatggatcacgatgccaatatcattagcgtgtcgcagcgcgaatttgagcaaatctacccaaaaccaggttgggtagaacacgacccaatggaaatctgggccacccaaagctccacgctggtagaagtgctggcgaaagccgatatcagttccgatcaaattgcagctatcggtattacgaaccagcgtgaaaccactattgtctgggaaaaagaaaccggcaagcctatctataacgccattgtctggcagtgccgtcgtaccgcagaaatctgcgagcatttaaaacgtgacggtttagaagattatatccgcagcaataccggtctggtgattgacccgtacttttctggcaccaaagtgaagtggatcctcgaccatgtggaaggctctcgcgagcgtgcacgtcgtggtgaattgctgtttggtacggttgatacgtggcttatctggaaaatgactcagggccgtgtccatgtgaccgattacaccaacgcctctcgtaccatgttgttcaacatccataccctggactgggacgacaaaatgctggaagtgctggatattccgcgcgagatgctgccagaagtgcgtcgttcttccgaagtatacggtcagactaacattggcggcaaaggcggcacgcgtattccaatctccgggatcgccggtgaccagcaggccgcgctgtttggtcagttgtgcgtgaaagaagggatggcgaagaacacctatggcactggctgctttatgctgatgaacactggcgagaaagcggtgaaatcagaaaacggcctgctgaccaccatcgcctgcggcccgactggcgaagtgaactatgcgttggaaggtgcggtgtttatggcaggcgcatccattcagtggctgcgcgatgagatgaagttgattaacgacgcctacgattccgaatatttcgccaccaaagtgcaaaacaccaatggtgtgtatgtggttccggcatttaccgggctgggtgcgccgtactgggacccgtatgcgcgcggggcgattttcggtctgactcgtggggtgaacgctaaccacattatacgcgcgacgctggagtctattgcttatcagacgcgtgacgtgctggaagcgatgcaggccgactctggtatccgtctgcacgccctgcgcgtggatggcggcgcagtggcaaacaatttcctgatgcagttccagtccgatattctcggcacgcgcgttgagcgcccggaagttcgcgaagtgactgcattgggtgcggcctatcttgctggtctggcagttggcttctggcagaacctcgacgagctgcaagagaaagcagtgattgagcgcgagttccgtccaggcatcgaaaccactgagcgtaattaccgttacgcaggctggaaaaaagcggttaaacgcgcgatggcgtgggaagaacacgacgagtaatgtaaataccggatgaagcgtttatgccgcatccggtagtcccgaaacgtgcgggggcaaccccgcacacatcaataacccttcccttcccctgtgctacacttcgcgccattccttactgcttagagtttgctatgagacgagaacttgccatcgaattttcccgcgtcaccgaatcagcggcgctggctggctacaaatggttaggacgcggcgataaaaacaccgcggacggcgcggcggttaacgctatgcgtattatgctcaaccaggtcaacattgacggcaccatcgtcattggtgaaggtgaaatcgacgaagcaccgatgctctacattggtgaaaaagtcggtaccggtcgcggcgatgcggtagatattgctgttgatccgattgaaggcacacgcatgacggcgatgggccaggctaacgcgctggcggtgctggctgttggcgataaaggctgcttcctcaatgcgccagatatgtatatggagaagctgatcgtcggaccgggagccaaaggcaccattgatctgaatctgccgctggcggataacctgcgcaatgttgcggcggcgctcggcaaaccgttgagcgaacttacggtaacaattctggctaaaccacgccacgatgccgttatcgctgaaatgcaacaactcggcgtacgcgtatttgctattccggatggcgacgttgcggcctcaattctcacctgtatgccagacagcgaagttgacgtgctgtacggtattggtggcgcgccggaaggcgtggtttctgcggcggtgatccgcgcattagatggtgacatgaacggtcgtctgctggcgcgtcatgacgtcaaaggcgacaacgaagagaatcgtcgcattggcgagcaggagctggcacgctgcaaagcgatgggcatcgaagccggtaaagtattgcgcctgggcgatatggcgcgcagcgataacgtcatcttctctgccaccggtattaccaaaggcgatctgctggaaggcattagccgcaaaggcaatatcgcgactaccgaaacgctgctgatccgcggcaagtcacgcaccattcgccgcattcagtccatccactatctggatcgcaaagacccggaaatgcaggtgcacatcctctgattgatttgatcgattgagccttccagtccttcgggactggaatttttttgttcggagaacgaagataaggcaagttaatcaaaacaggagaaaaacatggctgattgggtaacaggcaaagtcactaaagtgcagaactggaccgacgccctgtttagtctcaccgttcacgcccccgtgcttccgtttaccgccgggcaattcaccaagcttggccttgaaatcgacggcgaacgcgtccagcgcgcctactcctatgttaactcgcccgataatcccgatctggagttttacctggtcaccgtccccgatggcaaattaagcccacgattggcggcactgaaaccaggcgatgaagtgcaggtggttagcgaagcagctggcttctttgttctggatgaagtaccggactgcgaaacgctatggatgctggcaaccggtacagcgattggcccttatttatcgattctgcaactaggcaaagatttagatcgcttcaaaaatctggtcctggttcacgccgcacgttatgccgccgacttaagctatttgccactgatgcaagaactggaaaaacgctacgaaggcaaactgcgcattcagacggtggtcagtcgggaaacggcagcggggtcgctcaccgggcggataccggcgttaattgaaagcggggaactggaaagcgcgattggcctgccgatgaataaagaaaccagccatgtgatgctgtgcggcaatccacagatggtgcgcgatacacaacagttgctgaaagagacccggcagatgacgaaacatttacgtcgccgaccgggccatatgacagcggagcattactggtaagcggttacttatcgataaacggcacgatgagcaaatccgcactcatcttattgatcatcccgcgatatgccggcatcaaacggttgataaatgagtgatgatgaccacagacaaggaggtcgcactgctctttttgcataatttccagcagtgtttccggcatttctccgcgttcaatacgcagttttgtcttcggccattgaatatttttcgtcagtttatacagcttgttatccgacttattcttcaacaattgaagaatatcttctgttgcagggaagtagatacccggatacaactcgcttaagccatcatcaatatgaattaacgtcaggtgagcgtcattatgtctggcgagctccagagctttattcaccagtaaggcatcttcttcattcccggaaattgccacgccaatgtgtttataagccatgtttaactccttctaaagcaactccatcaagctaacgaacgcagtgataactcaaaaataatcatctcggcctggcatgagaaagtgaaggccgcatcaagctcaacttgcccctccagatccttaatcttgtaggccacgctggccccttcatctgcagaggatgcagcggcggcaagctctttcagtttggtcataaaagactctgcttcttcgcgggtggcaaaaaagcgcgaaaacttactggtacagttgtcgttatcaatcaccgtaccgatatcaatcgcacatcctttagtactgcatttatctacgacatctttcatagggcacctctgtatattcgcctctctgtcgattacgacttaagaataatgcgccgttaagggaagaacaaacaagtaatgatcttatggattaccattttttttgatattgcttaaggtgaagagttcagaaggattttccgggcattgtcatttgcatcgtggaaataacaatcccggaaaaaaatagcagtaagagatatattaaaggttaattacttgatttattgtcggctttatacttcacatcctgggtatctttaccatatttattttcgccttgtgtgccaatgaacgctccaagatcgataagcatcatcaccagaatcaacgtcgggacaaaacgccccaccgcccattgccagacacccggtaaaatcgcccagttacccgccagcagcatccacgccacaatcatcagaaatgcccatgcgccggaacgcccgcgatcatgcaagcgcttaacggttactgccgctgttggccaaagcaagcacacaaggcaaaacgccgcggtctgaatatcgagtaaatttttacccgccagtgagaaaagcaccagcatgcctgcgaaccacaggcctatccaaatccagaaatcacggcgtccaatacgccctttaaatgagaataaccattgctgtatggtcatgtaagttccttgatggttgtcttttccaggattctacccttttgacaagggcgacagatatcgttttaatcggagccagtcataacaaaaggtactgtcaatgaagccagggtgtacgctgttttttctcttatgttctgcattaaccgttacaacaacggcgcatgcacaaacaccagatacggcaacgaccgcgccttatctgctggctggagcccctactttcgatctctccatcagccagtttcgagaagactttaacagccagaatcccagcctgccactgaacgaatttcgtgccatcgacagcagtcccgacaaagccaatctcactcgtgctgcaagtaaaattaacgagaacttgtatgcttctacagcgctggagcgcggtaccttaaaaatcaaaagcattcaaatgacctggctacccatccaggggccagagcaaaaagcagcgaaagcgaaagctcaggaatacatggcagcagtgatccgcacactcaccccattaatgaccaaaacacaaagccagaaaaaactgcagtcgctgctaacggcggggaaaaacaaacgttattacaccgagacagaaggtgcactgcgttatgttgtcgcggacaacggcgaaaaggggctgaccttcgctgttgaaccgattaagctggcgctatctgaatcgcttgaaggtttgaataaatgacaaaaagcaaagcctttgtgccgatgaatctctatactgtttcacagacctgctgccctgcggggcggccatcttcctttattcgcttataagcgtggagaattaaaatgcgacatcctttagtgatgggtaactggaaactgaacggcagccgccacatggttcacgagctggtttctaacctgcgtaaagagctggcaggtgttgctggctgtgcggttgcaatcgcaccaccggaaatgtacatcgatatggcgaagcgcgaagctgaaggcagccacatcatgctgggtgcgcaaaacgtggacctgaacctgtccggcgcattcaccggtgaaacttctgccgctatgctgaaagacatcggcgctcagtacatcatcatcggccactctgaacgtcgtacttaccacaaagagtctgacgaactgattgcgaaaaaattcgcggtgctgaaagagcagggcctgactccggttctgtgcatcggtgaaaccgaagctgaaaacgaagcgggcaaaactgaagaagtttgcgcacgtcagatcgacgcggtactgaaaactcagggtgctgcggcattcgaaggtgcggttatcgcttacgaacctgtatgggcaatcggtactggcaaatctgcaactccggctcaggcacaggctgttcacaaattcatccgtgaccacatcgctaaagttgacgctaacatcgctgaacaagtgatcattcagtacggcggctctgtaaacgcgtctaacgctgcagaactgtttgctcagccagatatcgacggcgcgctggttggcggtgcttctctgaaagctgacgctttcgcagtgatcgttaaagctgcagaagcggctaaacaggcttaagtctgacaggtgccggatttcatatccggcacttactttccttaactcttcgccttaacgcaaaatctcacactgatgatcctgaatttcctcggctgaagcacggttaagcgtcagtagatttcgttgtgtcgccagcaatacaaatgagttatcactctgccgtaccatcgccagcccgtagcttcccatatgttcccgcgcctcaggtacttcttctgccagcatcataaatgggctgcgttgtaccagttcgctttccgttacccgacgcgccaggtattcatgcccgcgcaaaccacctggcagtggcaaccagcggctgctgatgttcgccagattgttatccagttgttcgcgcacatcaggacgaatacaagagatatgaatatgaaaatggttttgcgtacgcccggtgcgggagttgatcgccaaagaaaccgcgcgatcgggaaccggctggccgtattttttgctcataaaatcacgcgcctgccaggccaaccaaaagaagttcggcgttgaaggatcggtcaacaaaggactttcagtaccgttaatacgatacgttggcatcaacagatattgcagtggaccattaagatcttttaaaaccacgtatccggcattgggtttgacttccgcacatggcgaaggattttgattttgctgctgattgggcaaacattcctcaaggacaatcttacgtaatgtatccgactcttcaccggttaatttccagtaaccaataccggcagccacaacggcgataactatcatcaccaaaaaaagaagacccgcttttttcatctttttttccctgtacctcaaagagatgcaagggtaacgcaaaatcgtgacaaataaaaaacccggtcgcgagaaaccaccgggtttgataattatcctggggaaatcagcgtttgctgatctgatcgaacgtaccgccgttagcaaaatgctctttttgcgctttcgtccagccgccgaactcttcatcaatggtgaataacttcagctttggaaacgcattttcgtactttttcgctacttcagcgtcgcgcggacggtagtagtttttcgcggcaatttcctgaccttctggcgagtagagatatttcaggtaggcttccgccacctctttggtgccttttttctcgaccactttatcgaccaccgacacggttggctctgcgaggatagactcactcggcgtgacgatttcgaatttatctttccccagttcattcgctgccagcagagcttcgttttcccaagcgatcagtacatcgccaatcccgcgctcgacaaaggtgttagtggagccgcgcgcgccagaatccagaacttcgacgtttttatacagtgcccgaacaaaatcctgtgcttttgcctgatcgttgttgttgtgatgcagcgcgtagccccaggcagccaggtagttccagcgtgcgccaccagagcttttcggattaggcgtgatcaccgaaacacccggtttaatcagatcgttccagtcatggatctgcttcggattgcccttacgcaccaggaaaacaatggtggaagtgtacggtgcggagttatccggcagacgtttgatccactctttatcaatccgcccgcgttccgcaatcgcgtccacgtcataggccagagccagcgtgacaacatcagcttcaataccgttgattaccgacgtcgcttgtttacctgaaccaccgtgtgactgacgaatcaccacgttatcaccagtttgctgtttccagtgggcgctgaatgccttgttgtactgttcgtacaattcgcgcgttggatcatatgaaacgttaagaagctgaatatcctttgccataacgctggttgccgccagcaaaaatgttaaccctacgccccacttgttcatcgcccgactctcttatgttgtgttgtgatgagcaaagcgtgccagaaggttaaccaaacattaaagaataaaaaaagattggctataacttgcgggtatatgttgagggattaaaaaggcggaagaaatccgcctcatattgctgacaaagtgcgctttgtccatgccggatgcggcgcgaacgccttatccggcctacaaaagtttgcaaattcaataaattgcagaattcatgtaggcctgataagcgaagcgcatcaggcatttttgcttctgtcatcggtttcaggctaaatgaatctgcctttttccgaaatcattaatacagttttttcgcgcagtccagccagtcgcctttgaacggacgcttcatgttttcgatagcgtcgatgatgtcgtggtgaaccaactgttcgttctggatacctacgcaacgaccgccgtaacctgccagcagcagatcgatagcgtaagcgcccatacgggaagccagaatacggtcgtaaggcaccggagaaccaccgcgctggatgtggcccagcacagttgcgcgggtttcacgaccggtttctttctcgatgaaatgcgccagttcgtcaacatcacacatatgttcggtaatcgccacgatcgcgtgttttttacctttcgcgatacccgctttgatttcatttaccaggtcttcacggctgaattcaacttccggaaccacaacgaattcacagccaccggcaatggccgcagccagcgtcagatcgccacaataacggcccatcacttccaccacggaaatacgctggtgagaagaagaggtgtcacgcagacggtcgatcgcttctacaacggtgctcagcgcagtgaagaaaccgatagtgtagtcagtgcctttgatgtcgttgtcgatagtgcccggcagaccgatgcacgggaagcccatttcggtcagacgcattgcacccatgtaggaaccgtcaccgccgataaccaccagcgcgtcgataccacgttttttcaggttttcgatagccacggcgcggatgttctcgtcgcggaattccgggaagcgcgcagaaccgaggaacgtaccgccacggttgatcatgtcagaaacgctgtaacggtctagctgtaccatacggtcttcatacagacccagatagccgtcataaatgcccattacttccagaccttctgtcagcgcagaacgaacaaccccgcgaattgcggcgttcatgcctggcgcatcaccgccgcttgtcaacacaccgattttcttaatcatgactacctctgaactttggaatgcaaaataaaatctgttgccggaagtcttcttgcacatcgaagtgatccaacgaatgtgcaaatagtataacaatcacttcctgctgaattgattcaggtcaggccaaatggcggtattttatacacaaaatgcgggtctggctctcttttatactgattatgaaagcatagaccgtttaccctccctgggtacgacggaacaggggtcctgatggataattacatccgatcccggaaaacgccgtaaaatagcctgctctacctgatccgccaccatatgtgcctgaaccaaaggcagagagtcttccatttccaaatgaatctgaataaagcgggtcggccctgactgccgcgtgcgaagatcgtgagcgccgctaacacccggccaggaagtcacgatatcaataatttcttgccgttcctcatcaggcaatgcgcgatccagtaatgactgtaccgcctcatatcccatgcgtaacgcgctatataaaatatagatgccgattcccaatgcaaacagagcatcggcgcgatgccagccgtaccaggacaaccccagcgccagcagaattgcgccgttcatcataacatcagactggtaatgtagcatatcagcccgcaccgcctggctttgcgtccggcgcaccacccaacgctgaaacgagacaaggataatcgtacaaattagcgccacaattgtcacgataaccccgacgcctggatctgtcatcggtgttggagatatcagatgttgaatacccgtcaaaaacaggaatagtgccgaaccggagataaacatactttgcgccagcgccgcgagggactctgctttaccgtgaccaaacgagtgattatcgtcggcaggttgcagggaatatcgcaccaccagtaaattcgtcaacgacgcgccgatatccaccagcgaatccaccagcgcggcgagaatactcaccgacccggtataccaccatgcaaaaattttaatcagcaatagcaacgaagccatcgccgtcgcagcaatcgccgcccgactgaccagccgtccataagattgattcataaatactcccgctatcaactgacgctagtataacggaagcaaatcatctgcaatgcattaagcagcaggcaaattgaggataaaaaaaacccccacatcatgtgggggaagacagggatggtgtctatggcaaggaaaacagggtttactactgggaacgtgagttgctactactcaatagcttcaacgatgaacttttttgccattgcgtcacgtcacgcaactgctccattcgttgttgatgtttctcgtttaaaaccgcttgctgctccggcgttaacaggcgatacatttggttgcggacttttgccatctcaacctgacgagcaatttgctcattcgccattttttctgcctgtgcgcgcacagcgttttcatcaaaattttctgcggtgacaaggcgatgcattgtctccagttcgctaacattaacaggaggctgttcgtgccgggcctgttgcataagatctcgcatctgctgacgctgatgttcggttaaacttatgccgtcgaacatatggctctgcgtactgcgctgcgtaagttcttcacccggatgccagttatcgcctgaaccgacttcagcagcgtggcttaatgaactgactgccagcgttgaggccatgacggcagcggtaactatgcgcatcatttgctcccaaaatctttctgtcgcgattcaacgatagagagtttacgattcaggctgcaaacatgcgtcagggggtgtaaaacaacgtaaagtcatggattagcgacgtctgatgacgtaatttctgcctcggaggtatttaaacaatgaataaaatcctgttagttgatgatgaccgagagctgacttccctattaaaggagctgctcgagatggaaggcttcaacgtgattgttgcccacgatggggaacaggcgcttgatcttctggacgacagcattgatttacttttgcttgacgtaatgatgccgaagaaaaatggtatcgacacattaaaagcacttcgccagacacaccagacgcctgtcattatgttgacggcgcgcggcagtgaacttgatcgcgttctcggccttgagctgggcgcagatgactatctcccgaaaccatttaatgatcgtgagctggtggcacgtattcgcgcgatcctgcgccgttcgcactggagcgagcaacagcaaaacaacgacaacggttcaccgacactggaagttgatgccttagtgctgaatccaggccgtcaggaagccagcttcgacgggcaaacgctggagttaaccggcactgagtttaccctgctctatttgctggcacagcatctgggtcaggtggtttcccgtgaacatttaagccaggaagtgctgggcaaacgcctgacgcctttcgaccgcgctatcgatatgcacatttccaacctgcgtcgtaaactgccggatcgtaaagatggtcacccgtggtttaaaaccttgcgtggtcgcggctatctgatggtttctgcttcatgataggcagcttaaccgcgcgcatcttcgccatcttctggctgacgctggcgctggtgttgatgttggttttgatgttacccaagctcgattcacgccagatgaccgagcttctggatagcgaacagcgtcaggggctgatgattgagcagcatgttgaagcggaactggcgaacgatccgcccaacgatttaatgtggtggcgacgtctgttccgggcgattgataagtgggcaccgccaggacagcgtttgttattggtgaccaccgaaggccgcgtgatcggcgctgaacgcagcgaaatgcagatcattcgtaactttattggtcaggccgataacgccgatcatccgcagaagaaaaagtatggccgcgtggaactggtcggtccgttctccgtgcgtgatggcgaagataattaccaactttatctgattcgtccggccagcagttctcaatccgatttcattaacttactgtttgaccgcccgctattactgctgattgtcaccatgttggtcagtacgccgctgctgttgtggttggcctggagtctggcaaaaccggcgcgtaagctgaaaaacgctgccgatgaagttgcccagggaaacttacgccagcacccggaacttgaagcggggccacaggaattccttgccgctggtgccagttttaaccagatggtcaccgcgctggagcgcatgatgacctctcagcagcgtctgctttctgatatctctcacgagctgcgcaccccgctgacgcgtctgcaactgggtacggcgttactgcgccgtcgtagtggtgaaagcaaggaactggagcgtattgaaaccgaagcgcaacgtctggacagcatgatcaacgatctgttggtgatgtcccgtaatcagcaaaaaaacgcgctggttagcgaaaccatcaaagccaaccagttgtggagtgaagtgctggataacgcggcgttcgaagccgagcagatgggcaagtcgttgacggttaacttcccgcctgggccgtggccgctgtacggcaatccgaacgccctggaaagtgcgctggaaaacattgttcgtaatgctctgcgttattcccatacgaagattgaagtgggctttgcggtagataaagacggtatcaccattacggtggacgacgatggtcctggcgttagcccggaagatcgcgaacagattttccgtccgttctatcggaccgatgaagcacgcgatcgtgaatctggcggtacaggattggggctggcgattgttgaaaccgccattcagcagcatcgtggctgggtgaaggcagaagacagcccgctgggcggtttacggctggtgatttggttgccgctgtataagcggagttaaactccgcatttgtaggcaggataaggcgtttacgccgcatccggcatttgagcaggatgcctgatgcgacgctgatagcgtcttatcaggcctacactccgggggttattttccccacaaccgccgtgaaaaatcttcgatcttgccgctcagtcggcgcttttgcatcgttcgcgtccagcttttcgataacccggcggcggagagtaaacggtgatactgatcgtcatcaaacggcatatgccatgcgatggcggcagcctcctgcacggtcacatcgctgacacgggaaaccaactccagcgtcgcgtccgcagacactttccctggcgctatcacgctatacaaccaccccactttacccgtgttttgcatcaactgcgctatgtcactgatatcaaaatggtaattgagtttatagcaaggcgagcgcggctggctgacctgaattaatgcctctccccagcggaaaatatcgcccatataaacattactttccgtgagaccgtcggttgagaggttttcaccaaacgcaggcgcaacaaacaactccgcctgttccgggaattcccgcgcccagtagagataatgctcacgaggataatgacacagcgctctgtctggcccgccgtgaacctttttctccgcctgctcgtcaccttccagccccagctccgtcagcatcaactcaccatcaacctggattttggcaattgcgctgggtttgccttcgggataagcctgaatcttgcctgtgtatacatcaaccggatatcgcatctgttccctctccacgagaaatttccccattagaccatatttattttatgtcaggcgtgctgttttcgcggtaagtatccaggcaggaactcaatagcaaaccggaagaacgttagttcatccggctgtggagattaagaaagcaggtttatttcaccgtacctaaaatttcgattttcgctgctctggctttgactttacgtgaccagatagaggtaagaattggcaccagaatcgaagtcacaatgaccgccgtcgctaccagcgaagttgctgccggagccatcggtttaaacgcaggcaccatttctgcaatcagcacaggtgtcgctaccgcggcccctgcggaactggaagcggcaattccggcagtgccatcgccaccgccaatcaatttatcggcgataatcaacggaataccggtcacgataattactgccacacccaacaggatccccagcaaaccagtctgggcaatcacagtcaaatcaatggtattgcccagcgcgaaggcaaagaatggaatcagcgtttgcaccgctttgctgaaaaattctcgtaattcagggtcaaggttccccagggcaaagcccaccaggaacggtaatactgcgccgacgaaaacatgcggttcaaacgaggcaatccctgcagtgcccagaataatcatcgtcatgagcggcccggactccaacgacatcaacacaaatgccccagcttcttcttttgtgccgtactgctgcatgatggaagcgtaaagtccgccattggtcatatccatcgccgccaccagcgccagcgttgaaagtccggcaaagaatccaacttcaacaccatgttccggaataatgcgcgaggcaattgccgcaaccacccacgcgacggcaatttttgttaccaccagcgtaccggatttacgcaataccgttcccgtcgcgcttaattttattgacgcccccatgcaaaaaaaccacaccgccagaatgggcaccgtaccggtaatcatcccgttggtgaatgatccaaaatatttccccgcccccggcgagaaggtgtggcacagtgcgccaaggaatagcgggacgagcatcataccccccgggattttctcaatcgagcgttttatctgcatttccatcacctgtcggcatatttttaagggctgatgcgtcatttctcaatggagcatcagtgttgatggaaacgaagatagacattcatttaatcaataaaagtgatcaaaaccacatcaattgaaacaccgttttatttttatcggatcattgtttttattttgaaattgatcacaaaaaaaccaccgccgttggcgatggttcattttttaagctgatatgcggcgtaaacgcctcattgcagctggcggcaaatgattattttttcgccgcgaaacgcgccgcagcttcgtcccagttcaccacgttccagaactctttgatgtagtccgggcggcggttctggaatttcaggtagtaagcatgttcccacacatccaggcccagaatcgggaagccggaagcgccagaaatagcttcacccatcagcggagaatcctggttagcagtagaaaccaccgccagtttatcgcctttcagcaccagccatgcccagccggaaccaaagcgggaagctgccgctttctcaaattctgctttgaagttatcaacggagccgaagtcacgttcgatagccgctttcaggtcaccctgcagggtggtgccttttttcagacctttccagaacaggctgtggttagcgtgaccgccagcgttgttgcgcagtacggttttcttgtctgctggcagctggtccagtttggtgatcagctcttcaaccggcaggttggcaaattctggcaggctttccagcgccgcgttggcgttgttgacgtaggtctgatggtgtttggtgtggtggatttccatggtctgcttatcgaagtgcggttccagggcatcgtaagcatacggcagggatggcagggtatagctcatattcatctccagtattgtcgggcggccgattgttaatgccgcgtaagcagttggttcattatagttaattaaatgatattgaaaatgattatcaatgccgtacttttcgtaagggtatggttttgcaggaaaatgcccgagatgtgaagcaaatcacccacttaatgccgtgattgccagtaaatcgacaacggcggcaacaggcgaaaggttaatcgacagcacgatttttacactcatctcgtcggagatgtgacgcgacgaaaaatgatgaggataagaagatgagtaacgcgattacgatggggatattttggcatttgatcggcgcggccagtgcagcctgtttttacgctccgttcaaaaaagtaaaaaaatggtcatgggaaaccatgtggtcagtcggtgggattgtttcgtggattattctgccgtgggccatcagcgccctgttactaccgaatttctgggcgtattacagctcgtttagtctctctacgctgctgcctgtttttctgttcggcgctatgtgggggatcggtaatatcaactacggcctgaccatgcgttatctcggcatgtcgatgggaattggcatcgccattggcattacgttgattgtcggtacgctgatgacgccaattatcaatggcaatttcgatgtgctgattaacaccgaaggcggacgcatgacgttgctcggcgttctggtggcgctgattggcgtagggattgtaactcgagccgggcagttgaaagagcgcaagatgggcattaaagccgaagagttcaatctgaaaaaagggctggtgctggcggtgatgtgcggcattttctctgccgggatgtcctttgcgatgaacgccgcaaaaccgatgcatgaagccgctgccgcactaggcgtcgatccactgtatgtcgctctgccaagctatgtcatcatcatgggcggcggcgcgatcatcaacctttctgttttattcgtctggcaaaagtgaaggatttgtcgctaaaagccgacttctcgctggcaaaaccgctgatcattcacaatgtgttactctcagcactgggcgggttgatgtggtatctgcaattctttttctatgcctggggccacgcccgcattccggcgcagtatgactacatcagttggatgctgcatatgagtttctatgtattgtgcggcggtatcgtcgggctggtgctgaaagagtggaacaatgcaggtcgccgtccggtaacggtgttgagcctcggttgtgtggtgattattgtcgccgccaacatcgtcggcatcggcatggcgaattaatctttctgcgaattgagatgacgccactggctgggcgtcatcccggtttcccgggtaaacaccaccgaaaaatagttactatcttcaaagccacattcggtcgaaatatcactgattaacaggcggctatgctggagaagatattgcgcatgacacactctgacctgccgcagatattgattgatggtcattccagtctgctggcgaaattgctgacgcaaaacgcgctcactgcacgatgcctcatcacaaaatttatccagcgcaaagggacttttcaggctagccgccagccgggtaatcagcttatccagcaacgtttcgctggatgttggcggcaacgaatcactggtgtaacgatggcgattcagcaacatcaccaactgcccgaacagcaactcagccatttcgttagcaaacgacacatgctgactactttcatgctcaagctgaccgataacctgccgcgcctgcgccatccccacgctacctaagcgccagtgtggttgccctgcgctggcgctaaatcccggaatcgccccctgccagtcaagattcagcttcagacgctccgggcaataaataatattctgcaaaaccagatcgttaacggaagcgtaggagtgtttatcgtcagcatgaatgtaaaagagatcgccacgggtaatgcgataagggcgatcgttgagtacatgcaggccattaccgcgccagacaatcaccagctcacaaaaatcatgtgtatgttcagcaaagacatcttgcggataacggtcagccacagcgactgcctgctggtcgctggcaaaaaaatcatctttgagaagttttaactgatgcgccaccgtggctacctcggccagagaacgaagttgattattcgcaatatggcatacaaatacgttgagaagattcgcgttattgcagaaaaccatcccgtccctgacgaatatcacgcggtgaccagttaaactctcggcgaaaaagcgtcgaaaagtggttactgtcgctgaatccacagcgataggcgatgtcagtaacgctggcctcgctgtggcgtagcagatgtcgggctttcatcagtcgcaggcggttcaggtatcgctgaggcgtcagtcccgtttgctgcttaagctgccgatgtagcgtacgcagtgaaagagaaaattgatccgccacggcatcccaattcacctcatcggcaaaatggtcctccagccaggccagaagcaagttgagacgtgatgcgctgttttccaggttctcctgcaaactgcttttacgcagcaagagcagtaattgcataaacaagatctcgcgactggcggtcgagggtaaatcattttccccttcctgctgttccatctgtgcaaccagctgtcgcacctgctgcaatacgctgtggttaacgcgccagtgagacggatactgcccatccagctcttgtggcagcaactgattcagcccggcgagaaactgaaatcgatccggcgagcgatacagcacattggtcagacacagattatcggtatgttcatacagatgccgatcatgatcgcgtacgaaacagaccgtgccaccggtgatggtatagggctgcccattaaacacatgaatacccgtgccatgttcgacaatcacaatttcatgaaaatcatgatgatgttcaggaaaatccgcctgcgggagccggggttctatcgccacggacgcgttaccagacggaaaaaaatccacactatgtaatacggtcatactggcctcctgatgtcgtcaacacggcgaaatagtaatcacgaggtcaggttcttaccttaaattttcgacgggaaaccacgtaaaaaacgtcgatttttcaagatacagcatgaattttcaggaaatgcggtgagcatcacaccaccacaattcagcaatttgtgaacatcatcacgttcatctttccctggttgccaatggcccattttcctgtcagtagcgagaaggtcgcgaattcaggcgctttttagactggtcgtaatgaaattcagcaggatcacattatgacctttcgcaattgtgtcgccgtcgatctcggcgcatccagtgggcgcgtgatgctggcgcgttacgagcgtgaatgccgcagcctgacgctgcgcgaaatccatcgttttaaaaatgggctgcatagccagaacggttatgtcacctggaatgtggatagcctggaaagtgccattcgccttggattaaacaaggtgtgcgaggaagggattcgtatcgatagcattgggattgatacctggggcgtggactttgtgctgctcgaccaacagggtcagcgtgtgggcctgcccgttgcttatcgcgatagccgctccaatggcctaatggcgcaggcacagcaacaactcggcaaacgcgatatttatcaacgtagcggcatccagtttctgcccttcaatacgctttatcaactgcgtgcgctgacggagcaacaacctgaacttattccacacattgctcacgctctgctgatgccggattacttcagctatcgcctgaccggcaagatgaactgggagtacaccaatgccaccaccacacaactggtcaatatcaatagcgacgactgggacgagtcgctactggcgtggagcggggccaacaaagccaggtttggtcgcccgacgcatccgggtaatgtcattgggcactggatttgcccgcagggtaatgagattccggtggtcgccgttgccagccatgataccgccagcgcggttatcgcctcgccgttaaacggttcacgcgccgcttatctctcttctggcacctggtcattgatgggcttcgaaagccagacgccatttaccaatgacacggcgctggcagccaacatcaccaatgaaggcggggcggaaggtcgctatcgggtgctgaaaaatattatgggcttatggctgcttcagcgagtgcttcaggaacggcaaatcaacgatctcccggcgcttatcgccgcgacacaggcacttccggcctgtcgcttcatcatcaatcccaatgacgatcgctttattaatcctgaagcgatgtgcagcgaaattcaggctgcgtgtcgggaaacggcgcaaccgatcccggaaagtgatgctgaactggcgcgctgtattttcgacagtctggcgctgctgtatgccgatgtgttgcatgagctggcgcagctgcgcggtgaagatttctcgcaactgcatattgtcggcggcggctgccagaacacgctgctcaaccagctatgcgccgatgcctgcggtattcgggtgatcgccgggcctgttgaagcctcaacgctcggcaatatcggcatccagttaatgacgctggatgaactcaacaatgtggatgatttccgtcaggtcgtcagcaccaccgcgaatctgaccacctttacccctaatcctgacagtgaaattgcccactatgtggcgcagattcactctacacgacagacaaaggagctttgcgcatgaccactcaactggaacaggcctgggagctggcgaaacagcgtttcgcggcggtggggattgatgtcgaggaggcgctgcgccaacttgatcgtttacccgtttcaatgcactgctggcagggcgatgatgtttccggttttgaaaacccggaaggttcgctgaccggtgggattcaagctactggtaattatccgggcaaagcgcgtaatgccagtgagctacgtaccgatctggaacaggctatgcggctgattccggggccgaaacggcttaatttacatgccatctatctggaatcagatacgccagtctcgcgcgatcagatcaaaccagagcacttcaaaaactgggttgaatgggcgaaagccaatcagctcggtctggattttaacccctcctgcttttcgcatccgctaagcgccgatggctttacgctttcccatgccgacgacagcattcgccagttctggattgatcactgcaaagccagccgtcgcgtttcggcctattttggcgagcaactcggcacaccatcggtgatgaacatctggatcccggatggtatgaaagatatcaccgttgaccgtctcgccccgcgtcagcgtctgctggcagcactggatgaggtgatcagcgagaagctaaaccctgcgcaccatatcgacgccgttgagagcaaattgtttggcattggcgcagagagctacacggttggctccaatgagttttacatggggtatgccaccagccgccagactgcgctgtgcctggacgccgggcacttccacccgactgaagtgatttccgacaagatttccgccgccatgctgtatgtgccgcagttgctgctgcacgtcagccgtccggttcgctgggacagcgatcacgtagtgctgctggatgatgaaacccaggcaattgccagtgagattgtgcgtcacgatctgtttgaccgggtgcatatcggccttgacttcttcgatgcctctatcaaccgcattgccgcgtgggtcattggtacacgcaatatgaaaaaagccctgctgcgtgcgttgctggaacctaccgccgagctgcgcaagttggaagcggcgggcgattacactgcgcgtctggcactgctggaagagcagaaatcgttgccgtggcaggcggtctgggaaatgtattgccaacgtcacgataccccaacgggtagcgaatggctggagagcgtgcgggcttatgagaaagcgattttgagccagcgtgggtaaacactgccggatgcggcacgagcgccttatccggcctacgggtcgaatgtccatgcgggctgtcaccctcaccccggccctctccctgaaagggcgagggagaaaaacatagcctcgtgcggcaacggagctgaacactgctccggacagtcccctcgcccctacggggagagggttagggtgaggggaacaagccgcaccatgtctaaacaaggcaacctaatttacaggaacacagaacatgcaaaacattacccagtcctggtttgtccagggaatgatcaaagccaccaccgatgcctggctgaaaggctgggacgagcgcaacggcggcaacctgacgctgcgcctggatgacgccgatatcgcgccttataaagacaacttccatgcacaaccgcgctatatcccgctcagccagcccatgcctttactggcaaatacaccgtttattgtcaccggctccggcaaattcttccgtaacgtccagcttgatcctgcagctaacttaggcgtcgtaaaagtcgacagcgacggcgcgggctaccatattctctgggggttaaccaacgaagccgttccaacttctgaacttccggctcactttctctcccactgcgagcgcattaaagccaccaacggtaaagatcgggtgatcatgcactgccacgccaccaacctgatcgccctcacctatgtactggaaaacgacaccgcggtctttactcgccaactgtgggaaggcagcaccgagtgtctggtggtattcccggatggcgttggcattctgccgtggatggtgcccggcacggacgaaatcggccaggcgaccgcacaagagatgcaaaaacattcgctggtgttgtggcccttccacggcgtcttcggcagcgggtcgacgttggatgaaacattcggtttaatcgacaccgcagaaaaatcagcacaagtattagtgaaggtttattcgatgggcggcatgaaacagaccatcagccgtgaagagttgatagcgctcggcaagcgcttcggcgttacaccactagccagtgcgctggcgctgtaaggagcaaacatgatccgcaaagcctttgtcatgcaggttaaccccgacgctcacgaagagtatcagcgtcggcataaccccatctggccggaactggaagcagtgttgaaatctcacggtgcgcataactacgccatttacctcgacaaagcgcgtaatctgctgtttgccacggtagagattgaatctgaagagcgctggaatgcggttgccagtactgatgtttgccaacgttggtggaaatatatgaccgacgtcatgcccgcgaacccggataacagcccggtgagtagcgaactgcaagaagtgttttacctgccgtaattgcctaatgtgccggagacgcctccggcacaatatttttaatttcgatttgaaaaataaacatattacaccttcagttaatatatcccggtaacttatatttccccgatgcattgtgagtaaatcacaaaaataatgaataactcattaatgattcatgtggtttatttaaataaccattatgtgcattactccgcaaatctgacctttcactctgtctcaaattgtcattgtttaccgacatatcgcctctcatcacttaatcgctccaccattacaattgattaaaatatattttatggagtccgattaatggcagctcttactgcaagctgtattgacctgaatattcagggcaatggcgcttattccgttctgaagcagttggcgacaatagcgttacaaaacggttttatcaccgactcacaccagttcctgcaaaccctgctgctgcgcgaaaaaatgcactctactggatttggttccggtgtcgccgtgccgcacggtaaaagcgcctgcgttaaacaaccgttcgtattattcgcccgcaaagcgcaggctattgactggaaagccagcgatggcgaagacgtcaattgctggatctgcctcggcgtgccgcaaagcggcgaagaggatcaggtcaaaatcatcggcacactgtgtcgcaaaattattcacaaggaatttattcatcaactgcaacagggcgataccgaccaggtgcttgccttgttaaatcaaaccctcagctcataaggaagtggcgatggagtcatccttacgtattgtcgcgatcaccaactgccccgccgggatcgctcacacctacatggtggcggaagccctggaacagaaagcccgttctctcggtcataccataaaagtggaaactcaagggtccagtggcgttgaaaaccgcttatccagcgaagagattgccgctgccgattacgtcattctcgctaccgggcgtggcctgagcggcgatgatcgcgcgcggtttgccgggaagaaagtttatgagattgccatctcccaggcgttgaaaaatatcgaccagattttcagcgaattaccgacaaactcgcagctttttgccgcagatagcggcgtgaagcttggcaaacaggaagtgcaaagcggcagcgtgatgagccacctgatggcgggcgtctctgcggcgctgccgtttgtcatcggcggtggtatcctggtggcgcttgccaacatgctggtgcagttcggtttgccgtataccgatatgtcgaaaggcgcgccgtcgtttacctgggtagttgaatccatcggttaccttggcttcacctttatgatccccatcatgggcgcttatattgcctcgtcgattgccgataaaccggctttcgctccggcgtttctggtttgctatctggcgaacgacaaagcgctgctcggcacccagtcgggtgcgggattcctcggcgcggtggtgctggggctggcgattggctatttcgtcttctggttccgcaaagtgcgccttggcaaagcattacaaccgctgctcggttccatgctgatcccgttcgttactctgctggttttcggcgtgctcacttactacgttatcgggccggtgatgtccgacctcatgggcgggctgctccacttcctgaataccattcctccatcaatgaagtttgcggcagcgtttctggtcggtgcgatgctggcgttcgatatgggcggccccatcaataaaaccgcctggttcttctgcttctcactgctggaaaaacacatttatgactggtacgccatcgtcggcgttgtcgcgttgatgccgcccgttgcggcgggtcttgcgacgttcattgcgcccaaactgtttacccgacaggaaaaagaggctgccagtagtgccattgtggtcggtgccacagtcgcaaccgaaccggctataccttacgttctggcagctccgttgccgatgattaccgccaatacgctggcgggtggcattaccggcgtgctggtgatcgctttcggaatcaaacgtctggcacctggtttgggtatctttgacccgctgatcggcctgatgtcgccggtgggttcgttttatctggtgctggcgattggcctcgcgctgaacatttcattcattatcgtcctgaaaggattgtggttacgccgcaaagcgaaagccgcgcaacaggagcttgtccatgaacattgagttactgcaacagttgtgcgaagccagcgccgtcagcggcgatgaacaggaagttcgcgacattctgataaacacgctggaaccttgcgttaatgagatcacctttgatggtctgggcagctttgttgcccgtaaggggaataaaggtccaaaagttgccgttgtcgggcatatggatgaagtcggctttatggtcacccacatcgacgagagcggttttctgcgtttcaccaccattggtggctggtggaatcagtcaatgctcaaccaccgggtaaccatacgcacacacaagggatttaaaatccctggtgtgattggttccgtcgcacctcatgcgttaacggaaaagcaaaagcaacagccgctgtcatttgatgagatgttcattgatattggcgcgaacagtcgcgatgaggtggaaaaacgcggtgtggcgatgggcgattttattagcccggaagccaattttgcctgctggggcgaagataaagtggtcggcaaggcgctggataaccgcatcggctgcgcaatgatggctgaactattgcagacggtgaataatcccgaaattacgctgtatggcgtcggcagcgtggaagaagaagttgggctacgcggggcacaaacctcggcggaacacattaaaccggatgtggtgattgtgctggataccgctgtcgcaggtgatgttccgggcattgataacattaaatacccgctgaaactgggccaggggccggggctgatgctgtttgacaagcgctacttccccaaccagaaactggtagcagcgtttaaaaactgtgccacgcagaatgatttaccgctgcaattttccaccatgaaaaccggagcgacggatggcgggcgctacaacgtgatgggcggcgggcgtccggttgtcgcgctgtgtctgccaactcgttatctgcacgccaacagcggtatgatttcaaaagccgattacgatgctctgctcacgctgatacggggttttctgaccaccttaactgcggagaaagtcaacgcgtttagccagttccgtcaggtggattaatgctaaacgaacgccagttaaagattgtcgatctgctggagcaacagccgcgcacgcctggtgagctggcgcaacagactggcgtttcaggcaggaccatcctgcgtgatattgactatctcaactttacccttaacggcaaagcccgcatttccgccagtggtagtgcgggctatcagctggaaatcttcgagcgccgcagcttttttcagttgctgcaaaagcacgataacgacgatcggctgctggcactgttattactgaatacctttactccccgtgcgcaactcgcctcggcgcttaatttgccagaaacgtgggtcgcagagcgtctgccccggttaaaacagcgttatgaacgcgcttgttgcctggccagccgccccggtttgggccatttcattgatgagacagaagagaagcgcgttatcttgctggcgaacttgctgcgcaaagatccgtttttaattccgctggcgggcgtaacacgagacaaccttcagcatttatccacggcctgcgacaaccaacaccgctggccgctcatgcagggtgattatctctccagcctgattctggcgatttacgccctgcgtaatcaactgaccgatgagtggccgcaatatcccggtgacgagataaaacaaatcgttgaacatagcggtctgtttcttggtgataacgctgtaagaaccctgacaggtttgatagagaaacagcatcagcaagcgcagataatttctgccgataatgtgcagcggttgctgcaaagggtgccgggcatcgcgtcattgaatattattgatacgcagctggttgagaatattaccgggcatttattacgttgccttgccgcaccggtgtggattgctgagcaccgccaaagcagcatgaataacctgaaagccgcctggcctgcggcctttgatatgagtctgcactttattacgctactgcgtgaacagctcgatattccccttttcgacagcgatctgatcggtttgtattttgcctgtgcgctggaacggcatcaaaacgaacgccagccgatcattttgctctcggaccagaacgcgattgccactattaatcagctcgccattgagcgcgatgttttacattgtcgggtgattattgcccgtagcttaagcgaacttgttgccattcgcgaagagattgagccgttattgatcattaacaacagccattatttactggatgacgcggtaaataattacatcaccgtaaaaaatatcattacggctgccggtatcgaacaaataaaacattttctggcgacggcatttattcgccaacagccggagcgttttttctctgcccccggaagttttcattattcgaatgtacgcggtgaaagctggcaacatattacccggcaaatttgtgcgcaattagtggcacaacaccatattaccgccgatgaagcacaacgcatcatcgcccgcgaaggcgaaggtgaaaacctgattgttaatcgcctcgccatcccacattgctggagcgaacaggagcgacgttttcgtggattttttattaccctcgcccaaccagttgaggtgaataacgaagtcattaaccatgtcttgatcgcctgcgccgccctgagagatcccctcataatttccccaaagcgtaaccatgtgtgaataaattttgagctagtagggttgcagccacgagtaagtcttcccttgttattgtgtagccagaatgccgcaaaacttccatgcctaagcgaactgttgagagtacgtttcgatttctgactgtgttagcctggaagtgcttgtcccaaccttgtttctgagc
